(19) United States
(12) Patent Application Publication
(10) Pub. No.: US 2014/0325702 A1
(43) Pub. Date: Oct. 30, 2014

(54) Methods for genetic control of plant pest infestation and compositions thereof

(71) Applicants: Andrey A. Boukharov, Wildwood, MO (US); Zijin Du, Chesterfield, MO (US); Liang Guo, St. Louis, MO (US); David K. Kovalic, Clayton, MO (US); Maolong Lu, St. Louis, MO (US); James P. McCarter, St. Louis, MO (US); Nancy M. Miller, Fenton, MO (US); Mark Vaudin, Cambridgeshire (GB); Deryck Jeremy Williams, University City, MO (US); Wei Wu, St. Louis, MO (US)

(72) Inventors: Andrey A. Boukharov, Wildwood, MO (US); Zijin Du, Chesterfield, MO (US); Liang Guo, St. Louis, MO (US); David K. Kovalic, Clayton, MO (US); Maolong Lu, St. Louis, MO (US); James P. McCarter, St. Louis, MO (US); Nancy M. Miller, Fenton, MO (US); Mark Vaudin, Cambridgeshire (GB); Deryck Jeremy Williams, University City, MO (US); Wei Wu, St. Louis, MO (US)

(21) Appl. No.: 13/374,480

(22) Filed: Dec. 29, 2011

Related U.S. Application Data
(63) Continuation of application No. 11/360,355, filed on Feb. 23, 2006, now Pat. No. 8,088,976.
(60) Provisional application No. 60/655,875, filed on Feb. 24, 2005.

(51) Int. Cl. C12N 15/82

(52) U.S. Cl. CPC C12N 15/8285
USPC 800/279; 536/23.5; 506/16; 435/320.1; 530/350; 800/301

(57) ABSTRACT

The present invention is directed to controlling plant pest infestation, and particularly plant nematode infestation, by inhibiting one or more biological functions in the plant pest. The invention discloses methods and compositions for use in controlling plant pest infestation by providing one or more different recombinant double stranded RNA molecules in the diet of the pest in order to achieve a reduction in pest infestation through suppression of pest gene expression. The invention is also directed to methods for making transgenic plants that express the double stranded RNA molecules, to methods for detecting cells comprising the disclosed sequences, and to methods for detecting the disclosed sequences in biological samples.

### CROSS REFERENCE TO RELATED APPLICATIONS

[0001] This application claims the benefit of priority to U.S. Provisional Patent Application Ser. No. 60/655,875 filed Feb. 24, 2005, and the sequence listing filed along with that application, which is incorporated herein by reference in its entirety.

### FIELD OF THE INVENTION

[0002] The present invention relates generally to the field of molecular biology and more specifically to the genetic control of plant pests, and even more particularly to the genetic control of Heterodera nematode infestations in plants. More specifically, the present invention relates to methods for modifying expression of one or more polynucleotide and/or protein molecules in one or more cells or tissues of a pest species. The present invention discloses substantially the entire genome sequence of the plant nematode pest, Heterodera glycines, and describes the use of these sequences to modify the expression of one or more target polynucleotide or protein molecules in at least the cells of a Heterodera species by providing in its diet a dsRNA that comprises a part of, or all, or substantially all of one or more polynucleotide molecules of the present invention.

### BACKGROUND OF THE INVENTION

[0003] Plants and animals are targets of many different pests, including but not limited to nematode and insect pest species. Crops are often the targets of nematode infestations. Chemical nematicides are not effective in eradicating the nematode infestations. Chemical pesticidal agents are not selective and exert their effects on non-target fauna as well, often effectively sterilizing for a period of time a field over which the chemical nematicidal agents have been applied. Some chemical pesticidal agents have been shown to accumulate in food, and to exhibit adverse effects on workers that manufacture and apply such chemical agents. Thus there has been a long felt need for methods for controlling or eradicating nematode pest infestation on or in plants, i.e., methods which are selective, environmentally inert, non-persistent, biodegradable, and that fit well into pest resistance management schemes. Plant biotechnology provides a means to control pest infestations by providing plants that express one or more pest control agents. Recombinant pest control agents have generally been reported to be proteins selectively toxic to a target pest that are expressed by the cells of a recombinant plant. Recently, small RNA molecules provided in the diet of the pest species Meloidogyne incognita have been shown to exhibit effects on the viability of the pest by affecting gene expression in the pest cells (Tobias et al. WO 01/37654 A2). Recombinant approaches to plant pest control can be selective, and are environmentally inert and non-persistent because they are fully biodegradable.

[0004] The phenomenon of dsRNA mediated gene silencing has been demonstrated in a number of plant and animal systems (Fire et al. 1998 Nature 391:806-811; Waterhouse et al. 1998 PNAS USA 95:13959-13964; Tabara et al. 1998 Science 282:430-431; Fire et al. WO 99/32619 A1; Trick et al. WO 2004/005485 A2). Methods for delivering dsRNA into the animal systems involved generating transgenic insects that express double stranded RNA molecules or injecting dsRNA solutions into the body of the animal or within the egg sac prior to or during embryonic development. Double stranded RNA mediated gene suppression has been demonstrated in plant parasitic nematodes either by providing dsRNA or miRNA's in the nematodes' diet or by soaking the nematodes in solutions containing such RNA molecules (Atkinson et al., (The University of Leeds) WO 03/052110 A2; Trick et al., (Kansas State University Research Foundation) US 2004-009876A1). Cyst nematodes (Heterodera and Globodera species) are particularly damaging pests of crop plants. Cyst nematodes include but are not limited to Heterodera avenae, H. cruciferae, H. glycines, H. hordecalis, H. latipons, H. oryzae, H. oryzicola, H. rostochinesis, H. zeae, H. schachtii, G. achilleae, G. artemisiae, G. mexicana, G. millefolii, G. pallida, G. rostochiensis, G. tabacum, G. tabacum solanacearum, G. tabacum tabacum, G. tabacum virginiae, Globodera sp. Bouro, Globodera sp. Canha, Globodera sp. Ladeiro, Globodera sp. New Zealand-EK-2004, and Globodera sp. Peru-EK-2004. These species are known to parasitize a wide variety of crops including, but not limited to barley, corn, oats, rice, rye, wheat, cabbage, cauliflower, soybean, sugar beet, spinach, mustards, and potato. Cyst nematodes are particularly problematic. Eggs persist and remain viable in the soil for many years. Genetic resistance by conventional crop breeding has limited success in identifying resistance genes effective against the wide variety of races and biotypes of the cyst nematodes. Of particular concern is the soybean cyst nematode, Heterodera glycines, herein referred to as SCN.

[0005] Therefore, there exists a need for improved methods and compositions useful to modulate gene expression by repressing, delaying or otherwise reducing gene expression within a particular plant nematode pest for the purpose of controlling the nematode infestation or to introduce novel agronomically valuable phenotypic traits.

### SUMMARY OF THE INVENTION

[0006] The present invention comprises methods and compositions for inhibiting expression of one or more target genes and proteins at least in cyst nematodes such as members of the Heterodera and Globodera species. More specifically, the present invention comprises a method of modulating or inhibiting expression of one or more target genes in Heterodera glycines and Heterodera schactii, to cause cessation of feeding, growth, development, reproduction and infectivity and eventually result in the death of the nematode pest. The method comprises introduction of partial or fully, stabilized double-stranded RNA (dsRNA) or its modified forms, such as small interfering RNA (siRNA) or micro RNA (miRNA) sequences, into the cells of the nematode wherein expression of at least one or more target genes is inhibited in the target nematode pest, wherein inhibition of the one or more target genes exerts a deleterious effect upon the nematode pest, wherein the dsRNA, siRNA, or miRNA are derived from the target gene sequences, specifically inhibit such target genes in the target pest, and so are specific to nematode pests such as those of the Heterodera species. It is specifically contemplated that the methods and compositions of the present invention will be useful in limiting or eliminating Heterodera infestation in or on any cyst nematode host by providing one or more compositions comprising dsRNA molecules in the diet of the nematode, wherein the diet is all or part of a plant cell.

[0007] In another aspect of the present invention, DNA molecules of the present invention comprise molecules that function as promoter sequences, polypeptide coding sequences, non-coding regulatory sequences, or polyadenylation sequences isolated from the genome of the soybean cyst nematode, the polynucleotide sequence of which is at least from about 75, 76, 77, 78, 79, 80, 81, 82, 83, 84, 85, 86, 87, 88, 89, 90, 91, 92, 93, 94, 95, 96, 97, 98, 99, or about 100% identical to sequences selected from the group consisting of SEQ ID NO: 1 through SEQ ID NO:45568, the complement thereof, or a portion thereof. A DNA molecule selected from the group consisting of SEQ ID NO:97730 through SEQ ID NO:119145 exhibits promoter activity, and a DNA molecule selected from the group consisting of SEQ ID NO:45569 through SEQ ID NO:47643 comprises at least one protein coding sequence, whether or not a complete open reading frame is exhibited.

[0008] Accordingly, in another aspect of the present invention, a set of isolated and purified polynucleotide sequences as set forth in SEQ ID NO:45569 through SEQ ID NO:47643 are provided as target sequences for the design of DNA constructs that express a stabilized dsRNA, siRNA, or miRNA molecule for inhibition of expression of a target gene in a nematode pest. A stabilized dsRNA, siRNA, or miRNA molecule can comprise two or more polynucleotide molecules that are arranged in a sense and an antisense orientation relative to at least one promoter, wherein the polynucleotide molecule that comprises a sense strand and an antisense strand are linked or connected by a spacer sequence of at least from about five to about one thousand nucleotides, wherein the sense strand and the antisense strand are at least about the same length, and wherein each of the two polynucleotide sequences shares at least about 80% sequence identity, at least about 90%, at least about 95%, at least about 98%, or even about 100% sequence identity, to a polynucleotide sequence as set forth in one of SEQ ID NO:45569 through SEQ ID NO:47643.

[0009] The present invention provides a method for identifying a DNA molecule for use as a DNA construct expressing a dsRNA-mediated gene silencing sequence in a plant cell, comprising selecting a target polynucleotide molecule of a Heterodera glycines polynucleotide sequence comprising 21 or more contiguous nucleotides wherein said polynucleotide sequence is selected from the group consisting of SEQ ID NO:45569-50775, SEQ ID NO:45569-47643, and SEQ ID NO:47644-50775.

[0010] The present invention also provides a recombinant DNA molecule for use in plant transformation, constructed to contain at least one polynucleotide molecule transcribed as a single stranded RNA molecule. The single stranded RNA molecule is capable of forming in vivo a double stranded RNA molecule through intermolecular hybridization that, when provided in the diet of a nematode pest, inhibits the expression of at least one target gene in one or more cells of the target organism. The polynucleotide molecule is operably linked to at least one promoter sequence that functions in a transgenic plant cell to transcribe the polynucleotide molecule into one or more ribonucleic acid molecules. The RNA molecule(s) self assemble into double stranded RNA molecules and are provided in the diet of a target pest that feeds upon the transgenic plant. The provision of the dsRNA molecule in the diet of the pest achieves the desired inhibition of expression of one or more target genes within the pest organism, resulting in fecundicity, morbidity, and/or mortality of the target pest.

[0011] The present invention also provides a recombinant plant cell having in its genome at least one recombinant DNA sequence that is transcribed to produce at least one dsRNA molecule that functions when the cell and/or its contents are ingested by a target nematode or pest to inhibit the expression of at least one target gene in the target nematode or pest. The dsRNA molecule is transcribed from all or a portion of a polynucleotide molecule that at least in part exhibits from about 75 to about 100% identity to a target nematode specific polynucleotide sequence as set forth in SEQ ID NO:45569 through SEQ ID NO:50775.

[0012] The present invention also provides a recombinant DNA construct for expression of a dsRNA-mediated gene silencing sequence in a plant cell, which comprises at least two different target sequences that, when expressed in vivo as RNA sequences and provided in the diet of a target nematode pest, inhibit the expression of at least two different target genes in one or more cells or tissues of the target nematode pest. A first target sequence exhibits at least from about 75 to about 100 percent identity to a first specific polynucleotide sequence region as set forth in SEQ ID NO:45569-SEQ ID NO:50775, and a second target sequence that is different from the first target sequence exhibits at least about 75 to about 100 percent identity to a second specific polynucleotide sequence region as set forth in SEQ ID NO:45569 through SEQ ID NO:50775, wherein the two or more target sequences are assembled in a DNA construct and expressed together as a single RNA transcript, and are constructed to form one or more dsRNA's useful in suppression of the one or more target genes. The DNA construct is transformed into a soybean cell, and the cell is regenerated into a recombinant plant. The dsRNA molecules are thus provided in the diet of the target nematode pest in a target nematode pest inhibitory concentration. Ingestion by the target nematode pest of recombinant plant cells or tissues expressing the recombinant dsRNA achieves the desired inhibition of expression of one or more target genes in the nematode, resulting in the fecundicity, morbidity, and/or mortality of the target nematode pest.

[0013] Another aspect of the present invention is the use of the nucleotide sequences disclosed herein to identify target sequences that occur in the transcript RNA of other plant pests, in particular insect pests, fungal pests, and nematode pests, that could be targeted simultaneously and/or contemporaneously with a single expression construct designed to suppress related genes in multiple plant pests by identifying sequences of sufficient length and identity in two or more different plant pests, and ensuring that the DNA construct used to produce a recombinant plant expresses one or more dsRNA molecules that function to effectively suppress one or more related genes in the two or more different plant pests. In particular, some contiguous nucleotide sequences equal to or greater than about 21-24 nucleotides in length are identified herein to be present within the genome of the soybean cyst nematode (SCN) Heterodera glycines and have been identified to be present as well in Heterodera schactii, and to some extent, other pest species as well, such as in several other nematode pest species as well as in other plant pest species such as specific insect nucleotide sequences, and in animal pest species such as insect pest species. Such sequences may be useful for effectively suppressing a target sequence in these plant pests, particularly when expressed as a dsRNA molecule in a recombinant plant cell that is provided in the diet of the pest, and can provide resistance to the plant from pest infestation from all or substantially all pests in which such sequences appear, in particular if the sequences in common are within genes shown to be essential for survival, reproduction, mobility, and/or development and differentiation.

[0014] The target sequences disclosed in the present invention can be used to identify related target sequences that occur in the transcript RNA of other pest species, particularly nematode species including but not limited to pests such as Heterodera species such as H. avenae, H. ciceri, H. crucifera, H. cyperi, H. fici, H. goettingiana, H. hordecalis, H. humuli, H. latipons, H. litoralis, H. medicaginis, H. mediterranea, H. oryzae, H. oryzicola, H. riparia, H. rostochinesis, H. salixophila, H. schachtii, H. sorghi, H. trifolii, H. turcomanica, and H. zeae, Meloidogyne species such as M. arenaria, M. chitwoodi, M. artiellia, M. fallax, M. hapla, M. javanica, M. incognita, M. microtyla, M. partityla, M. panyuensis, and M. paranaensis, Globodera species such as G. pallida, G. rostochiensis, and G. tabacum, Pratylenchus species such as P. brachyrus, P. crenatus, P. coffeae, P. magnica, P. neglectu, P. penetrans, P. scribneri, P. thornei, and P. vulnus. Other plant pest nematode species that are within the scope of the present invention include but are not limited to Xiphinema species, Nacobbus species, Hoplolaimus species, Paratylenchus species, Rotylenchulus species, Criconemella species, Hemicycliophora species, Helicotylenchus species, Rotylenchus species, Belonolaimus species, Trichodorus species, Tylenchorhynchus species, Radopholus species, Longidorus species, Dolichodorus species, Aphenlenchoides species, Ditylenchus species, Anguina species, and Tylenchulus species. A DNA construct that expresses a dsRNA molecule in a plant cell that has a target sequence common to multiple plant pests provides plant resistance to pest infestation from each pest containing such target sequences. A particular target sequence can be amplified within a single dsRNA transcript, and can contain only a single contiguous sequence of at least from about 17 to about 21 to about 50 nucleotides in common between any combination of pests, or can be comprised of a chimera consisting of various contiguous sequences of at least from about 17 to about 21 to about 50 or more nucleotides, each such contiguous sequence either being in common between two or more pests, or unique to only a single pest, such that the chimera, when present as a dsRNA sequence and provided in the diet of any one or more of the targeted pests, results in the effective control such one or more pests.

[0015] The present invention also provides a method for producing a transgenic plant by introducing into the genome of the plants' cells a polynucleotide sequence consisting of all or a portion of at least one of the aforementioned SCN specific recombinant DNA sequences, linked to linked substantially the complement of that sequence. Transgenic plants are generated from the transformed plant cell, and progeny plants, seeds, and plant products, each comprising the polynucleotide sequence, are produced from the transgenic plants.

[0016] The methods and compositions of the present invention may be applied to any monocot and dicot plant, depending on the pest species to be controlled and the host range of the nematode pest. Specifically, the plants are intended to comprise without limitation alfalfa, aneth, apple, apricot, artichoke, arugula, asparagus, avocado, banana, barley, beans, beet, blackberry, blueberry, broccoli, brussel sprouts, cabbage, canola, cantaloupe, carrot, cassava, cauliflower, celery, cherry, cilantro, citrus, clementine, coffee, corn, cotton, cucumber, Douglas fir, eggplant, endive, escarole, eucalyptus, fennel, figs, gourd, grape, grapefruit, honey dew, jicama, kiwifruit, lettuce, leeks, lemon, lime, Loblolly pine, mango, melon, mushroom, nut, oat, okra, onion, orange, an ornamental plant, papaya, parsley, pea, peach, peanut, pear, pepper, persimmon, pine, pineapple, plantain, plum, pomegranate, poplar, potato, pumpkin, quince, radiata pine, radicchio, radish, raspberry, rice, rye, sorghum, Southern pine, soybean, spinach, squash, strawberry, sugar beet, sugarcane, sunflower, sweet potato, sweetgum, tangerine, tea, tobacco, tomato, turf, a vine, watermelon, wheat, yams, and zucchini plants. Preferably, the present invention is related to a transgenic soybean plant that contains in its genome a DNA construct that expresses a dsRNA molecule from any sequence of the present invention.

[0017] The invention also provides a computer readable medium having recorded thereon one or more of the sequences as set forth in SEQ ID NO:1 through SEQ ID NO:171306 and, with reference to nucleotide sequences, the complements thereof, for use in a number of computer based applications, including but not limited to DNA identity and similarity searching, protein identity and similarity searching, transcription profiling characterizations, comparisons between genomes, and artificial hybridization analyses.

### BRIEF DESCRIPTION OF THE SEQUENCES

[0018] SEQ ID NO:1-SEQ ID NO:45568 correspond to individual sequences (singletons) and assembled singletons forming contiguous overlapping sequences (contigs) derived from DNA sequence analysis of one or more libraries produced from the genome of the soybean cyst nematode strain OP25.

[0019] SEQ ID NO:45569-SEQ ID NO:97729 correspond to sequences predicted to encode various proteins, tRNA's, rRNA's and the like, which were identified using the bioinformatics described herein as applied to SEQ ID NO:1-SEQ ID NO:45568, and are further defined in blocks of sequences corresponding to coding sequences characterized as (a) essential to SCN survival (SEQ ID NO:45569-SEQ ID NO:50775) and (b) other coding sequences and elements (SEQ ID NO:50776-SEQ ID NO:97729); and where the essential sequences are further defined in blocks of sequences corresponding to unigenes, ESTs, or cDNA's which were (c) linked through bioinformatics analyses described herein to counterpart sequences entirely or partially known in the art (SEQ ID NO:47644-SEQ ID NO:50775) and (d) unique sequences exhibiting no known relationship to sequences known in the art (SEQ ID NO:45569-47643).

[0020] SEQ ID NO:97730-SEQ ID NO:119145 correspond to sequences predicted to comprise all or substantially all of one or more SCN promoter sequences.

[0021] SEQ ID NO:119146-SEQ ID NO:124352 correspond to amino acid sequences predicted to be encoded from the (a) essential and (b) other coding sequences set forth in SEQ ID NO:45569-SEQ ID NO:97729, and are further defined in blocks of sequences corresponding to (c) peptides essential to SCN survival, as set forth in SEQ ID NO:121221-SEQ ID NO:124352, each based on one or more BLASTP relationship to one or more proteins known to be essential to survival of C. elegans or other organisms (translated from SEQ ID NO:47644-SEQ ID NO:50775), and (d) other peptides lacking any BLASTP relationship to proteins known in the art, as set forth in SEQ ID NO:119146-SEQ ID NO:121220 (translated from SEQ ID NO:45569-SEQ ID NO:47643).

### DETAILED DESCRIPTION OF THE INVENTION

[0022] The following is a detailed description of the invention provided to aid those skilled in the art in practicing the present invention. Those of ordinary skill in the art may make modifications and variations in the embodiments described herein without departing from the spirit or scope of the present invention.

[0023] The inventors have discovered all or substantially all of the polynucleotide sequences that comprise the genomic DNA obtained from the soybean cyst nematode Heterodera glycines, aligned the sequences to derived large blocks of sequence corresponding to genomic contigs set forth herein, analyzed these contigs to identify and characterize untranslated regulatory sequences, for example, promoters, introns, transcriptional initiation sequences, and polyadenylation signals. Genomic polynucleic acid sequences encoding all or part of one or more proteins and characterized as being essential for survival, such as amino acid sequences involved in various metabolic or catabolic biochemical pathways, cell division, reproduction, energy metabolism, digestion, neurological function and the like, are identified in the genomic DNA sequences disclosed in the present invention, and regions of such sequences are demonstrated herein as being useful for selection for use in preparing DNA constructs for use in transforming cells, and that also express double stranded RNA molecules from such constructs in the transformed cells, and when provided in the diet of a target pest, whether artificial diet or a natural diet, especially a plant cell, plant tissues or other plant parts, such as leaves, roots, stems, flowers, fruits or seeds, results in the fecundicity, morbidity, and/or mortality of the pest.

[0024] As described herein, ingestion by a target nematode pest of compositions containing one or more dsRNA molecules, wherein at least one segment of the dsRNA molecule corresponds to a substantially identical segment of RNA produced in the cells of the nematode, will result in death, growth inhibition, stunting, inhibition of maturation or fecundity of the nematode. These results indicate that a polynucleotide molecule, either DNA or RNA, derived from SCN can be used to design a DNA construct according to the methods of the present invention to express a recombinant gene product in a transgenic host cell. The host cell can be transformed to contain one or more of the polynucleotide molecules derived from sequences disclosed herein. The DNA construct transformed into the host cell transcribes one or more RNA sequences that form into a dsRNA molecule in the cell or biological fluids within the transformed host, thus making the dsRNA available for ingestion by nematode when it feeds upon the transgenic host. Therefore, the transformed host cell now contains within its genome the genetic potential to defend the host cell and its parents, siblings and children from attack by the nematode.

[0025] The present invention relates to genetic control of nematode infestations in host organisms. More particularly, the present invention includes the DNA constructs, selection of target polynucleotides and methods for delivery of nematode control agents to a nematode. The present invention provides methods for employing stabilized dsRNA molecules in the diet of the nematode as a means for suppression of targeted genes in the nematode, thus achieving desired control of nematode infestations in, or about the host or symbiont targeted by the nematode. The preferred host is a plant wherein the plant is transformed with a recombinant DNA construct that expresses recombinant stabilized dsRNA, siRNA, and/or miRNA molecules. The recombinant DNA construct comprises a nucleotide sequence that is transcribed into RNA by the host cell. The term “recombinant DNA” or “recombinant nucleotide sequence” refers to DNA that contains a genetically engineered modification through manipulation as a result of methods for mutagenesis, use of restriction enzymes, and thermal amplification methods, and the like.

[0026] The dsRNA molecules, siRNA molecules, and/or miRNA molecules of the present invention are homologous or complementary to at least about a contiguous 17-21 nucleotide sequence selected from the group consisting of SEQ ID NO:45569 through SEQ ID NO:97729. Isolated and purified nucleotide sequences from a SCN are provided from a genomic library constructed from polynucleotide sequences of the pest. The ingestion of such nucleotide sequences results in the reduction or elimination of an essential gene product necessary for the nematode's growth and development or other biological function.

[0027] The present invention also contemplates a transformed plant cell and transformed plants and their progeny. The transformed plant cells and transformed plants express one or more of the dsRNA, siRNA, or miRNA sequences of the present invention from one or more of the DNA sequences as set forth in SEQ ID NO:1-SEQ ID NO:45568 and SEQ ID NO:45569 through SEQ ID NO:97729, or the complement thereof.

[0028] As used herein the words “gene suppression”, when taken together, are intended to refer to any method for reducing the levels of a gene product as a result of gene transcription to mRNA. Gene suppression is also intended to mean the reduction of protein expression from a gene or a coding sequence including posttranscriptional gene suppression and transcriptional suppression. Posttranscriptional gene suppression is intended to refer to that suppression mediated by the homology between all or a part of an RNA transcript transcribed from a gene or coding sequence targeted for suppression and the corresponding double stranded RNA used for suppression, and refers to the substantial and measurable reduction of the amount of available mRNA available in the cell for binding by ribosomes. The transcribed RNA can be in the sense orientation to effect what is referred to as co-suppression, in the anti-sense orientation to effect what is referred to as anti-sense suppression, or in both orientations producing a dsRNA to effect what is referred to as RNA interference (RNAi). Transcriptional suppression is intended to refer to that suppression mediated by the presence in the cell of a dsRNA, a gene suppression agent, exhibiting substantial sequence identity to a promoter DNA sequence or the complement thereof to effect what is referred to as promoter trans suppression. Gene suppression may be effective against a native plant gene associated with a trait, e.g., to provide plants with reduced levels of a protein encoded by the native gene or with enhanced or reduced levels of an affected metabolite. Gene suppression can also be effective against target genes in plant nematodes that may ingest or contact plant material containing gene suppression agents, specifically designed to inhibit or suppress the expression of one or more homologous or complementary sequences in the cells of a nematode or other pest.

[0029] Post-transcriptional gene suppression by anti-sense or sense oriented RNA to regulate gene expression in plant cells is disclosed in U.S. Pat. Nos. 5,107,065, 5,759,829, 5,283,184, and 5,231,020. The use of dsRNA to suppress genes in plants is disclosed in WO 99/53050, WO 99/49029, U.S. Patent Application Publication 2003/0175965 A1, and 2003/0061626 A1, U.S. patent application Ser. No. 10/465,800, and U.S. Pat. Nos. 6,506,559, and 6,326,193.

[0030] A preferred method of post transcriptional gene suppression in plants employs both sense-oriented and anti-sense-oriented, transcribed RNA, which is stabilized, e.g., as a hairpin and stem and loop structure. A preferred DNA construct for effecting post-transcriptional gene suppression is one in which a first segment transcribes an RNA molecule in an anti-sense orientation relative to the mRNA of the gene transcript targeted for suppression, the first segment further linked to a second segment spacer region that is not homologous or complementary to the first segment, and linked to a third segment that transcribes an RNA, wherein a portion is substantially complementarity to the first segment. Such a construct would be expected to form a stem and loop structure by hybridization of the first segment with the third segment and a loop structure forms comprising the second segment (WO94/01550, WO98/05770, US 2002/0048814A1, and US 2003/0018993A1).

[0031] As used herein, the term “nucleic acid”, “polynucleic acid”, or “polynucleotide” refers to a single or double-stranded polymer of deoxyribonucleotide or ribonucleotide bases (also referred to as nucleotides) read from the 5′ to the 3′ end. The polynucleic acid may optionally contain non-naturally occurring or altered nucleotide bases that permit correct read through by a polymerase. The term “nucleotide sequence” or “polynucleic acid sequence” may refer to both the sense and antisense strands of a polynucleic acid molecule as either individual single strands or in the duplex. The term “ribonucleic acid” (RNA) is inclusive of RNAi (inhibitory RNA), dsRNA (double stranded RNA), siRNA (small interfering RNA), mRNA (messenger RNA), miRNA (micro-RNA), tRNA (transfer RNA, whether charged or discharged with a corresponding acylated amino acid), and cRNA (complementary RNA) and the term “deoxyribonucleic acid” (DNA) is inclusive of cDNA and genomic DNA and DNA-RNA hybrids. The words “nucleic acid segment”, “nucleotide sequence segment”, or more generally “segment” will be understood by those in the art as a functional term that includes genomic sequences, ribosomal RNA sequences, transfer RNA sequences, messenger RNA sequences, operon sequences and smaller engineered nucleotide sequences or portions thereof that control or affect the expression of a gene product or that may be adapted to express proteins, polypeptides or peptides. A polynucleic acid may optionally contain naturally occurring or altered nucleotide bases that prevent polymerization by a first polymerase copying the strand that contains such base(s), i.e., one or more bases that cannot be templated by the first polymerase while polymerizing the nascent or growing strand, so that any nucleotide sequence extending beyond the non-templated base(s) results in a cohesive end that can be used to link the polynucleic acid to one or more other nucleic acid sequences linked to the complement of the cohesive end, resulting in a chimeric nucleotide sequence. The naturally occurring or altered nucleotide base(s) can then be templated to link the fragments comprising the chimeric nucleotide sequence by exposing the chimera to a second polymerase that recognizes the naturally occurring or altered nucleotide base(s) and copies that/those base(s) with fidelity (Jarrell et al. U.S. Pat. No. 6,358,712; Newton et al. 1993 21:1155-1162). This method may be particularly useful when assembling multi-component sequences for expression of an RNA sequence that folds into a dsRNA sequence and functions to suppress one or more genes in one or more target organisms.

[0032] As used herein, the term “nematode” refers to plant parasitic nematodes, in particular to members of the Tylenchoidea superfamily, and more specifically to the Heteroderidae family of nematodes that include the cyst nematodes (including at least Heterodera and Globodera species) and the rootknot nematodes (Meloidogyne species). More specifically to Heterodera species and even more specifically to Heterodera glycines, the soybean cyst nematode. Nematode species that were shown to have homologous target sequences with H. glycines polynucleotides of the present invention were: rootknot nematode species—Meloidogyne species such as M. arenaria, M. chitwoodi, M. artiellia, M. fallax, M. hapla, M. javanica, M. incognita, M. microtyla, M. partityla, M. panyuensis, and M. paranaensis; cyst nematode species—Heterodera species such as H. schachtii, Globodera species such as G. rostochiensis, G. pallida, and G. tabacum, Heterodera species such as H. trifolii, H. medicaginis, H. ciceri, H. mediterranea, H. cyperi, H. salixophila, H. zeae, H. goettingiana, H. riparia, H. humuli, H. latipons, H. sorghi, H. fici, H. litoralis, and H. turcomanica; lesion nematode species—Pratylenchus species such as P. scribneri, P. magnica, P. thornei, P. crenatus, P. brachyrus, P. vulnus, P. penetrans, P. coffeae, and P. neglectus; other plant parasitic nematode species include: Hirschmanniella species, Radopholus species such as R. similis, and Pratylenchoid magnicauda. Animal intestinal parasitic nematode species for which polynucleotides have been identified as a result of comparisons to the sequence data disclosed herein include Ascaris lumbricoides, and Ascaris suum.

[0033] As used herein, a “pest resistance” trait is a characteristic of a transgenic plant, transgenic animal, transgenic host or transgenic symbiont that causes the plant, animal, host, or symbiont to be resistant to attack from a pest that typically is capable of inflicting damage or loss to the plant, animal, host or symbiont. Such pest resistance can arise from a natural genetic variation or more typically from incorporation of recombinant DNA that confers pest resistance. Fire et al. (U.S. Pat. No. 6,506,599) generically described inhibition of pest infestation, and demonstrated gene suppression in the non-pest nematode species Caenorhabditis elegans. Similarly, Plaetinck et al. (US 2003/0061626A1) suggests using dsRNA to inhibit gene function in a variety of nematode pests. Mesa et al. (US 2003/0150017 A1) describe using DNA sequences to transform host cells to express dsRNA sequences that are substantially identical to target sequences in specific pathogens, and particularly describe constructing recombinant plants expressing such dsRNA sequences for ingestion by various plant pests, facilitating down-regulation of a gene in the genome of the pest, and improving the resistance of the plant to the pest infestation. As used herein, the term “expression” refers to the transcription and stable accumulation of a nucleotide sequence comprising both sense and antisense RNA derived from the nucleic acid sequences disclosed in the present invention, whether or not the RNA sequence is capped, spliced, and polyadenylated and trafficked into the cytoplasm of the cell. Expression may also refer to translation of mRNA into a polypeptide or protein. As used herein, the term “sense” RNA refers to an RNA transcript corresponding to a sequence or segment that, when produced by the target nematode, is in the form of a mRNA that is capable of being translated into polypeptide by the target nematode cell. As used herein, the term “antisense RNA” refers to an RNA transcript that is complementary to all or a part of a mRNA that is normally produced in a cell of a nematode. The complementarity of an antisense RNA may be with any part of the specific gene transcript, i.e., at the 5′ non-coding sequence, 3′ non-translated sequence, introns, or the coding sequence. As used herein, the term “RNA transcript” refers to the product resulting from RNA polymerase-catalyzed transcription of a DNA sequence. When the RNA transcript is a perfect complementary copy of the DNA sequence, it is referred to as the primary transcript or it may be an RNA sequence derived from post-transcriptional processing of the primary transcript and is referred to as the mature RNA.

[0034] Exposure of a plant cyst forming nematode to the dsRNA, siRNA, or miRNA sequences of the present invention may occur during the nematodes' juvenile J2, J3, J4, adult female or adult male developmental stages. Exposure may occur as the J2 or male nematode is migrating through the plant vasculature, for example the cortical cells, or during or after establishment of a feeding site within syncytial cells. Exposure may occur by the production of the dsRNA in neighboring transfer-like cells with movement into the feeding site. dsRNA, siRNA, or miRNA may enter the nematode through a variety of means including, for example, through the stylet and pharnyx, the anus, the extratory duct, or amphidial and phasmid channels. dsRNA produced in the tissues of the feeding site may enter the nematode by transport through the feeding tube (Hussey, R S and Grundler et. al., 1998, Nematode parasitism of plants, Ch. 9, The Physiology and Biochemistry of Free-living and Plant-parasitic Nematodes, eds R N Perry and D J Wright), directly from the cytoplasm, from extracellular regions, or from other plant compartments. Movement of dsRNA, siRNA, or miRNA into the nematode may require that the RNA exhibit a molecular weight of less than or substantially less than 25 Kda (feeding tube size threshold). Creating an siRNA or miRNA in the plant that is bioavailable to the nematode may require preventing the siRNA from entering or remaining within the plant RISC complex, a protein complex well in excess of 25 KD. For example, this may be accomplished through a number of means such as (1) by co-expressing a small RNA-binding protein that exhibits a greater affinity for the plant RISC complex compared to the nematode specific siRNA, (2) by producing in the transgenic cell a nematode specific siRNA that is incompatible with the plant RISC complex yet functional in the nematode RISC complex, or (3) by down-regulating RISC complex expression in the feeding site established by the nematode. Small RNA-binding proteins may be optimized for binding to a specific siRNA or miRNA by modifying amino acid residues by phage display or other peptide selection methods.

[0035] As used herein, the phrase “inhibition of gene expression” or “inhibiting expression of a target gene in the cell of a nematode” may refer to the absence (or observable decrease) in the level of protein and/or mRNA product from the target gene. In the event that a particular transcript or translation product is not detectable, whether or not the lack of detection is a result of the expression of a dsRNA specifically designed to suppress the levels of such transcript or translation product, the phrase “inhibition of gene expression” or “inhibiting expression of a target gene in the cell of a nematode” may refer to the observation of a phenotypic effect or the lack thereof within the plant or within or about the target pest that feeds upon the transgenic plant. Specificity refers to the ability to inhibit the target gene without manifest effects on other genes of the cell and without any effects on any gene within the cell that is producing the dsRNA molecule. The inhibition of gene expression of one or more target genes in the nematode may result in novel phenotypic traits in the nematode.

[0036] Without limiting the scope of the present invention, there is provided, in one aspect, a method for controlling plant infestation by a nematode or other plant pest using stabilized dsRNA strategies. The method involves generating stabilized dsRNA molecules as one type of nematode control agents, that when provided in the diet of the nematode, induce gene silencing. As used herein, the phrase “generating a stabilized dsRNA molecule” refers to the methods of employing recombinant DNA technologies to construct a DNA nucleotide sequence that transcribes a stabilized dsRNA. As used herein, the term “silencing” refers the effective “down-regulation” of expression of one or more targeted nucleotide sequences within one or more cells of a nematode or other plant pest and, hence, the elimination of the ability of the targeted nucleotide sequence(s) to cause its normal effect within the cell.

[0037] The present invention also provides in part a delivery system for providing a nematode control agent to a nematode through exposure of the nematode to a host, such as a plant containing the one or more control agents of the present invention by ingestion of the plants' cells or the contents of those cells. One embodiment of the present invention provides for generating a transgenic plant cell or a plant that contains a recombinant DNA construct transcribing the stabilized dsRNA molecules of the present invention. As used herein, the phrase “generating a transgenic plant cell or a plant” refers to the methods of employing recombinant DNA technologies to construct a plant transformation vector transcribing the stabilized dsRNA molecules of the present invention, to transform a plant cell or a plant with such vector, and to generate the transformed plant cell or transgenic plant containing a part of the vector that transcribes the stabilized dsRNA molecules. In particular, the method of the present invention may comprise a recombinant DNA construct in a cell of a plant that results in dsRNA transcripts that are substantially homologous to an RNA sequence expressed by a nucleotide sequence contained within the genome of a nematode. Where the nucleotide sequence within the genome of a nematode comprises a gene essential to the viability and infectivity of the nematode, its down-regulation results in a reduced capability of the nematode to survive and/or infect and/or cause damage to host cells. Hence, such down-regulation results in a “deleterious effect” on the maintenance, viability, and infectivity of the nematode, in that it prevents or reduces the nematode's ability to feed off of and survive on nutrients derived from the host cells. By virtue of this reduction in the nematode's viability and infectivity, resistance and/or enhanced tolerance to infection by a nematode or other plant pest is facilitated in the cells of a plant.

[0038] It is envisioned that the compositions of the present invention can be incorporated within the seeds of a plant species either as a product of expression from a recombinant gene incorporated into the genome of the plant cells, or incorporated into a coating or seed treatment that is applied to the seed before planting. A plant derived from a single plant cell transformed to contain a recombinant or heterologous gene is considered herein to be a transgenic event.

[0039] The present invention also includes seeds and plants having more that one agronomically important trait. Such combinations are referred to as “stacked” traits. These stacked traits can include a combination of traits that are directed at the same target nematode pest, or they can be directed at different target nematode pests, or to one or more insect pests, or can provide herbicide tolerance to the plant, for example tolerance to glyphosate herbicide. The stacked traits can be achieved by breeding to plants that have the trait or by building a chimeric DNA construct that contains multiple plant expression cassettes and transforming the expression cassettes into the genome of the plant.

[0040] Cells of a plant seed of the present invention may express one or more dsRNA's, the sequence of any one of which is derived from a target sequence, i.e., a nematode specific sequence disclosed herein in SEQ ID NO:1-SEQ ID NO:45569, and also may express a nucleotide sequence that provides herbicide tolerance, for example, resistance to glyphosate, N-(phosphonomethyl)glycine, including the isopropylamine salt form of such herbicide. Herbicides for which transgenic plant tolerance has been demonstrated include but are not limited to: glyphosate, glufosinate, sulfonylureas, imidazolinones, bromoxynil, delapon, cyclohezanedione, protoporphyrionogen oxidase inhibitors, and isoxasflutole herbicides. Polynucleotide molecules encoding proteins involved in herbicide tolerance are known in the art, and include, but are not limited to a polynucleotide molecule encoding 5-enolpyruvylshikimate-3-phosphate synthase, bromoxynil nitrilase, phytoene desaturase, norflurazon, acetohydroxyacid synthase and the bar gene for tolerance to glufosinate and bialaphos (U.S. Pat. Nos. 5,627,061, 5,633,435, 6,040,497, 5,094,945, and 4,810,648).

[0041] As used herein, the term “pest control agent”, or “gene suppression agent” refers to one or more particular RNA molecules consisting of a first RNA segment and a second RNA segment that are complimentary to each other and are linked by a third RNA segment. The complementarity between the first and the second RNA segments results in the ability of the two segments to hybridize in vivo and in vitro to form a double stranded molecule, i.e., a stem comprising the first and the second segments linked together by the third segment which forms a loop between the first and second segments, so that the entire structure forms into a stem and loop structure. Structures consisting of a first and a second segment that hybridize more tightly to each other may form into a stem-loop knotted structure. The first and the second segments, when hybridized together, correspond invariably, and not respectively, to a sense and an antisense sequence with respect to the target RNA transcribed from the target gene in the target nematode that is suppressed by the ingestion of the dsRNA molecule, or ingestion of an siRNA molecule derived from the dsRNA molecule. The pest control agent can also be a substantially purified (or isolated) nucleic acid molecule and more specifically nucleic acid molecules or nucleic acid fragment molecules thereof from a genomic DNA (gDNA) or cDNA library. Such substantially purified molecules can be applied to a seed, whether a seed from a transgenic plant or otherwise, in the form of a seed treatment, together with a pharmaceutically acceptable carrier for stabilizing the dsRNA molecules, resulting in the dsRNA being bioavailable within a plant grown from the seed, or bioavailability within the rhizosphere of the root system of the plant grown from the seed. A seed may be treated with one or more agents, each exhibiting different activities designed to provide the seed, the germinating seedling, and the growing plant or root with one or more advantages in comparison to other plants, such as pest resistance, including bacterial, fungal, and nematode resistance, fertilizers, growth stimulants, gene stimulants or suppressors, herbicide functions to which the seed, germ, and or roots and seedling are resistant, and the like. Alternatively, the fragments may comprise smaller dsRNA oligonucleotides comprising from about 15 to about 750 or more consecutive nucleotides selected from the group consisting of SEQ ID NO:1-SEQ ID NO:45569 and the complements thereof, or from about 15 to about 30 nucleotides, or from about 21 to about 24 consecutive nucleotides. The pest control agent may also refer to a DNA construct that comprises the polynucleic acid molecules or nucleic acid fragment molecules of the present invention and the DNA construct is a transgene incorporated into the genome of a host cell. The pest control agent may further refer to a plant comprising such a DNA construct in its genome or in the genome of a subcellular organelle that comprises the polynucleic acid molecules or nucleic acid fragment molecules described in the present invention. The method of the present invention provides for the production of a dsRNA transcript, the nucleotide sequence of which is substantially homologous to a targeted RNA sequence encoded by a target nucleotide sequence within the genome of a target pest.

[0042] As used herein, the term “genome” as it applies to cells of a nematode, a plant pest, or a host encompasses not only chromosomal DNA found within the nucleus, but organelle DNA found within subcellular components of the cell. The sequences of the present invention, when introduced into plant cells, can therefore be either chromosomally integrated or organelle-localized. The term “genome” as it applies to bacteria encompasses both the chromosome and plasmids within a bacterial host cell. The DNA's of the present invention introduced into bacterial host cells can therefore be either chromosomally integrated, localized to a plasmid, or to a viral vector capable of replication in the bacterial host.

[0043] In certain preferred embodiments expression of the gene targeted for suppression in the plant pest is inhibited by at least about 10%, at least about 33%, at least about 50%, at least about 80%, at least about 90%, at least about 95%, or by at least about 99% or more within cells of the nematode so a significant inhibition takes place. Significant inhibition is intended to refer to inhibition sufficient to result in a detectable phenotype (e.g., cessation of growth, paralysis, sterility, behavioral effects, second generation effects, effects observed on nematodes ingesting dsRNA or on their progeny, morbidity, or mortality, etc.) or a detectable decrease in RNA and/or protein corresponding to the target gene being inhibited. Although in certain embodiments of the invention inhibition occurs in substantially all cells of the nematode, in other preferred embodiments inhibition occurs in only a subset of cells that are contacted with the dsRNA, or that are expressing the target gene transcript.

[0044] The advantages of the present invention may include, but are not limited to the ease of introducing dsRNA into the nematode or other pest cells, the low concentration of dsRNA, siRNA, or miRNA which can be used, the stability of dsRNA, siRNA, or miRNA and the effectiveness of the inhibition. The present invention provides a method for selecting polynucleotide sequences of a target gene sequence and is not limited to in vitro use of specific sequence compositions identified by the method or to the set of exemplary target genes of the present invention. Segments of the nucleotide sequences of the present invention may be selected for their level of gene inhibition/suppression by scanning segments of the H. glycines sequences to identify segments that exhibit preferred levels of gene suppression or pest inhibition when provided as a dsRNA molecule in the diet of one or more target pests such as H. glycines.

[0045] As used herein, the term “sequence identity”, “sequence similarity” or “homology” is used to describe sequence relationships between two or more nucleotide or amino acid sequences. The percentage of “sequence identity” between two sequences is determined by comparing two optimally aligned sequences over a comparison window, wherein the portion of the sequence in the comparison window may comprise additions or deletions (i.e., gaps) as compared to the reference sequence (which does not comprise additions or deletions) for optimal alignment of the two sequences. The percentage identity of a reference sequence to another is calculated by determining the number of positions at which the reference sequence (whether nucleic acid or amino acid sequence) is identical to another sequence to yield the number of matched positions, dividing the number of matched positions by the total number of positions in the window of comparison, and multiplying the result by 100 to yield the percentage of sequence identity. A sequence that is identical at every position in comparison to a reference sequence is said to be, with respect to a nucleotide sequence or amino acid sequence, identical to the reference sequence and vice-versa. A first nucleotide sequence when observed in the 5′ to 3′ direction is said to be the “complement” of, or complementary to, a second or reference nucleotide sequence observed in the 3′ to 5′ direction if the reverse complement of the first nucleotide sequence is identical at every nucleotide position with the second or reference sequence. As used herein, two nucleic acid sequence molecules are said to exhibit “complete complementarity” when every nucleotide of one of the sequences, when read 5′ to 3′, is complementary to every nucleotide of the other sequence when read 3′ to 5′. A nucleotide sequence that is complementary to a reference nucleotide sequence will exhibit a sequence identical to the reverse complement sequence of the reference nucleotide sequence.

[0046] In practicing the present invention, a target gene may be derived from a nematode or other pest species that causes damage to one or more different crop plants and/or yield losses to such plants. Several criteria may be employed in the selection of target genes. The gene may be one whose protein product has a rapid turnover rate, so that dsRNA inhibition will result in a rapid decrease in protein levels. In certain embodiments it is advantageous to select a gene for which a small decrease in expression level results in deleterious effects for the pest. It may be desirable to target a broad range of nematode species and so a nucleotide sequence is selected that is highly conserved across the targeted range of species. Conversely, for the purpose of conferring specificity, in certain embodiments a nucleotide sequence is selected that contains regions that are poorly conserved between individual targeted pest species, or between the targeted pest and other organisms. In certain embodiments it may be desirable to select a nucleotide sequence that exhibits no known homology to sequences in other organisms. As used herein, the term “derived from” refers to a specified nucleotide sequence that may be obtained from a particular source or species.

[0047] Target genes for use in the present invention may include, for example, those that play important roles in the viability, growth, development, reproduction and infectivity of a particular pest. These target genes may be one or more of any house keeping gene, transcription factor and pest specific gene that provides an observable phenotype, in particular a phenotype that results in the suppression of feeding on or the inability to utilize a transgenic soybean plant expressing a SCN derived dsRNA as a nutrient source. For example, target genes that are anticipated herein to be effective in producing such phenotypes are similar to those that have been shown to affect the viability, growth, development, mobility, neurological stimulation, muscular function, and reproduction in C. elegans, including but not limited to the following phenotypes: (Adl) adult lethal, (Age), (Bli) blistered, (Bmd) body morphology defect, (Ced) Cell death abnormality, (Clr) clear, (Daf) DAuer Formation, (Dpy) dumpy, (Egi) egg laying defect, (Emb) embryonic lethal, (Evl) everted vulva, (Fern) feminization of XX and XO animals, (Fgc) Fewer Germ Cells, (Fog) feminization of germline, (Gon) GONad development abnormal, (Gro) slow growth, (Him) high incidence of male progeny, (Hya) HYperActive, (Let) larval lethal, (Lin) lineage abnormal, (Lon) long body, (Lpd), (Lva) larval arrest, (Lvl) larval lethal, (Mab) Male ABnormal, (Mei) Defective meiosis, (Mig) MIGration of cells abnormal, (Mlt) molt defect, (Morphology), (Mut) Mutator, (Muv) MUltiVulva, (Oma) Oocyte MAturation defective, (Pat) Paralyzed, Arrested elongation at Two-fold, (Pch) PatCHy coloration, (Pnm) Pronuclear migration alteration in early embryo, (Prl) paralyzed, (Prz) PaRaLyzed, (Pvl) protruding vulva, (Pvu) protruding vulva, (Rde), (Reproductive), (Rol) roller, (Rot) centrosome pair and associated pronuclear rotation abnormal, (Rup) exploded, (Sck) sick, (Sle) Slow embryonic development, (Slu) SLUggish, (Sma) small, (Spd) SpinDle, abnormal embryonic, (Spo) Abnormal embryonic spindle position and orientation, (Step) sterile, (Stp) sterile progeny, (Unc) uncoordinated, (Unclassified), (Vul) vulvaless, (WT), (defect) morphological or behavioral defects. SCN genome sequences predicted to encode various gene products set forth herein annotated to the C. elegans specific genes previously shown to exert a negative effect or observable phenotype in Drosophila or in C. elegans are anticipated to be effective targets for achieving a similar phenotype when expressed in planta as a dsRNA for the purpose of suppressing a gene in SCN specifically targeted by the dsRNA. Gene sequences unique to SCN and not annotated to sequences or gene products from other organisms are also anticipated to be effective for achieving control of SCN when such sequences are provided in the diet of the SCN as a dsRNA because the target genes are unique to SCN pest metabolism, physiology, and pathogenicity.

[0048] DNA segments of the present invention are desired for use in constructing dsRNA expression sequences, particularly if the DNA segments exhibit at least from about 70% identity, or at least from about 75% identity, or at least from about 80% identity, or at least from about 90% identity, or at least from about 95% identity, or at least from about 98% identity, or at least about 100% identity to contiguous 17-24 nucleotide sequences found within the nematode genome or other pest sequences targeted for suppression. Sequences less than about 80% identical to a target gene are anticipated to be less effective and so less desirable. Inhibition is specific to the nematodes' gene or gene families, the sequence of which corresponds substantially to the dsRNA. Expression of unrelated genes is not affected. This specificity allows the selective targeting of a nematode or other pest species, resulting in the absence of an effect on non-target organisms exposed to the compositions of the present invention.

[0049] The regions predicted to be more effective at dsRNA-mediated gene silencing include regions that exhibit higher siRNA efficiency. Higher siRNA efficiency may be achieved by any technique, including, but not limited to, computational methods such as algorithms designed to predict siRNA efficiency based on thermodynamic characteristics of a given dsRNA (or DNA) sequence, generally considering sequences of from about 17, to about 18, to about 19, to about 20, to about 21, to about 22, to about 23, or even to about 24 contiguous nucleotides corresponding to a sequence that is being targeted for suppression (Schwarz et al., 200, Cell 115:199-208; Chalk et al. 2004, Biochem. Biophys. Res. Comm. 319:264-274; Ui-Tei et al., NAR 2004, 32:936-948; Reynolds et al., 2004, Nature Biotechnology 22:326-330).

[0050] Inhibition of a target gene using the stabilized dsRNA technology of the present invention is sequence-specific in that nucleotide sequences corresponding to the duplex region of the RNA are targeted for genetic inhibition. RNA containing a nucleotide sequences identical to a portion of the target gene is preferred for inhibition. RNA sequences with insertions, deletions, and single point mutations relative to the target sequence are also effective for gene specific inhibition. In performance of the present invention, it is preferred that the inhibitory dsRNA and the portion of the target gene share at least from about 75% sequence identity, or from about 80% sequence identity, or from about 90% sequence identity, or from about 95% sequence identity, or from about 99% sequence identity, or even about 100% sequence identity. Alternatively, the duplex region of the RNA may be defined functionally as a nucleotide sequence that hybridizes with a portion of the target gene transcript. A greater sequence homology across a target gene sequence that is less than full-length in comparison to the target gene compensates for a less homologous sequence that more closely approximates the full length of the target gene. The length of a nucleotide sequence that is identical to a portion of the target gene sequence can be from about 21, to about 25, to about 50, to about 100, to about 200, to about 300, or more contiguous bases. Normally, a sequence of greater than 20-100 nucleotides is preferable, although a sequence of greater than about 200-300 nucleotides may be preferred, depending on the length of the target gene. The invention has the advantage of being able to tolerate sequence variations due to genetic mutation, strain polymorphism, or evolutionary divergence. Therefore the nucleic acid molecule introduced into a plant for expression as a pest specific dsRNA gene suppression construct may not need to exhibit absolute homology, and may not need to represent the full length of the sequence targeted for suppression.

[0051] The dsRNA molecules may be synthesized either in vivo or in vitro. The dsRNA may be formed by a single self-complementary RNA strand or two complementary RNA strands expressed from separate expression constructs. Endogenous RNA polymerase of the cell may mediate transcription in vivo, or cloned RNA polymerase can be used for transcription in vivo or in vitro. Inhibition may be achieved by specific transcription in an organ, tissue, or cell type; stimulation of an environmental condition (e.g., infection, stress, temperature, chemical inducers); and/or engineering transcription at a developmental stage or age of the transgenic plant expressing the dsRNA construct. The RNA sequences expressed from the recombinant construct may or may not be polyadenylated. The RNA sequences expressed from the recombinant construct may or may not be capable of being translated into a polypeptide by a cell's translational apparatus.

[0052] The RNA, dsRNA, siRNA, or miRNA of the present invention intended for use in controlling plant pest infestation may be produced chemically or enzymatically through manual or automated reactions or in vivo in an organism other than the plant for which pest control is intended. RNA may also be produced by partial or total organic synthesis. Any modified ribonucleotide can be introduced by in vitro enzymatic or organic synthesis. The RNA may be synthesized by a cellular RNA polymerase or a bacteriophage RNA polymerase (e.g., T3, T7, SP6). If synthesized chemically or by in vitro enzymatic synthesis, the RNA may be purified prior to introduction into the cell or formulated in an agronomically acceptable carrier and applied to the soil, to the roots, or to the seed prior to planting. For example, RNA can be purified from a mixture by extraction with a solvent or resin, precipitation, electrophoresis, chromatography, or a combination thereof. Alternatively, the RNA may be used with no, or a minimum of, purification to avoid losses due to sample processing. The RNA may be dried for storage or dissolved in an aqueous solution. The solution may contain buffers or salts to promote annealing, and/or stabilization of the duplex strands.

[0053] For transcription from a transgene in vivo or from an expression cassette, a regulatory region (e.g., promoter, enhancer, silencer, leader, intron and polyadenylation) may be used to modulate the transcription of the RNA strand (or strands). Therefore, in one embodiment, the polynucleotide sequences constructed to facilitate transcription of the RNA molecules of the present invention are operably linked to one or more promoter sequences functional in a plant host. The polynucleotide sequences may be placed under the control of an endogenous promoter normally present in the host genome. The polynucleotide sequences of the present invention, under the control of an operably linked promoter sequence, may further be flanked by additional sequences that advantageously affect its transcription and/or the stability of a resulting transcript. Such sequences are generally located upstream of the promoter and/or downstream of the 3′ end of the expression construct. The term “operably linked”, as used in reference to a regulatory sequence and a structural nucleotide sequence, means that the regulatory sequence causes regulated expression of the linked structural nucleotide sequence. “Regulatory sequences” or “control elements” refer to nucleotide sequences located upstream, within, or downstream of a structural nucleotide sequence, and which influence the timing and level or amount of transcription, RNA processing or stability, or translation of the associated structural nucleotide sequence. Regulatory sequences may include promoters, translation leader sequences, introns, enhancers, stem-loop structures, repressor binding sequences, termination sequences, pausing sequences, polyadenylation recognition sequences, and the like.

[0054] In another embodiment, the nucleotide sequence of the present invention comprises an inverted repeat sequence separated by a spacer sequence. The spacer sequence may be a region comprising any sequence of nucleotides that facilitates secondary structure formation between the inverted repeat sequences. In one embodiment, the spacer sequence is part of the sense or antisense polynucleotide sequence for mRNA. The spacer sequence may alternatively comprise any combination of nucleotides or homologues thereof that are capable of being linked covalently to a nucleic acid molecule. The spacer sequence may comprise a contiguous sequence of nucleotides of from about 8-100 nucleotides in length, or alternatively from about 100-200 nucleotides in length, or from about 200-400 nucleotides in length, or from about 400-500 nucleotides in length, or from about 500 to about 1500 nucleotides in length.

[0055] The gene or genes targeted for suppression may be amplified using any thermal amplification means and the precise nucleotide sequence determined. One skilled in the art is able to modify the thermal amplification conditions in order to ensure optimal amplicon product formation, and the amplicon may be used as a template for in vitro transcription to generate sense and antisense RNA with the included minimal promoters.

[0056] As used herein, the phrase “a substantially purified nucleic acid”, “an artificial sequence”, “an isolated and substantially purified nucleic acid”, or “an isolated and substantially purified nucleotide sequence”, with respect to a naturally occurring nucleotide sequence, refers to a nucleic acid molecule that is substantially removed from the composition with which it is associated in its natural state. Examples of a substantially purified nucleic acid molecule include: (1) a DNA sequence comprising the contiguous sequence at least about 17, or about 18, or about 19 or more nucleotides in length consisting of a portion of a naturally occurring DNA molecule, but which is not flanked by polynucleotide sequences occur naturally on either end of the contiguous sequence; (2) a nucleic acid molecule comprising a naturally occurring contiguous nucleotide sequence isolated from its naturally occurring state and incorporated into a DNA construct; (3) a cDNA, a genomic DNA fragment isolated and purified substantially from all other genomic DNA to which it was originally naturally associated, an amplicon fragment produced using thermal amplification procedures, or a restriction fragment; (4) recombinant DNA; and (5) synthetic DNA. A substantially purified nucleic acid may also be comprised of one or more segments of any of the sequences referred to hereinabove.

[0057] Nucleic acid molecules, fragments thereof, and complements thereof selected from the group consisting of SEQ ID NO:1-45568 may be employed as probes or primers to identify related nucleic acid molecules from other species for use in the present invention to produce desired dsRNA, siRNA, and miRNA molecules. Such related nucleic acid molecules include the nucleic acid molecules that encode the complete amino acid sequence of a protein, and the promoters and flanking sequences of such molecules. In addition, such related nucleic acid molecules include nucleic acid molecules that encode gene family members. Such molecules can be readily obtained by using the above-described nucleic acid molecules or fragments thereof to screen complementary DNA or genomic DNA libraries obtained from a nematode or other plant pest species. The screen can be any physical means such as northern, southern, or any immunologically based screening method that detects either the specific sequence of a nucleotide molecule, or the transcribed and/or translated product of such nucleotide molecule, or any mathematical algorithm that is used for comparing nucleotide sequences in silico.

[0058] Nucleic acid molecules, fragments thereof, and complements thereof selected from the group consisting of SEQ ID NO:45569-SEQ ID NO:97729 may also be used in a similar fashion to screen other genomes, libraries, and organisms for related sequences. Such related sequences are expected to include but not be limited to homologues that include nucleic acid molecules that encode, in whole or in part, protein homologues of other pest species, plants or other organisms. Such molecules can be readily obtained by using the above-described nucleic acid molecules or fragments thereof to screen EST, cDNA or gDNA libraries. Such homologous molecules may differ in their nucleotide sequences from those found in one or more of SEQ ID NO:1-SEQ ID NO:45568 and SEQ ID NO:45569 through SEQ ID NO:97729 or complements thereof, because perfect complementarity is not required for such related sequences to hybridize to each other. In a particular embodiment, methods for 3′ or 5′ RACE may be used to obtain such sequences (Frohman, M. A. et al., Proc. Natl. Acad. Sci. (U.S.A.) 85:8998-9002, 1988; Ohara, O. et al., Proc. Natl. Acad. Sci. (U.S.A.) 86:5673-5677, 1989). In general, any of the above described nucleic acid molecules or fragments may be used to generate dsRNA's, siRNA's, and/or siRNA's that are suitable for use in a diet, in a spray-on mix, or in a recombinant DNA construct of the present invention.

[0059] As used herein, the phrase “coding sequence”, “structural nucleotide sequence” or “structural nucleic acid molecule” refers to a polynucleotide molecule that is translated into a polypeptide when placed under the control of appropriate regulatory sequences. The structural nucleotide sequence, coding sequence, or structural nucleic acid molecule can be referred to using other terms in the art, but is intended to include DNA as well as RNA molecules. A coding sequence can include, but is not limited to, genomic DNA sequences or portions thereof identified to encode or to be capable of encoding a polypeptide, a cDNA produced as a result of reverse transcription of mRNA that has been purified substantially because if its ability to hybridize to a polyT sequence, expressed sequence tagged (EST) sequences, and recombinant nucleotide sequences produced specifically for expression of a protein sequence.

[0060] Two molecules are said to be “minimally complementary” if they can hybridize to one another with sufficient stability to permit them to remain annealed to one another under at least conventional “low-stringency” conditions. Similarly, the molecules are said to be complementary if they can hybridize to one another with sufficient stability to permit them to remain annealed to one another under conventional “high-stringency” conditions. Conventional stringency conditions are described by Sambrook, et al., (1985). Appropriate stringency conditions which promotes hybridization of two different nucleic acid sequences are, for example, incubation of the two sequences together in 6.0× sodium chloride/sodium citrate (SSC) at about 45° C. where one of the two different sequences is tethered in some fashion to a solid support and the untethered sequence is linked to a reporter molecule such as a ligand that can be detected using an immunological means, a fluorophores, a radioisotope, or an enzyme. The hybridization of the two sequences under the above conditions can be followed by a wash in 2.0×SSC at 50° C. to remove any excess reagents or unbound or unhybridized probe or untethered molecules (Current Protocols in Molecular Biology, John Wiley & Sons, N.Y. (1989), 6.3.1-6.3.6). For example, the salt concentration in the wash step can be selected from a low stringency of about 2.0×SSC at 50° C. to a high stringency of about 0.2×SSC at 50° C. In addition, the temperature in the wash step can be increased from low stringency conditions at room temperature (about 22° C.) to high stringency conditions (about 65° C.). Temperature and salt may be varied together or independent of each other.

[0061] A nucleic acid for use in the present invention may specifically hybridize to one or more of nucleic acid molecules from nematodes or complements thereof under moderately stringent conditions, for example at about 2.0×SSC and about 65° C. A nucleic acid for use in the present invention will include those nucleic acid molecules that specifically hybridize to one or more of the nucleic acid molecules disclosed therein as set forth in SEQ ID NO:1 through SEQ ID NO:47643 or complements thereof under high stringency conditions. Preferably, a nucleic acid for use in the present invention will exhibit at least from about 70%, at least from about 80%, at least from about 90%, at least from about 95%, at least from about 98% or even about 100% sequence identity with one or more nucleic acid molecules as set forth in SEQ ID NO:45569 through SEQ ID NO:47643.

[0062] Nucleic acids of the present invention may be entirely synthetically constructed or assembled piecemeal from naturally occurring or combinations of naturally occurring and synthetic components. All or any portion of the nucleic acids of the present invention may be synthesized without reference to codon usage calculated for any particular plant species, however when a particular sequence is intended to be effective in suppression of one or more genes in one or more pest species, it is preferable that the sequence be selected such that the sequence in any gene or species targeted for suppression be entirely or substantially entirely identical or entirely or substantially entirely complementary to the suppressor sequence.

[0063] The present invention also relates to recombinant DNA constructs for expression in a microorganism. Heterologous nucleic acids from which an RNA of interest is transcribed can be introduced into a microbial host cell, such as a bacterial cell or a fungal cell, in order to produce quantities of double stranded RNA for use in suppression of one or more genes in one or more plant pests.

[0064] The present invention also contemplates transformation of a polynucleotide sequence of the present invention into a plant to achieve nematode or other plant pest inhibitory levels of expression of one or more dsRNA molecules. A plant transformation vector comprises one or more nucleotide sequences that is/are capable of being transcribed as an RNA molecule and that is/are substantially homologous and/or complementary to one or more nucleotide sequences encoded by the genome of the nematode, or other plant pest, such that upon uptake of the RNA molecule, results in a down-regulation of expression of at least one of the respective nucleotide sequences of the nematode or other plant pest. In one embodiment the plant transformation vector is an isolated and purified DNA molecule comprising a promoter operatively linked to a contiguous nucleotide sequence comprising one or more polynucleotide molecules of the present invention selected from the group consisting of SEQ ID NO:45569 through SEC) ID NO:50775. The polynucleotide molecule includes a segment comprising all or part of a RNA molecule complementary to a targeted RNA within a nematode or pest cell, and may also contain a functional intron sequence positioned either upstream of or within the transcribed RNA sequence, and may also contain a five prime (5′) untranslated leader sequence (i.e., a UTR or 5′-UTR) positioned between the promoter and the point of transcription initiation.

[0065] A plant transformation vector may contain sequences for suppression of more than one gene, thus allowing production of more than one dsRNA for inhibiting expression of two or more genes. One skilled in the art will readily appreciate that segments of DNA whose sequence corresponds to that present in different genes can be combined into a single composite DNA segment for expression in a transgenic plant to achieve suppression of one or more nematode or pest genes, one or more plant genes, or a combination thereof. Alternatively, a plasmid of the present invention already containing at least one DNA segment can be modified by the sequential insertion of additional DNA segments between an enhancer and/or promoter and the terminator sequences. A nematode or other plant pest control agent of the present invention may be designed for the inhibition of multiple genes, and the genes to be inhibited can be obtained from the same nematode or other plant pest species in order to enhance the effectiveness of the pest control agent, or from different races/variants of the same pest species, or from different pest species or other organisms. In certain embodiments, the genes derived from different nematodes or other plant pests provide for a broadening of the range of nematodes and other plant pests against which the pest control agent is effective. When multiple genes in one pest are targeted for suppression, a polycistronic DNA element can be fabricated (Fillatti, US Patent Application Publication No. US 2004-0029283 A1).

[0066] A promoter that drives expression of a polynucleotide sequence in a particular species of plant is selected for use in expression constructs in which a nucleotide sequence of the present invention is to be used to transform a plant. Promoters that function in different plant species are known in the art. Promoters useful for expression of polypeptides in plants are those that are inducible, viral, synthetic, or constitutive as described in Odell et al. (1985 Nature 313:810-812), and/or promoters that are temporally regulated, spatially regulated, and spatio-temporally regulated. For the purpose of the present invention, e.g., for optimum control of species that feed on roots, it is preferable to achieve the highest levels of expression of these genes within the roots of plants. A number of promoters exhibiting root-enhanced levels of expression of operably linked sequences have been identified. (Lu et al., 2000 J. Plant Phys., 156(2):277-283; U.S. Pat. Nos. 5,837,848 and 6,489,542). Expression of the constructs of the present invention may preferably be from polymerase III promoters as an alternative to conventional polymerase II promoters, and also may be linked to inducible promoters, or heterologous promoters that require heterologous accessory proteins, such as for example, phage T7 promoters and the like. Promoters that are induced as a result of the establishment by a cyst nematode of a feeding site (feeding site specific promoters), and promoters up-regulated by nematode invasion are specifically contemplated for use in the present invention (Gheysen et al., 2002, Ann. Rev. Phytopathol. 40:191-219).

[0067] A recombinant DNA vector or construct of the present invention will typically comprise a marker that confers a selectable phenotype on transformed plant cells, and may also be used to select for plants or plant cells that contain the exogenous nucleic acids of the present invention. The marker may encode biocide resistance, antibiotic resistance (e.g., kanamycin, G418 bleomycin, hygromycin, etc.), or herbicide resistance (e.g., glyphosate, etc.). Examples of selectable markers include, but are not limited to, a neo gene (Potrykus et al., 1985 Mol. Gen. Genet. 199:183-188) which codes for kanamycin resistance and can be selected for using kanamycin, G418, etc.; a bar gene which codes for bialaphos resistance; a mutant EPSP synthase gene (Hinchee et al., 1988 Bio/Technology 6:915-922) which encodes glyphosate resistance; a nitrilase gene which confers resistance to bromoxynil (Stalker et al., 1988 J. Biol. Chem. 263:6310-6314); a mutant acetolactate synthase gene (ALS) which confers imidazolinone or sulphonylurea resistance (European Patent Application 154,204); an AMPA-acetyltransferase gene for resistance to phosphonates (U.S. Pat. No. 6,448,476), a methotrexate resistant DHFR gene (Thillet et al., 1988 J. Biol. Chem. 263:12500-12508), and compositions for chloroplast or plastid transformation selection (U.S. Pat. Nos. 5,693,507, 5,451,513, and WO 95/24492).

[0068] A recombinant vector or construct of the present invention may also include a screenable marker for monitoring expression. Exemplary screenable markers include a β-glucuronidase or uidA gene (GUS) which encodes an enzyme for which various chromogenic substrates are known (Jefferson, Plant Mol. Biol, Rep. 5:387-405, 1987; Jefferson et al., EMBO J. 6.3901-3907, 1987); an R-locus gene, which encodes a product that regulates the production of anthocyanin pigments (red color) in plant tissues (Dellaporta et al., Stadler Symposium 11:263-282, 1988); a β-lactamase gene (Sutcliffe et al., Proc. Natl. Acad. Sci. (U.S.A.) 75:3737-3741, 1978), a gene which encodes an enzyme for which various chromogenic substrates are known (e.g., PADAC, a chromogenic cephalosporin); a luciferase gene (Ow et al., Science 234:856-859, 1986) a xylE gene (Zukowsky et al., Proc. Natl. Acad. Sci. (U.S.A.) 80:1101-1105, 1983) which encodes a catechol dioxygenase that can convert chromogenic catechols; an α-amylase gene (Ikatu et al., Bio/Technol. 8:241-242, 1990); a tyrosinase gene (Katz et al., J. Gen. Microbiol. 129:2703-2714, 1983) which encodes an enzyme capable of oxidizing tyrosine to DOPA and dopaquinone which in turn condenses to melanin; an α-galactosidase, which catalyzes a chromogenic α-galactose substrate; and a β-galactosidase which catalyzes the conversion of a chromogenic β-galactoside substrate.

[0069] In general a functional recombinant DNA is introduced at a non-specific location in a plant genome. In special cases it may be useful to insert a recombinant DNA construct by site-specific integration. Several site-specific recombination systems exist which are known to function implants include cre-lox as disclosed in U.S. Pat. No. 4,959,317 and FLP-FRT as disclosed in U.S. Pat. No. 5,527,695.

[0070] Preferred plant transformation vectors include those derived from a Ti plasmid of Agrobacterium tumefaciens (e.g. U.S. Pat. Nos. 4,536,475, 4,693,977, 4,886,937, 5,501,967 and European Patent Application No. 0122791). Agrobacterium rhizogenes plasmids (or “Ri”) are also useful. Other preferred plant transformation vectors include those disclosed, e.g., by Herrera-Estrella (1983 Nature 303:209-213), Bevan (1983 Nature 304:184-187), Klee (1985 Bio/Technol. 3:637-642) and Eur. Pat Appl. No. EP0 120 516.

[0071] Methods and compositions for transforming plants by introducing a recombinant DNA construct into a plant genome includes any of a number of methods known in the art. One method for constructing transformed plants is microprojectile bombardment as illustrated in U.S. Pat. No. 5,015,580 (soy), U.S. Pat. No. 5,550,318 (corn), U.S. Pat. No. 5,538,880 (corn), U.S. Pat. No. 6,153,812 (wheat), U.S. Pat. No. 6,160,208 (corn), U.S. Pat. No. 6,288,312 (rice) and U.S. Pat. No. 6,399,861 (corn). Another method for constructing transformed plants is Agrobacterium-mediated transformation in cotton (U.S. Pat. No. 5,159,135), corn (U.S. Pat. No. 5,591,616), and soy (U.S. Pat. Nos. 5,824,877 & 6,384,301).

[0072] The term “transgenic plant cell” or “transgenic plant” refers to a plant cell or a plant that contains an exogenous or heterologous polynucleotide sequence. A transgenic plant also comprises progeny (seeds, and plants and seeds produced from such seeds, etc.) of any generation of such a transgenic plant or a seed of any generation of all such transgenic plants wherein said progeny or seed comprises the exogenous or heterologous polynucleotide sequence. The heterologous or polynucleotide sequence is a DNA molecule that is transcribed into the RNA, sRNA, dsRNA, siRNA, or miRNA or fragment thereof of the present invention.

[0073] A transgenic plant formed using Agrobacterium mediated transformation methods contains at least a single recombinant DNA sequence inserted into the plant chromosome and is referred to as a transgenic event. Such transgenic plants are referred to as being heterozygous for the inserted exogenous sequence. A transgenic plant homozygous with respect to a transgene can be obtained by sexually mating (selfing) an independent segregant transgenic plant that contains a single exogenous gene sequence to itself, for example an F0 plant, to produce F1 seed. One fourth of the F1 seed produced will be homozygous with respect to the transgene. F1 seed can be tested using a SNP or related thermal amplification assay that allows distinction between heterozygotes and homozygotes (i.e., a zygosity assay).

[0074] Transgenic plants can also be prepared by crossing a first plant having a recombinant DNA construct with a second plant lacking the construct. For example, a recombinant DNA designed for targeting the suppression of a target gene can be introduced into a first plant line to produce a transgenic plant which can be crossed with a second plant line to introgress the recombinant gene suppression DNA into the second plant line. The second plant line may already contain or be later transformed or bred with another transgenic line to contain one or more transgenes that are different from the gene suppression construct being introgressed from the first plant line.

[0075] Without intending to be limited to any single embodiment, the nucleotide sequences of the present invention exhibit a wide variety of usefulness. For example, the sequences can be used to synthesize dsRNA molecules either in in vivo or in vitro systems selected for their ability to cause gene suppression and therefore pest inhibition and such moleculed can be expressed in a transgenic plant, applied to the rhizosphere or biosphere of a plant, or applied in a seed coating or treatment for causing gene suppression in a pest. The sequences can be used in kits incorporating methods for detecting DNA, RNA, or siRNA's in a seed, plant, tissue, biological sample, meal, oil, flour, food product, commodity product, and the like. The sequences can be used for detecting the presence of a homologous sequence in a biological sample. The sequences can be used to construct a dsRNA for suppression of a target gene and can be linked to an RNA segment that binds specifically to one or more receptor molecules, bringing the dsRNA segment into close proximity to a membrane surface, and increasing its likelihood of being taken up by a cell which contains a gene that is targeted for suppression by the dsRNA.

[0076] In one embodiment, a nucleotide sequence of the present invention can be recorded on one or more computer readable media. As used herein, “computer readable media” refers to any tangible medium of expression that can be read and accessed directly by a computer. Such media include, but are not limited to: magnetic storage media, such as floppy discs, hard discs, and magnetic tape. Optical storage media include physical storage devices such as compact diskettes. Electrical storage media include random access and read only memory devices (RAM and ROM). A skilled artisan can readily appreciate that any of the presently known computer readable mediums can be used to create a manufacture comprising a computer readable medium having recorded thereon one or more sequences of the present invention. These devices can be accessed with a computer and used to perform a search and comparison of any other sequence of like composition (i.e., nucleotide sequences compared to nucleotide sequences, amino acid sequences compared to amino acid sequences, etc) to determine whether and to what extent a similarity or identity is present between the sequences being compared.

[0077] As used herein, “recorded” refers to a process for storing information on computer readable medium. A skilled artisan can readily adopt any of the presently known methods for recording information on computer readable medium to generate media comprising the nucleotide sequence information of the present invention. A variety of data storage structures are available for creating a computer readable medium having recorded thereon one or more sequences of the present invention. The choice of the data storage structure will generally be based on the means chosen to access the stored information. In addition, a variety of data processor programs and formats can be used to store the sequence information of the present invention on computer readable medium. The sequence information can be represented in a word processing text file, formatted in commercially available software such as WordPerfect, Microsoft Word, or shareware such as Linux, or represented in the form of an ASCII text file, stored in a database application, such as DB2, Sybase, Oracle, or the like. The skilled artisan can readily adapt any number of data processor structuring formats (e.g. text file or database) in order to obtain computer readable medium having recorded thereon the nucleotide sequence information of the present invention.

[0078] Computer software is publicly available which allows a skilled artisan to access sequence information provided in a computer readable medium. Software which implements the BLAST (Altschul et al., J. Mol. Biol. 215: 403-410, 1990) and BLAZE (Brutlag, et al., Comp. Chem. 17: 203-207, 1993) search algorithms on a Sybase system can be used to identify open reading frames (ORFs) within sequences such as the EST's that are provided herein and that contain homology to ORFs or proteins from other organisms. Such ORFs are protein-encoding fragments within the sequences of the present invention and are useful in producing commercially important proteins such as enzymes used in amino acid biosynthesis, metabolism, transcription, translation, RNA processing, nucleic acid and a protein degradation, protein modification, and DNA replication, restriction, modification, recombination, and repair.

### EXAMPLES

### Example 1

[0079] This Example illustrates the construction and DNA sequence analysis of SCN genome libraries.

[0080] SCN genomic DNA libraries (LIB5513, LIB 5514, LIB5519, and LIB5520) were constructed from SCN strain OP25 genomic DNA (Dong et al., 1997, Genetics 146:1311-1318). The libraries were generated by ligating size-selected physically sheared DNA into the high copy number plasmid pUC18 and the resulting ligation mixture was transformed into E coli by electroporation. 10 micrograms of SCN genomic DNA were resuspended into 30 microliters TE buffer. The DNA was sheared by sonication. The sonicated DNA was 5′ end-repaired using T4 DNA polymerase (New England BioLabs) and 10 mM dNTP's in a total reaction volume of 35 microliters and equilibrated to 1× ligation buffer (New England BioLabs). 3′ overhangs were repaired by treatment with T4 polynucleotide kinase. The mixture was incubated at 15° C. for 20 minutes, and transferred to 65° C. for 15 minutes to inactivate the kinase and polymerase, and incubated at room temperature for an additional 10 minutes. The repaired DNA was size fractionated by electrophoresis in a 0.7% agarose gel adjacent to a 1 Kb molecular weight marker at 80 volts for two hours in TBE buffer. The 2-4 KB and 4-8 KB DNA fragments were excised from the agarose gel and transferred into microcentrifuge tubes. The size-selected DNA fragments were isolated from the agarose gel and a second round of size selection was performed to eliminate small DNA fragments co-migrating with the selected range in first gel fractionation. Approximately 100 nanograms of the size-selected repaired DNA was inserted by ligation into a pUC18-HincII digested vector (molar ratio of 5 to 1). The ligated DNA was transformed into E. coli DH10B cells by electroporation and planted to LB plates containing 100 micrograms per milliliter ampicillin and incubated for 18-24 hours at 37 C. Several colonies that arose after incubation were randomly selected. The colonies were tested to determine the average DNA insert size and the average number of colonies in the library that appeared to contain no inserted recombinant DNA. Four libraries were constructed. The average insert size in library LIB5513 was 2-4 KB, in library LIB5514 was 4-8 KB, in library LIB5519 was 2-4 KB, and in library LIB5520 was 4-8 KB. Samples of each library were collected and combined together and deposited with the American Type Culture Collection (ATCC) at Rockville Md., USA on Feb. 15, 2005. The combined library was submitted to ATCC, designated as LIB5513_{—}14_{—}19_{—}20, and the ATCC has assigned the patent deposit number PTA-6583 to the deposited material.

[0081] The cells of the libraries were then plated on large bioassay plates containing Luria Broth (Difco) supplemented with 100 microgram/milliliter carbenicillin (ICN Biomedical), 64 microgram/milliliter IPTG (Shelton Scientific) and 80 microgram/milliliter X-Gal (Shelton Scientific). Individual blue transformants were then picked into 1.2 ml Terrific Broth (Difco) supplemented with 125 μg/ml Ampicillin (Calbiochem) in 96 deep-well boxes by Genetix Q-bot. The boxes were incubated for 21 hours at 37° C., each well archived to individual wells in 384-well glycerol plates, and then pelleted and stored at −20 C.

[0082] Alkaline lysis DNA extraction was performed on samples of pelleted clones using a QUIAGEN bead based platform on an automated robotic preparation system. Eluted DNA was stored for sequencing at 4° C. in a 96-well COSTAR plate. Two microliters of the DNA solution was then transferred into a 384 well microtiter plate (AXYGEN) using a Hamilton MPH96 Pipetting Robot. The pipetted DNA was then denatured for 5 minutes at 95° C., and two microliters of Big Dye Reaction Mix (Big Dye Terminators v3.0, 3.2 pmol sequencing primer, 1XTNK, and 0.5M MgCl₂) was then added to the denatured DNA using a Hamilton MPH96 Pipetting Robot. Each clone was sequenced using M13 forward and reverse primers in a PCR sequencing reaction using the conditions as follows: 95° C. for 5 seconds, 45° C. for 5 seconds, 60° C. for 2 minutes 30 seconds for a total of 25 cycles. The sequencing reactions were ethanol precipitated and re-suspended in water and loaded onto an ABI 3730xl Sequencing Analyzer (APPLIED BIOSYSTEMS) to generate sequence trace data for each sample. Approximately 400,000 sequencing reads were generated from the four Heterodera glycines genome libraries.

### Example 2

[0083] This Example illustrates the analysis, characterization, and assembly of the sequences obtained from DNA sequence analysis of the SCN genome libraries.

[0084] The sequence trace data was converted to sequence and quality files and standard quality control procedures were applied through the use of the block 0/1 pipelines. Quality control procedures included sequence quality trimming, sequence identity, cloning sequence removal, and contamination identification and removal. The results of the general sequencing pre-processing steps were stored in the sequence database SeqDB. Data passing quality controls were retrieved for inclusion in the assembly step. The dataset to be assembled consisted of 338,266 sequence reads that passed the block 0/1 process, represented by an initial output of 404,372 sequencing reads that were submitted to the block 0/1 process. A file of clone pair constraints was produced on the basis of known clone naming conventions and library construction details (insert size range). The clone pair constraint file consisted of 159,389 pairwise entries. Fasta, quality, and constraint files were used as input to the PCAP program (Version Date: Sep. 3, 2004, Huang, X., Wang, J., Aluru, S., Yang, S.-P. and Hillier, L. (2003): PCAP: A Whole-Genome Assembly Program. Genome Research, 13: 2164-2170), and the sequences were assembled. 45,568 output genomic contig sequences were produced whose sum length represented about 80.8 Million bases. These contig sequences are represented by the sequences as set forth in SEQ ID NO:1-SEQ ID NO:45568 and were subsequently used as input sequences to define generic regions of the SCN genome sequence corresponding to predicted coding sequences (referred to herein as vcDNA's or virtual complementary DNA's) and predicted promoter and intronic sequences.

[0085] SCN expressed sequences were collected from public sources and used to compare the genomic sequences identified herein as well as to identify unique sequences not present in any known public database set. Public sequences were collected into a file which contained non-identical contigs from (1) the Genome Sequencing Center at Washington University in St. Louis, Mo., USA (Nemagene clusters; McCarter et al., 2003, J. Nematology 35:465-469), (2) Parkinson contigs (Nembase clusters; Parkinson et al., 2004, Nature Genetics 36:1259-1267), (3) EST's in GenBank not contained in contigs (singletons), and (4) nucleotide sequences representing non-EST DNA sequences in GenBank (e.g., mRNAs). These sequences were compiled into and referred to herein as an essential gene sequence list corresponding to sequences as set forth herein at SEQ ID NO:47644-SEQ ID NO:50775.

[0086] Gene finding results were consolidated in a relational database in such a way that each predicted gene is represented by a set of coordinates that define the position of all segments of the gene on the genomic DNA contig (gDNA). The genes are described herein, and in particular in the Feature Fields of the Sequence Listing with reference to the nucleotide positions of each vcDNA giving rise to an amino acid sequence and in the amino acid sequence SEQ ID NO's as nucleotide sequences corresponding to portions of vcDNA's encoding the amino acid sequence. Sequences between the indicated protein coding portions correspond to predicted intronic sequences. Other sequence segments that are represented at least in the genomic sequences set forth in SEQ ID NO:1-SEQ ID NO:45568 include but are not limited to peptide-encoding segments such as initial exon, internal exon, terminal exon, or single exon and the like, and non-coding segments including promoter regions, transcription initiation sequences, transcription termination sequences, and polyadenylation signal sequences, and the like. Often the same position within a gDNA contig is predicted to contain a gene by more than one gene finding program. Thus, in order to prepare a library of genes where each position (locus) of the genome is represented by a single gene, several different gene prediction methods were applied and the results were consolidated according to the following algorithm.

[0087] 1. For each gDNA contig, all clusters of overlapping genes were defined. Each cluster was assumed to correspond to a single gene. The cluster was defined as a set of sequences located on the same DNA strand and either predicted to overlap based on nucleotide sequence identity along the lengths of the sequences or predicted to be located closer than 50 nucleotides from each other. Only peptide-encoding segments were considered when defining a cluster. The start and end positions of the cluster define the maximal dimension of the gene.

[0088] 2. For each cluster the preferred gene was selected, which represents this locus in the library. The selection algorithm is described as follows:

[0089] (a) All genes in a cluster were ranked by the gene-prediction method that produced them. The ranking by the different methods was intended to describe assumed accuracy of the method in predicting genes. The ranking was ordered arbitrarily using FgeneSH, Genemark.hmm and AAT/NAP data results. The AAT/GAP results were not ranked at all, but were used only if there were no other prediction for the locus, i.e. cluster contained only gene(s) predicted by AAT/GAP.

[0090] (b) The highest ranking gene was selected unless there were several equally ranked genes (i.e. predicted by the same method) or the cluster coverage by this gene was below 60%. The cluster coverage was computed as the ratio of the gene length to the length of the cluster (maximal dimension of the gene).

[0091] (c) For equally ranked genes, the gene with highest cluster coverage was selected.

[0092] (d) If the cluster coverage for the best-ranking gene was below 60%, the lower ranking genes were considered (in the ranking order) and the first one providing a gain in cluster coverage of at least 10% was selected.

[0093] (e) If a cluster contained only AAT/GAP-predicted genes—the one with the best cluster coverage was selected.

[0094] (f) For all other clusters, additional filtering was completed—only sequences that exhibited a translation product of at least 16 amino acids in length were selected.

[0095] (g) If a cluster contained only Genemark.hmm-predicted genes—no gene was selected and the locus was assumed not to contain any gene.

[0096] The method described above resulted in a list of “preferred” genes. The actual DNA sequence for each of these genes was prepared by extracting a subsequence (region of a sequence) of a gDNA contig which corresponded to the coordinates of the gene. The sequences prepared contained all predicted exons and introns of the gene. In the case of AAT/GAP and FgeneSH genes they also may contain regions between transcription and translation initiation sequences, and between translation termination and polyadenylation sequences.

[0097] The three gene-predicting programs—FgeneSH, Genemark.hmm and AAT/NAP—in addition to predicting positions of genes, also predict sequences of the translation product, if any. Thus, the “preferred” genes and their translated peptide sequences were simultaneously predicted by these methods. Virtual cDNA sequences (vcDNA) were prepared from genes derived only from AAT/GAP prediction results by extracting regions of genomic DNA (gDNA) corresponding to the predicted exons and splicing them together. These virtual cDNA sequences were translated using a translator tool. The feature fields of indicated peptide SEQ ID NO's identify genomic contig sequence positions (for example, Contig_ID=SeqID_XXX) for the coding sequence contained therein. Additional information provided in the feature fields includes the identity of SCN-specific sequences, the nucleotide positions of these sequences in the vcDNA sequence, homology to existing sequences in publicly available databases, a numerical evaluation of the extent of the homology, and the predicted function if any associated with the peptide.

[0098] The vcDNA sequences were used to identify sequences corresponding to SCN specific promoter sequences using the following procedure:

[0099] 1. For each gene predicted by either of the FgeneSH, Genemark.hmm or AAT/NAP prediction algorithms, the position of the first peptide-encoding segment was used as the reference point for sequence extraction. The sequence of the gDNA contig which starts 1000 nucleotides upstream and ends 2 nucleotides downstream of the reference point was extracted.

[0100] 2. The resulting sequence of the upstream region was shorter if the gene was located closer than 1000 nucleotides to the end of the genomic contig. If there was another gene located upstream and predicted by one of these methods—FgeneSH, Genemark.hmm or AAT/NAP, the upstream region was shortened (truncated) so that it did not overlap with the closest peptide-encoding segment of that gene. If the resulting sequence was shorter than 50 nucleotides, it was not included as a promoter sequence in the library of promoter sequences.

[0101] 3. If the resulting sequence did not end with the translation initiation codon ATG, i.e., the predicted gene was not N-terminal complete—then the sequence was not included as a promoter sequence in the library of promoter sequences.

[0102] 4. Sequences located upstream of AAT/GAP-predicted genes were not included in the library of promoter sequences since this program did not predict a translation initiation position and in certain situations placed the predicted gene on the wrong strand of a gDNA contig.

### Example 3

[0103] This Example illustrates the annotation of predicted SCN genes.

[0104] Two methodologies were used to provide annotations of the predicted Heterodera glycines (SCN) peptides, including Gene ontology (GO) and SmartBlast. Both GO and SmartBlast procedures were developed through homology-based sequence searches. In GO procedures, the peptide sequences from SCN peptides were used to BLAST against a protein sequence database, for example, the non-redundant protein (nr-aa) database maintained by the National Center for Biotechnology Information as part of GenBank. The highly conserved homologues of nr-aa from a variety of species were further selected with a minimal E value of 1E-08. The selected SCN homologues were subjected to the sequence match with a protein sequence database (GO proteins from GO Ontology consortium). Finally, three categories according to the GO Ontology consortium (molecular function; biological process; and cellular component) were used to annotate the SCN sequences. In SmartBlast procedures, the peptide sequences from SCN peptides were also used to blast against the non-redundant protein as described above. The homologues were also selected with a minimal E value of 1E-08. Those homologues were subjected to filtering using some non-meaningful words, such as “putative”. The best meaningful homologues were used for SCN sequence annotation. The conditions used to provide the homolog annotation and the best hit with respect to any predicted SCN gene product were referred to in one or more of the feature fields for each of the SCN protein sequences selected from the group consisting of SEQ ID NO:119146-SEQ ID NO:121220, and were further identified as to molecular function, enzyme activity, cellular component and biological process. Genes characterized as encoding proteins that may be essential for survival based on the proteins' relationship at least to one or more C. elegans homologs and the phenotype of the knockout of the C. elegans homolog were further identified in one or more of the feature fields of each of the peptide sequences. The phenotype observed, abbreviations for each, and the standard nomenclature assigned for each with reference to that same phenotype and nomenclature in C. elegans was identified previously hereinabove.

### Example 4

[0105] This Example illustrates a method for screening the SCN genome sequences, the predicted vcDNA sequences, and the predicted amino acid sequence encoded therefrom, against other sequences and selecting sequences unique to SCN.

[0106] The sequences disclosed herein can be used in a method to provide a DNA construct for expression of a dsRNA that is effective for silencing of a gene in a soybean cyst nematode or other plant pest by expressing such DNA construct in the cells of a transgenic plant and providing the plant in the diet of the nematode or pest. DNA sequences can be selected from the sequences of the present invention that are useful in achieving dsRNA-mediated gene silencing by selecting from a target gene a DNA sequence consisting of at least from about 17 to about 21 or more contiguous nucleotides. Effective short interfering RNA's (siRNAs) for gene repression are normally from about 21 to about 23-nt long double-stranded RNA duplexes. These siRNA's are known to incorporate into the RNA-inducing silencing complex (RISC). Once unwound, the single-stranded antisense strand guides RISC to the target mRNA, and induces the cleavage of the target messages, resulting in translational inhibition (Dykxhoorn, et al. Molecular Cell Biology, 4:457-467, 2003). Plant siRNA sequences have been characterized generally as contiguous nucleotide sequences of from about 24 nucleotides in length (Tang, 2003, Genes & Development 17:49-63). It is preferred that interfering RNA molecules are selected from the sequences as set forth in SEQ ID NO:1-SEQ ID NO:97729 to limit the un-intended “off-target” effect of gene repression by limiting the potential base-pairing with unintended targets of the host or other non-target organisms.

### Example 5

[0107] This example illustrates the identification of SCN genes that can be targeted for suppression using the nucleotide sequences of the present invention.

[0108] A comparison of the SCN genes was made to the genes identified in C. elegans for which knockouts have been previously identified to result in an observable phenotype. RNAi phenotypes include maternal sterile, embryonic lethal and a variety of postembryonic phenotypes. The relationship between C. elegans knockout phenotypes and their protein sequences were obtained. These protein sequences were then compared to the protein sequences translated from the SCN genomic sequences of the present invention.

[0109] A BLAST searchable “All Protein Database” was constructed, which was composed of genome-wise SCN peptides and C. elegans proteins. A reciprocal blast procedure was used to identify the possible orthologues of C. elegans for each SCN peptide.

[0110] The All Protein Database was queried using protein sequences of the SCN peptides using the “blastp” algorithm with an E-value cutoff of 1e-8. Up to 1000 hits were retained for each SCN peptide used in the query, and separated by organism names, either C. elegans or SCN. For C. elegans, a list was retained for the hits with SCN sequences exhibiting a more significant E-value than the best hit of the organism. The list contains likely duplicated SCN genes, and was referred to as a Core List. Another list was retained for all the hits from each organism, sorted by the E-value, and was referred to as a Hit List. The hit was identified as an orthologue of the query sequence if it was within the Core List.

[0111] Knockout phenotypes of SCN were inferred according to the degree of evolutionary relationship determined to exist between SCN and C. elegans proteins with reference to the knockout phenotypes of C. elegans genes, referred to herein above. For example, C. elegans C37H5.8 corresponds to a HSP-6 protein, and a knockout of this gene has been associated with the observed phenotypes of embryonic lethality and larval arrest. Orthologue identification from the above query indicated that an SCN amino acid sequence corresponding to SEQ ID NO:119310 is an orthologue of C37H5.8. Therefore, it is believed that because of the relationship of the SCN sequence corresponding to SEQ ID NO:119310 to the C. elegans orthologue C37H5.8, suppression of the SCN gene corresponding to SCN vcDNA sequence as set forth at SEQ ID NO:45733 encoding the C37H5.8 orthologue at SEQ ID NO:119310 would be expected to result in an observable phenotype corresponding to embryonic lethal and/or larva arrest in SCN. SCN genes have been categorized based on their relationship to identifiable orthologues with genes or sequences in other organisms and some are further identified as essential genes. Such information has been provided for each amino acid sequence predicted from the vcDNA sequences and is listed in the feature fields for each sequence in the sequence listing. The feature field in the sequence listing has been used to identify important features of the DNA molecules of the present invention. A DNA construct that contains target sequences from multiple SCN essential genes can be constructed to express a chimeric dsRNA molecule that affects more than one SCN gene. This aspect of the present invention reduces the possibility of selecting for a population of SCN that is unaffected by the dsRNA molecule.

[0112] SCN genes were grouped into Pfam protein families. Pfam is a comprehensive database of protein domain families, based on multiple alignments of protein domains or conserved protein regions (Nucleic Acids Research 2004 32:D138-D141; Proteins 28:405-420, 1997.). Peptide sequences of a subset of SCN genes have been matched to Pfam entries with HMMPFAM program, with an expectation value cutoff of 0.1 (Biological sequence analysis: probabilistic models of proteins and nucleic acids, Cambridge University Press, 1998.) The subset included 5207 SCN protein sequences that were analyzed by this method, and 3397 of the 5207 protein sequences were grouped into 909 families, as set forth in Table 1.

[0113] In order to target a protein gene family for suppression with a single dsRNA molecule, it may be necessary to identify conserved DNA sequence regions among protein gene family members. After the amino acid sequence translations from the virtual cDNA sequences were grouped into protein families, the conserved sequence regions were identified through multiple sequence alignment of the DNA sequences of the family members. For example, using the program CLSUTALW (ref. Nucleic Acids Res. 22:4673-4680), member sequences of a Pfam group can be aligned. One example is illustrated by an alignment of SEQ ID NO's representative of the nucleotide sequences encoding the protein family members in the MRP_L47 family, a mitochondrial ribosomal protein family, corresponding to SEQ ID NO:49132 (HG02471), SEQ ID NO:50709 (HGC08009), and SEQ ID NO:46538 (HG2_{—}27019.C1.o1.np). An alignment of these three sequences allows the identification of conserved contiguous residues present in each of the three sequences. The conserved segments consisting of at least 21 contiguous nucleotides are representative of the preferred polynucleotide regions for expression in a double stranded RNA sequence for use in targeting the suppression of each member of the entire gene family. The comparison of protein sequences of family members identified and grouped in Table 1 enables the identification of related polynucleotide regions common among the family members by locating the corresponding cDNA and genomic contig sequences identified in the feature field of the Sequence Listing. Using this method of comparison, the protein sequences of family members identified in Table 1 and in SEQ ID NO:119146-SEQ ID NO:124352 allows the skilled artisan to identify the related polynucleotide regions that are common among the family members by locating the corresponding virtual cDNA (vcDNA) and genomic contiguous sequences as set forth in SEQ ID NO:1-SEQ ID NO:119145. These sequences can then be used in a DNA construct to express a dsRNA molecule in plant cells that is directed to the suppression of one or more genes in any of one or more plant pests. These polynucleotides can then be used in a DNA construct to express a homologous dsRNA molecule in plant cells.

TABLE 1
SCN GENE FAMILIES and ANNOTATIONS
SCN gene families

| Gene name | SCN gene family members | Protein annotation |
|---|---|---|
| bZIP_1 | SeqID_122625 SeqID_119811 | bZIP transcription factor |
| | SeqID_124042 SeqID_124331 | |
| | SeqID_121799 | |
| Mito_carr | SeqID_121264 SeqID_122047 | Mitochondrial carrier protein |
| | SeqID_122051 SeqID_122111 | |
| | SeqID_122259 SeqID_122457 | |
| | SeqID_122504 SeqID_122594 | |
| | SeqID_121347 SeqID_121360 | |
| | SeqID_121361 SeqID_122965 | |
| | SeqID_122993 SeqID_123057 | |
| | SeqID_123135 SeqID_123186 | |
| | SeqID_123212 SeqID_123240 | |
| | SeqID_123284 SeqID_123348 | |
| | SeqID_123379 SeqID_123391 | |
| | SeqID_123930 SeqID_119420 | |
| | SeqID_119539 SeqID_120127 | |
| | SeqID_120194 SeqID_120280 | |
| | SeqID_121563 SeqID_121585 | |
| | SeqID_120988 SeqID_121115 | |
| | SeqID_123589 SeqID_123608 | |
| | SeqID_123626 SeqID_123732 | |
| | SeqID_123814 SeqID_123863 | |
| | SeqID_121678 SeqID_124088 | |
| | SeqID_124151 SeqID_124350 | |
| | SeqID_121751 SeqID_121752 | |
| | SeqID_121870 | |
| bZIP_2 | SeqID_121260 SeqID_122546 | Basic region leucine zipper |
| | SeqID_122625 SeqID_119811 | |
| | SeqID_124042 SeqID_121799 | |
| Sec7 | SeqID_120412 | Sec7 domain |
| MutS_IV | SeqID_119581 | MutS family domain IV |
| CtaG_Cox11 | SeqID_119768 | Cytochrome c oxidase assembly |
| | | protein Cta |
| Synaptobrevin | SeqID_122614 SeqID_122853 | Synaptobrevin |
| | SeqID_123133 SeqID_123159 | |
| | SeqID_123266 SeqID_120966 | |
| | SeqID_121065 SeqID_123723 | |
| Fer2 | SeqID_122093 SeqID_122357 | 2Fe—2S iron-sulfur cluster binding |
| | SeqID_119370 SeqID_124223 | domain |
| | SeqID_124309 | |
| WD40 | SeqID_121225 SeqID_121265 | WD domain, G-beta repeat |
| | SeqID_122030 SeqID_122050 | |
| | SeqID_122140 SeqID_122192 | |
| | SeqID_122212 SeqID_122243 | |
| | SeqID_122288 SeqID_122350 | |
| | SeqID_122349 SeqID_122434 | |
| | SeqID_122449 SeqID_122509 | |
| | SeqID_122514 SeqID_122539 | |
| | SeqID_122547 SeqID_121310 | |
| | SeqID_121337 SeqID_121375 | |
| | SeqID_122883 SeqID_122959 | |
| | SeqID_122996 SeqID_123045 | |
| | SeqID_123090 SeqID_123107 | |
| | SeqID_123122 SeqID_123198 | |
| | SeqID_123318 SeqID_123329 | |
| | SeqID_121391 SeqID_119248 | |
| | SeqID_119272 SeqID_119279 | |
| | SeqID_119343 SeqID_119431 | |
| | SeqID_119538 SeqID_119627 | |
| | SeqID_119670 SeqID_119769 | |
| | SeqID_119826 SeqID_119840 | |
| | SeqID_119913 SeqID_119990 | |
| | SeqID_121523 SeqID_120032 | |
| | SeqID_120112 SeqID_120134 | |
| | SeqID_120235 SeqID_120302 | |
| | SeqID_120344 SeqID_120362 | |
| | SeqID_120457 SeqID_120458 | |
| | SeqID_120507 SeqID_120508 | |
| | SeqID_120576 SeqID_120747 | |
| | SeqID_120826 SeqID_120866 | |
| | SeqID_120885 SeqID_120945 | |
| | SeqID_120994 SeqID_120997 | |
| | SeqID_121007 SeqID_121094 | |
| | SeqID_121096 SeqID_121116 | |
| | SeqID_121184 SeqID_121199 | |
| | SeqID_123563 SeqID_123612 | |
| | SeqID_123643 SeqID_123841 | |
| | SeqID_123880 SeqID_121640 | |
| | SeqID_123965 SeqID_124104 | |
| | SeqID_124118 SeqID_124150 | |
| | SeqID_124186 SeqID_124334 | |
| | SeqID_121790 SeqID_121804 | |
| | SeqID_121816 SeqID_121840 | |
| | SeqID_121844 | |
| Skp1 | SeqID_121262 SeqID_122339 | Skp1 family, dimerisation domain |
| | SeqID_121318 SeqID_119848 | |
| Fer4 | SeqID_122076 SeqID_122198 | 4Fe—4S binding domain |
| | SeqID_120449 SeqID_120455 | |
| | SeqID_124131 | |
| Enolase_C | SeqID_122156 SeqID_123621 | Enolase, C-terminal TIM barrel |
| | | domain |
| Mucin | SeqID_120313 | Mucin-like glycoprotein |
| NHL | SeqID_121326 | NHL repeat |
| FAT | SeqID_122973 SeqID_120212 | FAT domain |
| Iso_dh | SeqID_122456 SeqID_120630 | Isocitrate/isopropylmalate |
| | SeqID_123561 | dehydrogenase |
| APH | SeqID_122384 SeqID_122682 | Phosphotransferase enzyme |
| | SeqID_121416 SeqID_119410 | family |
| | SeqID_119453 SeqID_119764 | |
| | SeqID_121622 SeqID_120808 | |
| | SeqID_124140 SeqID_121803 | |
| Suf | SeqID_122937 | Suppressor of forked protein (Suf) |
| Enolase_N | SeqID_122156 SeqID_123621 | Enolase, N-terminal domain |
| Ldh_1_C | SeqID_122492 SeqID_120389 | lactate/malate dehydrogenase, |
| | SeqID_123782 | alpha/beta C-t |
| HMG_CoA_synt | SeqID_122417 SeqID_120809 | Hydroxymethylglutaryl-coenzyme |
| | SeqID_121837 | A synthas |
| PLDc | SeqID_119325 SeqID_120704 | Phospholipase D Active site motif |
| Glycos_transf_1 | SeqID_121164 | Glycosyl transferases group 1 |
| Dala_Dala_lig_C | SeqID_119260 | D-ala D-ala ligase C-terminus |
| Kunitz_BPTI | SeqID_122170 SeqID_119622 | Kunitz/Bovine pancreatic trypsin |
| | SeqID_119623 | inhibito |
| Nuc_sug_transp | SeqID_119240 | Nucleotide-sugar transporter |
| cobW | SeqID_122575 | CobW/HypB/UreG, nucleotide- |
| | | binding domain |
| L15 | SeqID_121270 SeqID_122374 | Ribosomal protein L15 |
| | SeqID_123713 | |
| Ldh_1_N | SeqID_122492 SeqID_121371 | lactate/malate dehydrogenase, |
| | SeqID_122868 SeqID_120389 | NAD binding do |
| | SeqID_123782 | |
| CLP_protease | SeqID_122193 SeqID_122948 | Clp protease |
| | SeqID_124275 SeqID_120143 | |
| | SeqID_123619 SeqID_121952 | |
| HEAT_PBS | SeqID_122486 SeqID_120345 | PBS lyase HEAT-like repeat |
| | SeqID_123693 | |
| NIC | SeqID_121904 | Nucleoporin interacting component |
| SecY | SeqID_122609 SeqID_123948 | eubacterial secY protein |
| PCI | SeqID_122070 SeqID_122383 | PCI domain |
| | SeqID_119309 SeqID_119633 | |
| | SeqID_120088 SeqID_120892 | |
| | SeqID_123711 SeqID_123975 | |
| | SeqID_121783 | |
| Abhydro_lipase | SeqID_119405 | ab-hydrolase associated lipase |
| | | region |
| Mra1 | SeqID_123459 | Suppressor Mra1 |
| tRNA-synt_1b | SeqID_123017 SeqID_120260 | tRNA synthetases class I (W and |
| | SeqID_121648 | Y) |
| NIF | SeqID_121832 | NLI interacting factor-like |
| | | phosphatase |
| Laminin_G_1 | SeqID_120488 | Laminin G domain |
| tRNA-synt_1c | SeqID_122217 SeqID_122354 | tRNA synthetases class I (E and |
| | SeqID_123425 SeqID_119559 | Q), cata |
| | SeqID_120889 SeqID_123797 | |
| Laminin_G_2 | SeqID_120488 | Laminin G domain |
| tRNA-synt_1e | SeqID_119570 SeqID_119679 | tRNA synthetases class I (C) |
| | | catalytic d |
| Acyl-CoA_dh_M | SeqID_123412 SeqID_119407 | Acyl-CoA dehydrogenase, middle |
| | SeqID_119554 | domain |
| Mak16 | SeqID_123061 SeqID_120231 | Mak16 protein |
| | SeqID_120297 | |
| Clp1 | SeqID_120900 | Pre-mRNA cleavage complex II |
| | | protein Clp1 |
| Guanylate_cyc | SeqID_119460 | Adenylate and Guanylate cyclase |
| | | catalyt |
| Acyl-CoA_dh_N | SeqID_122997 SeqID_123412 | Acyl-CoA dehydrogenase, N- |
| | SeqID_119407 SeqID_119740 | terminal doma |
| | SeqID_124296 | |
| RNase_PH_C | SeqID_122716 SeqID_120146 | 3′ exoribonuclease family, domain 2 |
| MoeZ_MoeB | SeqID_120491 | MoeZ/MoeB domain |
| Chitin_synth_2 | SeqID_120016 | Chitin synthase |
| PAP_central | SeqID_122343 SeqID_119183 | Poly(A) polymerase central domain |
| | SeqID_120181 SeqID_120989 | |
| | SeqID_121025 SeqID_123810 | |
| rve | SeqID_119251 SeqID_119810 | Integrase core domain |
| RED_N | SeqID_120411 | RED-like protein N-terminal region |
| Ank | SeqID_123070 SeqID_119179 | Ankyrin repeat |
| | SeqID_119568 SeqID_119583 | |
| | SeqID_119584 SeqID_119680 | |
| | SeqID_119792 SeqID_119874 | |
| | SeqID_120226 SeqID_121617 | |
| CKS | SeqID_122543 SeqID_121066 | Cyclin-dependent kinase |
| | | regulatory subunit |
| Band_7 | SeqID_122693 SeqID_119534 | SPFH domain/Band 7 family |
| | SeqID_123829 | |
| PAF-AH_p_II | SeqID_120737 SeqID_121196 | Platelet-activating factor |
| | | acetylhydrolas |
| SF-assemblin | SeqID_120078 | SF-assemblin/beta giardin |
| Ribosomal_S24e | SeqID_122807 SeqID_120291 | Ribosomal protein S24e |
| | SeqID_124204 SeqID_124210 | |
| | SeqID_121954 | |
| Ribosomal_S17e | SeqID_122394 SeqID_119329 | Ribosomal S17 |
| | SeqID_123964 | |
| Sof1 | SeqID_122192 SeqID_120865 | Sof1-like domain |
| | SeqID_120866 SeqID_124334 | |
| LrgB | SeqID_120612 | LrgB-like family |
| DUF1650 | SeqID_122945 SeqID_123077 | Protein of unknown function |
| | SeqID_120203 | (DUF1650) |
| Laminin_EGF | SeqID_121392 SeqID_119297 | Laminin EGF-like (Domains III and |
| | SeqID_119335 SeqID_119714 | V) |
| | SeqID_119816 SeqID_120849 | |
| | SeqID_120911 | |
| TruB_N | SeqID_119847 | TruB family pseudouridylate |
| | | synthase (N term |
| tRNA-synt_2b | SeqID_122133 SeqID_122759 | tRNA synthetase class II core |
| | SeqID_119832 SeqID_120346 | domain (G, |
| | SeqID_120388 SeqID_120642 | |
| | SeqID_121608 SeqID_121085 | |
| | SeqID_121645 SeqID_124158 | |
| | SeqID_124247 | |
| tRNA-synt_2c | SeqID_120391 | tRNA synthetases class II (A) |
| Innexin | SeqID_123073 SeqID_123480 | Innexin |
| | SeqID_120601 | |
| tRNA-synt_2d | SeqID_122320 SeqID_119409 | tRNA synthetases class II core |
| | SeqID_121659 SeqID_124019 | domain (F |
| MFS_1 | SeqID_119430 SeqID_119607 | Major Facilitator Superfamily |
| | SeqID_120612 | |
| Cyt-b5 | SeqID_122136 SeqID_122505 | Cytochrome b5-like Heme/Steroid |
| | SeqID_119879 SeqID_123602 | bindin |
| MAM33 | SeqID_122105 SeqID_123650 | Mitochondrial glycoprotein |
| ZZ | SeqID_120217 | Zinc finger, ZZ type |
| Dpy-30 | SeqID_122847 SeqID_121204 | Dpy-30 motif |
| K_tetra | SeqID_122369 SeqID_119930 | K+ channel tetramerisation domain |
| | SeqID_120530 | |
| Tim44 | SeqID_123264 SeqID_119402 | Tim44-like domain |
| Mtap_PNP | SeqID_121534 SeqID_121548 | Phosphorylase family 2 |
| | SeqID_121569 | |
| PDZ | SeqID_119401 SeqID_120527 | PDZ domain (Also known as DHR |
| | | or GLGF) |
| CHCH | SeqID_123527 | CHCH domain |
| Ribonuc_red_sm | SeqID_122881 SeqID_120548 | Ribonucleotide reductase, small |
| | SeqID_121571 SeqID_121595 | chain |
| Pro_isomerase | SeqID_12368 SeqID_122436 | Cyclophilin type peptidyl-prolyl cis- |
| | SeqID_12839 SeqID_123273 | tr |
| | SeqID_121384 SeqID_119354 | |
| | SeqID_120150 SeqID_123750 | |
| | SeqID_123891 SeqID_121707 | |
| | SeqID_124224 | |
| DIX | SeqID_123325 | DIX domain |
| Hydrolase | SeqID_119435 | haloacid dehalogenase-like |
| | | hydrolase |
| Peptidase_C1 | SeqID_121248 SeqID_121247 | Papain family cysteine protease |
| | SeqID_121267 SeqID_122029 | |
| | SeqID_122165 SeqID_122555 | |
| | SeqID_122593 SeqID_123403 | |
| | SeqID_123446 SeqID_121447 | |
| | SeqID_119313 SeqID_123567 | |
| | SeqID_123581 SeqID_123578 | |
| | SeqID_121782 SeqID_121853 | |
| | SeqID_121879 | |
| Peptidase_C2 | SeqID_123259 SeqID_120192 | Calpain family cysteine protease |
| | SeqID_120374 | |
| E1-E2_ATPase | SeqID_122184 SeqID_119574 | E1-E2 ATPase |
| | SeqID_119844 SeqID_120162 | |
| Peptidase_M13 | SeqID_122218 | Peptidase family M13 |
| FLYWCH | SeqID_119876 SeqID_120405 | FLYWCH zinc finger domain |
| Peptidase_M14 | SeqID_122059 SeqID_122194 | Zinc carboxypeptidase |
| | SeqID_119546 SeqID_123807 | |
| | SeqID_124007 | |
| Sec62 | SeqID_121454 | Translocation protein Sec62 |
| Sec63 | SeqID_120914 | Sec63 domain |
| Peptidase_M16 | SeqID_123296 SeqID_119755 | Insulinase (Peptidase family M16) |
| | SeqID_124192 | |
| EGF | SeqID_119714 SeqID_119985 | EGF-like domain |
| | SeqID_120013 SeqID_120488 | |
| | SeqID_120732 SeqID_120849 | |
| Ribonuc_red_IgC | SeqID_121385 | Ribonucleotide reductase, barrel |
| | | doma |
| UPF0027 | SeqID_121387 | Uncharacterized protein family |
| | | UPF0027 |
| APC10 | SeqID_122598 SeqID_119693 | Anaphase-promoting complex, |
| | SeqID_123584 | subunit 10 (APC1 |
| Integrin_alpha | SeqID_119890 | Integrin alpha cytoplasmic region |
| Dynein_heavy | SeqID_120763 SeqID_120973 | Dynein heavy chain |
| Chromo | SeqID_119766 SeqID_120561 | ‘chromo’ (CHRromatin |
| | | Organisation MOdifier) |
| Surp | SeqID_122195 SeqID_120133 | Surp module |
| | SeqID_124100 SeqID_124099 | |
| Lipase_GDSL | SeqID_122975 SeqID_120739 | GDSL-like Lipase/Acylhydrolase |
| ASC | SeqID_119784 | Amiloride-sensitive sodium |
| | | channel |
| F-actin_cap_A | SeqID_123125 SeqID_119252 | F-actin capping protein alpha |
| | | subunit |
| Ribosomal_L2_C | SeqID_122387 SeqID_122576 | Ribosomal Proteins L2, C-terminal |
| | SeqID_119709 SeqID_123662 | doma |
| | SeqID_124015 SeqID_121759 | |
| | SeqID_121891 | |
| TPR_1 | SeqID_122178 SeqID_122894 | Tetratricopeptide repeat |
| | SeqID_123022 SeqID_119202 | |
| | SeqID_119274 SeqID_119429 | |
| | SeqID_119528 SeqID_119687 | |
| | SeqID_120074 SeqID_120605 | |
| | SeqID_121168 SeqID_121175 | |
| | SeqID_123940 | |
| NTP_transf_2 | SeqID_122343 SeqID_123810 | Nucleotidyltransferase domain |
| TPR_2 | SeqID_122178 SeqID_122894 | Tetratricopeptide repeat |
| | SeqID_123022 SeqID_119202 | |
| | SeqID_119274 SeqID_119429 | |
| | SeqID_119528 SeqID_119687 | |
| | SeqID_120074 SeqID_120591 | |
| | SeqID_120605 SeqID_120748 | |
| | SeqID_120947 SeqID_121168 | |
| | SeqID_121175 SeqID_123940 | |
| TPR_4 | SeqID_119202 | Tetratricopeptide repeat |
| COesterase | SeqID_122237 SeqID_119940 | Carboxylesterase |
| | SeqID_120067 SeqID_120891 | |
| | SeqID_124012 | |
| TLE_N | SeqID_123010 SeqID_119913 | Groucho/TLE N-terminal Q-rich |
| | | domain |
| F-box | SeqID_122666 SeqID_124313 | F-box domain |
| MRP-L47 | SeqID_122709 SeqID_120115 | Mitochondrial 39-S ribosomal |
| | SeqID_124286 | protein L47 (MR |
| Col_cuticle_N | SeqID_121964 SeqID_121988 | Nematode cuticle collagen N- |
| | SeqID_121996 SeqID_122013 | terminal do |
| | SeqID_122019 SeqID_122027 | |
| | SeqID_122291 SeqID_122304 | |
| | SeqID_122313 SeqID_122472 | |
| | SeqID_122536 SeqID_122871 | |
| | SeqID_122911 SeqID_122927 | |
| | SeqID_122954 SeqID_123029 | |
| | SeqID_123087 SeqID_123176 | |
| | SeqID_123223 SeqID_123423 | |
| | SeqID_119404 SeqID_119564 | |
| | SeqID_119730 SeqID_119798 | |
| | SeqID_120106 SeqID_120175 | |
| | SeqID_120474 SeqID_120705 | |
| | SeqID_120750 SeqID_123663 | |
| | SeqID_121026 SeqID_121073 | |
| | SeqID_123664 SeqID_123677 | |
| | SeqID_123676 SeqID_123769 | |
| | SeqID_123783 SeqID_123827 | |
| | SeqID_121953 SeqID_121957 | |
| Na_H_Exchanger | SeqID_120225 SeqID_120403 | Sodium/hydrogen exchanger |
| | | family |
| ATP-synt_ab | SeqID_122131 SeqID_122660 | ATP synthase alpha/beta family, |
| | SeqID_122734 SeqID_122935 | nucleot |
| | SeqID_119160 SeqID_123656 | |
| | SeqID_123806 SeqID_123805 | |
| | SeqID_124022 | |
| zf-B_box | SeqID_120931 | B-box zinc finger |
| FMO-like | SeqID_122732 SeqID_120410 | Flavin-binding monooxygenase- |
| | SeqID_124057 | like |
| Ribosomal_S26e | SeqID_122109 SeqID_120185 | Ribosomal protein S26e |
| | SeqID_123649 | |
| Ribosomal_S19e | SeqID_122794 SeqID_123065 | Ribosomal protein S19e |
| | SeqID_123504 SeqID_124003 | |
| | SeqID_124229 SeqID_121859 | |
| Peptidase_C12 | SeqID_122328 SeqID_120007 | Ubiquitin carboxyl-terminal |
| | SeqID_121135 SeqID_124005 | hydrolase, |
| Peptidase_C13 | SeqID_122230 SeqID_121453 | Peptidase C13 family |
| | SeqID_121467 SeqID_120219 | |
| | SeqID_120537 SeqID_121597 | |
| | SeqID_124041 SeqID_121721 | |
| | SeqID_121872 SeqID_121883 | |
| Peptidase_C14 | SeqID_123489 | Caspase domain |
| Peptidase_M24 | SeqID_122645 SeqID_124035 | metallopeptidase family M24 |
| | SeqID_124033 | |
| Ribosomal_L6e_N | SeqID_122489 SeqID_123683 | Ribosomal protein L6, N-terminal |
| | | doma |
| Paf1 | SeqID_119976 | Paf1 |
| DUF1671 | SeqID_123049 | Protein of unknown function |
| | | (DUF1671) |
| Complex1_51K | SeqID_122912 SeqID_123104 | Respiratory-chain NADH |
| | SeqID_123995 | dehydrogenase 51 |
| Peptidase_M28 | SeqID_122327 SeqID_122621 | Peptidase family M28 |
| | SeqID_119445 SeqID_123920 | |
| PFK | SeqID_120213 | Phosphofructokinase |
| DAGAT | SeqID_123153 SeqID_120048 | Diacylglycerol acyltransferase |
| | SeqID_121202 | |
| RNA_pol_Rpb7_N | SeqID_122067 SeqID_121484 | RNA polymerase Rpb7, N-terminal |
| | SeqID_121111 SeqID_123690 | domain |
| DnaJ_C | SeqID_121279 SeqID_122722 | DnaJ C terminal region |
| | SeqID_121405 SeqID_120879 | |
| | SeqID_123882 | |
| zf-DNL | SeqID_122584 SeqID_124310 | DNL zinc finger |
| CNH | SeqID_123483 SeqID_120283 | CNH domain |
| | SeqID_121627 | |
| DNA_ligase_A_M | SeqID_123044 SeqID_119293 | ATP dependent DNA ligase |
| | | domain |
| DNA_ligase_A_N | SeqID_119293 | DNA ligase N terminus |
| LACT | SeqID_119637 | Lecithin:cholesterol |
| | | acyltransferase |
| Ribosomal_L11_N | SeqID_122466 SeqID_122612 | Ribosomal protein L11, N-terminal |
| | SeqID_122798 SeqID_120200 | dom |
| | SeqID_120321 SeqID_121603 | |
| | SeqID_123787 SeqID_124218 | |
| Sec8_exocyst | SeqID_123021 | Sec8 exocyst complex component |
| | | specific |
| Coatomer_E | SeqID_122494 SeqID_120679 | Coatomer epsilon subunit |
| | SeqID_123777 | |
| TT_ORF2 | SeqID_122828 SeqID_123933 | TT viral ORF2 |
| DNA_primase_S | SeqID_122299 SeqID_123968 | DNA primase small subunit |
| NACHT | SeqID_122493 SeqID_119176 | NACHT domain |
| Ribosomal_S27e | SeqID_122380 SeqID_122513 | Ribosomal protein S27 |
| | SeqID_119700 SeqID_120329 | |
| | SeqID_123636 SeqID_123738 | |
| Na_K-ATPase | SeqID_122309 SeqID_124043 | Sodium/potassium ATPase beta |
| | | chain |
| TIP49 | SeqID_122138 SeqID_121376 | TIP49 C-terminus |
| | SeqID_119157 SeqID_119793 | |
| | SeqID_123801 | |
| GNT-I | SeqID_119837 | GNT-I family |
| Clathrin | SeqID_119727 | Region in Clathrin and VPS |
| MutS_V | SeqID_119581 SeqID_119594 | MutS domain V |
| | SeqID_120288 SeqID_120369 | |
| Acyl_CoA_thio | SeqID_122480 SeqID_121327 | Acyl-CoA thioesterase |
| | SeqID_123795 SeqID_121650 | |
| | SeqID_121919 | |
| PTPA | SeqID_121340 SeqID_123363 | Phosphotyrosyl phosphate |
| | SeqID_119880 | activator (PTPA) pr |
| UPF0113 | SeqID_122707 | Uncharacterised protein family |
| | | (UPF0113) |
| dsrm | SeqID_119344 | Double-stranded RNA binding |
| | | motif |
| Tom22 | SeqID_122077 SeqID_124129 | Mitochondrial import receptor |
| | | subunit Tom22 |
| EGF_CA | SeqID_119714 SeqID_119985 | Calcium binding EGF domain |
| | SeqID_120013 SeqID_120732 | |
| lsy1 | SeqID_122830 SeqID_120949 | lsy1-like splicing family |
| ELM2 | SeqID_120201 SeqID_120354 | ELM2 domain |
| | SeqID_121080 | |
| HA2 | SeqID_122331 SeqID_119298 | Helicase associated domain (HA2) |
| | SeqID_120256 SeqID_120575 | |
| | SeqID_123546 SeqID_124253 | |
| RdRP | SeqID_119588 | RNA dependent RNA polymerase |
| 2-oxoacid_dh | SeqID_119602 SeqID_121525 | 2-oxoacid dehydrogenases |
| | SeqID_120978 | acyltransferase |
| UDPGP | SeqID_123086 | UTP--glucose-1-phosphate |
| | | uridylyltransferase |
| Arf | SeqID_121288 SeqID_122204 | ADP-ribosylation factor family |
| | SeqID_122360 SeqID_122392 | |
| | SeqID_122397 SeqID_122560 | |
| | SeqID_122575 SeqID_122579 | |
| | SeqID_122619 SeqID_122671 | |
| | SeqID_123132 SeqID_123241 | |
| | SeqID_123422 SeqID_119204 | |
| | SeqID_119645 SeqID_119853 | |
| | SeqID_120523 SeqID_120531 | |
| | SeqID_121613 SeqID_123568 | |
| | SeqID_123726 SeqID_123740 | |
| | SeqID_123960 SeqID_123988 | |
| | SeqID_123991 | |
| UDPGT | SeqID_119517 | UDP-glucoronosyl and UDP- |
| | | glucosyl transferas |
| Cystatin | SeqID_122804 SeqID_120505 | Cystatin domain |
| | SeqID_123974 | |
| ATP-synt_F6 | SeqID_122448 SeqID_120742 | Mitochondrial ATP synthase |
| | SeqID_123680 | coupling facto |
| Cyto_heme_lyase | SeqID_122106 SeqID_124078 | Cytochrome c/c1 heme lyase |
| DNA_pol_alpha_B | SeqID_120691 | DNA polymerase alpha subunit B |
| Arm | SeqID_122305 SeqID_122870 | Armadillo/beta-catenin-like repeat |
| | SeqID_121423 SeqID_119427 | |
| | SeqID_121148 SeqID_121201 | |
| | SeqID_124047 SeqID_121836 | |
| NTP_transferase | SeqID_122569 SeqID_122914 | Nucleotidyl transferase |
| | SeqID_120001 | |
| LSM | SeqID_122052 SeqID_122121 | LSM domain |
| | SeqID_122135 SeqID_122405 | |
| | SeqID_122422 SeqID_122654 | |
| | SeqID_122720 SeqID_122860 | |
| | SeqID_123047 SeqID_119181 | |
| | SeqID_119424 SeqID_120049 | |
| | SeqID_120122 SeqID_121030 | |
| | SeqID_123658 SeqID_123725 | |
| | SeqID_123789 SeqID_123944 | |
| | SeqID_124195 | |
| NMT | SeqID_120382 | Myristoyl-CoA:protein N- |
| | | myristoyltransferase |
| TRAP-delta | SeqID_122068 SeqID_120359 | Translocon-associated protein, |
| | SeqID_123786 | delta subun |
| DDOST_48kD | SeqID_121541 SeqID_121553 | Dolichyl- |
| | | diphosphooligosaccharide-protein |
| Ribosomal_S28e | SeqID_122545 SeqID_120643 | Ribosomal protein S28e |
| | SeqID_123620 | |
| UPF0120 | SeqID_122142 SeqID_121137 | Uncharacterised protein family |
| | | (UPF0120) |
| Ala_racemase_N | SeqID_121220 | Alanine racemase, N-terminal |
| | | domain |
| MFAP1_C | SeqID_119946 | Micro-fibrillar-associated protein 1 |
| | | C-termi |
| Aminotran_3 | SeqID_119827 | Aminotransferase class-III |
| ACBP | SeqID_121287 SeqID_119464 | Acyl CoA binding protein |
| PHD | SeqID_123154 SeqID_119379 | PHD-finger |
| | SeqID_119449 SeqID_119766 | |
| | SeqID_120788 | |
| Aminotran_4 | SeqID_122578 SeqID_119653 | Aminotransferase class IV |
| | SeqID_119738 | |
| E3_binding | SeqID_121975 SeqID_120333 | e3 binding domain |
| Ribosomal_L37ae | SeqID_122763 SeqID_119302 | Ribosomal L37ae protein family |
| | SeqID_120838 SeqID_123781 | |
| | SeqID_124249 | |
| zf-CCCH | SeqID_121226 SeqID_122128 | Zinc finger C-x8-C-x5-C-x3-H type |
| | SeqID_122531 SeqID_122888 | (and simil |
| | SeqID_123330 SeqID_119331 | |
| | SeqID_119820 SeqID_120375 | |
| | SeqID_120658 SeqID_121599 | |
| | SeqID_121064 SeqID_123669 | |
| HMG-CoA_red | SeqID_120545 | Hydroxymethylglutaryl-coenzyme |
| | | A reductus |
| CRAL_TRIO | SeqID_120518 | CRAL/TRIO domain |
| HAT | SeqID_120676 | HAT (Half-A-TPR) repeat |
| Asn_synthase | SeqID_120554 SeqID_120715 | Asparagine synthase |
| PDCD9 | SeqID_122558 SeqID_123575 | Mitochondrial 28S ribosomal |
| | | protein S30 (PDC |
| zf-CSL | SeqID_122103 SeqID_120511 | CSL zinc finger |
| | SeqID_123712 | |
| UBACT | SeqID_122346 SeqID_121362 | Repeat in ubiquitin-activating |
| | SeqID_121432 SeqID_121452 | (UBA) protein |
| | SeqID_119364 SeqID_124102 | |
| | SeqID_121935 | |
| Biotin_carb_C | SeqID_120976 | Biotin carboxylase C-terminal |
| | | domain |
| Frizzled | SeqID_120827 | Frizzled/Smoothened family |
| | | membrane region |
| FH2 | SeqID_120125 | Formin Homology 2 Domain |
| Coatomer_WDAD | SeqID_119681 SeqID_120257 | Coatomer WD associated region |
| zf-RanBP | SeqID_123008 SeqID_121015 | Zn-finger in Ran binding protein |
| | | and oth |
| COQ7 | SeqID_122535 SeqID_119203 | Ubiquinone biosynthesis protein |
| | SeqID_123627 | COQ7 |
| Ammonium_transp | SeqID_120017 | Ammonium Transporter Family |
| PTR2 | SeqID_119430 SeqID_120270 | POT family |
| MPPN | SeqID_119150 | MPPN (rrm-like) domain |
| Pyr_redox | SeqID_119535 SeqID_120156 | Pyridine nucleotide-disulphide |
| | | oxidoreducta |
| Carn_acyltransf | SeqID_119995 | Choline/Carnitine o- |
| | | acyltransferase |
| TUDOR | SeqID_121121 | Tudor domain |
| Krr1 | SeqID_120316 | Krr1 family |
| Asp | SeqID_122475 SeqID_123036 | Eukaryotic aspartyl protease |
| | SeqID_123118 SeqID_123359 | |
| | SeqID_121455 SeqID_120476 | |
| | SeqID_120494 SeqID_123971 | |
| BACK | SeqID_120833 SeqID_121637 | BTB And C-terminal Kelch |
| Uso1_p115_head | SeqID_122989 | Uso1/p115 like vesicle tethering |
| | | pro |
| ATP-synt_ab_C | SeqID_122371 SeqID_122660 | ATP synthase alpha/beta chain, C |
| | SeqID_123656 SeqID_123806 | termin |
| | SeqID_123805 | |
| Thiolase_C | SeqID_122429 SeqID_122772 | Thiolase, C-terminal domain |
| | SeqID_120310 SeqID_123864 | |
| 5_nucleotid | SeqID_120648 | 5′ nucleotidase family |
| FHA | SeqID_120176 SeqID_120836 | FHA domain |
| PID | SeqID_123247 | Phosphotyrosine interaction |
| | | domain (PTB/PID) |
| Citrate_synt | SeqID_122637 SeqID_122705 | Citrate synthase |
| | SeqID_120172 SeqID_124243 | |
| Helicase_C | SeqID_122054 SeqID_122318 | Helicase conserved C-terminal |
| | SeqID_122331 SeqID_122336 | domain |
| | SeqID_122624 SeqID_122677 | |
| | SeqID_119233 SeqID_119298 | |
| | SeqID_119324 SeqID_119620 | |
| | SeqID_119843 SeqID_119917 | |
| | SeqID_120153 SeqID_120168 | |
| | SeqID_120256 SeqID_120323 | |
| | SeqID_120342 SeqID_120575 | |
| | SeqID_120689 SeqID_120814 | |
| | SeqID_120914 SeqID_121032 | |
| | SeqID_123546 SeqID_121674 | |
| | SeqID_124119 SeqID_124137 | |
| | SeqID_124148 SeqID_124325 | |
| Neur_chan_LBD | SeqID_121005 SeqID_121087 | Neurotransmitter-gated ion- |
| | | channel lig |
| Ion_trans_2 | SeqID_121451 SeqID_119613 | Ion channel |
| | SeqID_119930 SeqID_119939 | |
| Myosin_tail_1 | SeqID_123386 | Myosin tail |
| TMS_TDE | SeqID_122691 SeqID_119438 | TMS membrane protein/tumour |
| | SeqID_124263 | differentially e |
| P16-Arc | SeqID_119921 | ARP2/3 complex 16 kDa subunit |
| | | (p16-Arc) |
| ATP-synt_ab_N | SeqID_122110 SeqID_122131 | ATP synthase alpha/beta family, |
| | SeqID_122660 SeqID_119160 | beta-ba |
| | SeqID_123806 SeqID_123811 | |
| | SeqID_124022 | |
| Endonuclease_NS | SeqID_123055 | DNA/RNA non-specific |
| | | endonuclease |
| Thiolase_N | SeqID_122429 SeqID_122772 | Thiolase, N-terminal domain |
| | SeqID_121350 SeqID_122890 | |
| | SeqID_122953 SeqID_123288 | |
| | SeqID_123365 SeqID_121440 | |
| | SeqID_121529 SeqID_120310 | |
| | SeqID_123593 SeqID_123864 | |
| Glycogen_syn | SeqID_121477 SeqID_120492 | Glycogen synthase |
| BTB | SeqID_119616 SeqID_120373 | BTB/POZ domain |
| | SeqID_121165 SeqID_121637 | |
| DUF236 | SeqID_119224 SeqID_119247 | Protein of unknown function |
| | SeqID_120712 SeqID_120713 | |
| Ubiq_cyt_C_chap | SeqID_122228 SeqID_121449 | Ubiquinol-cytochrome C |
| | SeqID_119888 SeqID_123755 | chaperone |
| Renin_r | SeqID_122129 SeqID_121442 | Renin receptor-like protein |
| | SeqID_123862 | |
| Cwf_Cwc_15 | SeqID_122116 SeqID_120731 | Cwf15/Cwc15 cell cycle control |
| | SeqID_121658 SeqID_124014 | protein |
| A_deaminase | SeqID_121003 | Adenosine/AMP deaminase |
| DUF164 | SeqID_121260 SeqID_123386 | Uncharacterized ACR, COG1579 |
| ATP-synt_C | SeqID_122557 SeqID_122592 | ATP synthase subunit C |
| | SeqID_122805 SeqID_123522 | |
| | SeqID_119902 SeqID_119958 | |
| | SeqID_119959 SeqID_120137 | |
| | SeqID_124207 SeqID_124336 | |
| ATP-synt_D | SeqID_122796 SeqID_123297 | ATP synthase subunit D |
| | SeqID_123366 SeqID_123854 | |
| LAG1 | SeqID_121272 SeqID_122595 | Longevity-assurance protein |
| | SeqID_121367 | (LAG1) |
| ATP-synt_E | SeqID_123534 | ATP synthase E chain |
| ATP-synt_F | SeqID_122088 SeqID_121348 | ATP synthase (F/14-kDa) subunit |
| | SeqID_121745 SeqID_121827 | |
| | SeqID_121881 | |
| Filamin | SeqID_120307 SeqID_120510 | Filamin/ABP280 repeat |
| MazG | SeqID_119952 | MazG nucleotide |
| | | pyrophosphohydrolase domain |
| ATP-synt_G | SeqID_122669 SeqID_119783 | Mitochondrial ATP synthase g |
| | SeqID_124110 | subunit |
| EF1_GNE | SeqID_121982 SeqID_122152 | EF-1 guanine nucleotide exchange |
| | SeqID_122572 SeqID_119628 | domain |
| | SeqID_119899 SeqID_123606 | |
| FAD_binding_1 | SeqID_122094 SeqID_122444 | FAD binding domain |
| | SeqID_123823 | |
| FAD_binding_2 | SeqID_120807 | FAD binding domain |
| Dynein_light | SeqID_122635 SeqID_123252 | Dynein light chain type 1 |
| | SeqID_119812 SeqID_123564 | |
| FAD_binding_3 | SeqID_122411 SeqID_123933 | FAD binding domain |
| Astacin | SeqID_122226 SeqID_122581 | Astacin (Peptidase family M12A) |
| | SeqID_123481 SeqID_119601 | |
| | SeqID_120015 SeqID_120571 | |
| | SeqID_120933 SeqID_121174 | |
| | SeqID_121216 SeqID_124300 | |
| Tfb4 | SeqID_122561 SeqID_123565 | Transcription factor Tfb4 |
| Adaptin_N | SeqID_120538 SeqID_120950 | Adaptin N terminal region |
| EFG_IV | SeqID_121397 SeqID_120540 | Elongation factor G, domain IV |
| S-AdoMet_synt_C | SeqID_123143 SeqID_119596 | S-adenosylmethionine synthetase, |
| | | C-te |
| Ribosomal_S10 | SeqID_122673 SeqID_119858 | Ribosomal protein S10p/S20e |
| | SeqID_123703 SeqID_121948 | |
| Ribosomal_S11 | SeqID_122146 SeqID_123024 | Ribosomal protein S11 |
| | SeqID_123430 SeqID_120073 | |
| | SeqID_120744 SeqID_123697 | |
| | SeqID_124177 | |
| Ribosomal_S12 | SeqID_122060 SeqID_123235 | Ribosomal protein S12 |
| | SeqID_123361 SeqID_123428 | |
| | SeqID_123434 SeqID_123629 | |
| | SeqID_124279 | |
| UCR_hinge | SeqID_122302 SeqID_123516 | Ubiquinol-cytochrome C reductase |
| SH3_1 | SeqID_123228 SeqID_119323 | SH3 domain |
| | SeqID_120958 | |
| Ribosomal_S13 | SeqID_122782 SeqID_122809 | Ribosomal protein S13/S18 |
| | SeqID_123978 SeqID_124200 | |
| SAP | SeqID_120587 | SAP domain |
| SH3_2 | SeqID_123228 SeqID_120958 | Variant SH3 domain |
| Ribosomal_S14 | SeqID_122064 SeqID_122107 | Ribosomal protein S14p/S29e |
| | SeqID_120012 SeqID_121048 | |
| | SeqID_121107 SeqID_123630 | |
| | SeqID_123890 | |
| Brix | SeqID_121565 SeqID_123250 | Brix domain |
| | SeqID_119314 SeqID_120464 | |
| | SeqID_120490 SeqID_121589 | |
| | SeqID_121109 | |
| Ribosomal_S15 | SeqID_122373 SeqID_123410 | Ribosomal protein S15 |
| | SeqID_123433 SeqID_121412 | |
| | SeqID_123718 | |
| Ras | SeqID_121288 SeqID_122204 | Ras family |
| | SeqID_122360 SeqID_122392 | |
| | SeqID_122397 SeqID_122560 | |
| | SeqID_122575 SeqID_122579 | |
| | SeqID_122619 SeqID_122671 | |
| | SeqID_122838 SeqID_122872 | |
| | SeqID_122903 SeqID_123052 | |
| | SeqID_123189 SeqID_123241 | |
| | SeqID_123414 SeqID_123422 | |
| | SeqID_119204 SeqID_119290 | |
| | SeqID_119645 SeqID_119708 | |
| | SeqID_119885 SeqID_119891 | |
| | SeqID_120379 SeqID_120664 | |
| | SeqID_121613 SeqID_120982 | |
| | SeqID_123605 SeqID_121093 | |
| | SeqID_123568 SeqID_123726 | |
| | SeqID_123740 SeqID_121691 | |
| | SeqID_123960 SeqID_123988 | |
| | SeqID_123991 SeqID_121918 | |
| zf-TAZ | SeqID_120357 | TAZ zinc finger |
| Ribosomal_S17 | SeqID_122602 SeqID_122629 | Ribosomal protein S17 |
| | SeqID_119883 SeqID_123918 | |
| | SeqID_123925 | |
| Ribosomal_S18 | SeqID_122652 | Ribosomal protein S18 |
| ELK | SeqID_120763 | ELK domain |
| Ribosomal_S19 | SeqID_122056 SeqID_123333 | Ribosomal protein S19 |
| | SeqID_123450 SeqID_123685 | |
| C2 | SeqID_119599 SeqID_119684 | C2 domain |
| | SeqID_120248 | |
| eIF-5_eIF-2B | SeqID_123321 SeqID_119265 | Domain found in IF2B/IF5 |
| | SeqID_120603 SeqID_121769 | |
| VWD | SeqID_122463 SeqID_123112 | von Willebrand factor type D |
| | SeqID_119726 SeqID_123592 | domain |
| GHMP_kinases | SeqID_123199 | GHMP kinases putative ATP- |
| PAP_RNA-bind | SeqID_120989 | Poly(A) polymerase predicted RNA |
| | | binding |
| C4 | SeqID_119273 SeqID_119634 | C-terminal tandem repeated |
| | | domain in t |
| P_proprotein | SeqID_121230 SeqID_122663 | Proprotein convertase P-domain |
| | SeqID_123014 SeqID_123393 | |
| ELO | SeqID_122222 SeqID_122315 | GNS1/SUR4 family |
| | SeqID_119651 SeqID_121493 | |
| | SeqID_120991 SeqID_124009 | |
| | SeqID_124028 | |
| p450 | SeqID_120075 SeqID_120579 | Cytochrome P450 |
| Complex1_30kDa | SeqID_121297 SeqID_119579 | Respiratory-chain NADH |
| | | dehydrogenase, |
| wnt | SeqID_122540 | wnt family |
| OATP | SeqID_119717 | Organic Anion Transporter |
| | | Polypeptide (OATP) |
| RIIa | SeqID_122847 SeqID_121204 | Regulatory subunit of type II PKA |
| | | R-subunit |
| Pyrophosphatase | SeqID_122209 SeqID_123850 | Inorganic pyrophosphatase |
| A1_Propeptide | SeqID_122475 SeqID_123036 | A1 Propeptide |
| | SeqID_123359 SeqID_121455 | |
| | SeqID_120476 SeqID_120494 | |
| | SeqID_123971 | |
| PRP1_N | SeqID_121212 | PRP1 splicing factor, N-terminal |
| RhoGAP | SeqID_120222 SeqID_120311 | RhoGAP domain |
| G-alpha | SeqID_120144 SeqID_120531 | G-protein alpha subunit |
| | SeqID_120703 SeqID_121138 | |
| Guanylate_kin | SeqID_120766 | Guanylate kinase |
| HSF_DNA-bind | SeqID_123050 | HSF-type DNA-binding |
| DnaJ_CXXCXGXG | SeqID_121279 SeqID_122722 | DnaJ central domain (4 repeats) |
| | SeqID_121405 SeqID_121507 | |
| | SeqID_120879 SeqID_121218 | |
| | SeqID_123882 | |
| Collagen | SeqID_121964 SeqID_121996 | Collagen triple helix repeat (20 |
| | SeqID_122013 SeqID_122019 | copies) |
| | SeqID_122027 SeqID_122216 | |
| | SeqID_122291 SeqID_122304 | |
| | SeqID_122313 SeqID_122472 | |
| | SeqID_122536 SeqID_122650 | |
| | SeqID_121377 SeqID_122871 | |
| | SeqID_122911 SeqID_122954 | |
| | SeqID_123029 SeqID_123087 | |
| | SeqID_123176 SeqID_123223 | |
| | SeqID_123423 SeqID_119253 | |
| | SeqID_119404 SeqID_119418 | |
| | SeqID_119540 SeqID_119564 | |
| | SeqID_119634 SeqID_119798 | |
| | SeqID_119948 SeqID_119971 | |
| | SeqID_120106 SeqID_120175 | |
| | SeqID_120214 SeqID_120361 | |
| | SeqID_120474 SeqID_120626 | |
| | SeqID_120674 SeqID_120705 | |
| | SeqID_123663 SeqID_121026 | |
| | SeqID_121073 SeqID_121150 | |
| | SeqID_123664 SeqID_123677 | |
| | SeqID_123676 SeqID_123769 | |
| | SeqID_123783 SeqID_123827 | |
| | SeqID_121953 SeqID_121958 | |
| Tubulin_C | SeqID_122269 SeqID_122332 | Tubulin/FtsZ family, C-terminal |
| | SeqID_122440 SeqID_119159 | domain |
| | SeqID_119381 SeqID_119720 | |
| | SeqID_120775 SeqID_123545 | |
| | SeqID_123884 SeqID_123998 | |
| | SeqID_121849 SeqID_121940 | |
| JmjC | SeqID_122284 SeqID_120520 | jmjC domain |
| Zona_pellucida | SeqID_119201 SeqID_120047 | Zona pellucida-like domain |
| CH | SeqID_122025 SeqID_122264 | Calponin homology (CH) domain |
| | SeqID_122337 SeqID_122473 | |
| | SeqID_122788 SeqID_123499 | |
| | SeqID_119750 SeqID_120539 | |
| | SeqID_123855 SeqID_124085 | |
| | SeqID_124206 | |
| E-MAP-115 | SeqID_120063 | E-MAP-115 family |
| CPSase_L_D2 | SeqID_119260 SeqID_119619 | Carbamoyl-phosphate synthase L |
| | SeqID_120976 | chain, A |
| HMG_box | SeqID_122876 SeqID_122918 | HMG (high mobility group) box |
| | SeqID_121497 SeqID_120582 | |
| | SeqID_120832 SeqID_120943 | |
| Ribosomal_S25 | SeqID_122611 SeqID_122695 | S25 ribosomal protein |
| | SeqID_123417 SeqID_123597 | |
| | SeqID_124222 SeqID_124340 | |
| Ribosomal_S27 | SeqID_122053 SeqID_122726 | Ribosomal protein S27a |
| | SeqID_121490 SeqID_123637 | |
| | SeqID_123659 | |
| Galactosyl_T | SeqID_120408 | Galactosyltransferase |
| CS | SeqID_122778 SeqID_122828 | CS domain |
| | SeqID_123335 SeqID_121480 | |
| | SeqID_120610 | |
| Voltage_CLC | SeqID_120735 SeqID_121213 | Voltage gated chloride channel |
| Lactamase_B | SeqID_120930 | Metallo-beta-lactamase |
| | | superfamily |
| eRF1_1 | SeqID_119244 | eRF1 domain 1 |
| eRF1_2 | SeqID_123076 SeqID_119244 | eRF1 domain 2 |
| Flavoprotein | SeqID_122326 SeqID_119773 | Flavoprotein |
| eRF1_3 | SeqID_123076 SeqID_119244 | eRF1 domain 3 |
| EMP24_GP25L | SeqID_122517 SeqID_119571 | emp24/gp25L/p24 family |
| | SeqID_123733 | |
| NOT2_3_5 | SeqID_122445 SeqID_121346 | NOT2/NOT3/NOT5 family |
| | SeqID_123876 | |
| Hydantoinase_A | SeqID_121246 SeqID_121266 | Hydantoinase/oxoprolinase |
| Plus-3 | SeqID_122270 | Plus-3 domain |
| IBB | SeqID_122870 SeqID_121423 | Importin beta binding domain |
| | SeqID_119952 SeqID_121148 | |
| Ald_Xan_dh_C2 | SeqID_120485 SeqID_121912 | Aldehyde oxidase and xanthine |
| | | dehydroge |
| Complex1_49kDa | SeqID_120479 | Respiratory-chain NADH |
| | | dehydrogenase, |
| SSrecog | SeqID_120076 | Structure-specific recognition |
| | | protein |
| Aldo_ket_red | SeqID_123277 | Aldo/keto reductase family |
| TFIIS_C | SeqID_122597 SeqID_123714 | Transcription factor S-II (TFIIS) |
| Thioredoxin | SeqID_121221 SeqID_122115 | Thioredoxin |
| | SeqID_122712 SeqID_123314 | |
| | SeqID_120315 SeqID_120528 | |
| | SeqID_121134 SeqID_123686 | |
| | SeqID_123796 SeqID_121887 | |
| vATP-synt_E | SeqID_122754 SeqID_121463 | ATP synthase (E/31 kDa) subunit |
| | SeqID_119218 SeqID_124020 | |
| | SeqID_121724 | |
| Metallothio | SeqID_119714 | Metallothionein |
| Mo-co_dimer | SeqID_122426 SeqID_119301 | Mo-co oxidoreductase dimerisation |
| | SeqID_123908 | doma |
| ORC2 | SeqID_121926 | Origin recognition complex subunit 2 |
| Ribosomal_S30 | SeqID_122415 SeqID_123507 | Ribosomal protein S30 |
| | SeqID_120390 SeqID_123707 | |
| SCP | SeqID_121229 SeqID_121227 | SCP-like extracellular protein |
| | SeqID_121228 SeqID_122770 | |
| | SeqID_122767 SeqID_122864 | |
| | SeqID_123501 SeqID_121425 | |
| | SeqID_119399 SeqID_119556 | |
| | SeqID_120347 SeqID_121641 | |
| GPP34 | SeqID_120614 | Golgi phosphoprotein 3 (GPP34) |
| DM | SeqID_121139 | DM DNA binding domain |
| GTP_CDC | SeqID_119791 | Cell division protein |
| AhpC-TSA | SeqID_122512 SeqID_122760 | AhpC/TSA family |
| | SeqID_123258 SeqID_123300 | |
| | SeqID_119348 SeqID_123739 | |
| | SeqID_123758 | |
| CAP_GLY | SeqID_123227 | CAP-Gly domain |
| XRCC1_N | SeqID_120679 | XRCC1 N terminal domain |
| DUF26 | SeqID_122879 | Domain of unknown function |
| | | DUF26 |
| TRAP_beta | SeqID_122465 SeqID_119980 | Translocon-associated protein |
| | SeqID_123848 | beta (TRAPB) |
| Cation_ATPase_N | SeqID_122184 SeqID_119574 | Cation transporter/ATPase, N- |
| | SeqID_119844 SeqID_120162 | terminus |
| | SeqID_124141 SeqID_124234 | |
| XPG_I | SeqID_120903 | XPG I-region |
| TFIID-31kDa | SeqID_122432 SeqID_123899 | Transcription initiation factor IID, |
| | | 31 kD |
| ARPC4 | SeqID_123032 SeqID_121098 | ARP2/3 complex 20 kDa subunit |
| | | (ARPC4) |
| Nop | SeqID_122208 SeqID_119511 | Putative snoRNA binding domain |
| | SeqID_120274 SeqID_123696 | |
| DX | SeqID_119623 | DX module |
| Choline_kinase | SeqID_122682 SeqID_124140 | Choline/ethanolamine kinase |
| | SeqID_121776 | |
| Seryl_tRNA_N | SeqID_122169 SeqID_124027 | Seryl-tRNA synthetase N-terminal |
| | | domain |
| UFD1 | SeqID_122278 SeqID_122991 | Ubiquitin fusion degradation |
| | SeqID_120363 SeqID_123652 | protein UFD1 |
| AICARFT_IMPCHas | SeqID_121071 | AICARFT/IMPCHase bienzyme |
| Adap_comp_sub | SeqID_122747 SeqID_119495 | Adaptor complexes medium |
| | SeqID_120295 | subunit family |
| V_ATPase_I | SeqID_121161 | V-type ATPase 116 kDa subunit |
| | | family |
| eIF-6 | SeqID_122640 SeqID_120843 | eIF-6 family |
| | SeqID_123945 | |
| TAF | SeqID_121234 SeqID_122483 | TATA box binding protein |
| | SeqID_122744 SeqID_122771 | associated fac |
| | SeqID_119330 SeqID_121479 | |
| | SeqID_121482 SeqID_124258 | |
| | SeqID_124262 | |
| HSP70 | SeqID_121224 SeqID_121246 | Hsp70 protein |
| | SeqID_121258 SeqID_121266 | |
| | SeqID_122340 SeqID_122574 | |
| | SeqID_121338 SeqID_123128 | |
| | SeqID_123276 SeqID_121398 | |
| | SeqID_121394 SeqID_121403 | |
| | SeqID_121456 SeqID_119310 | |
| | SeqID_119878 SeqID_121465 | |
| | SeqID_121528 SeqID_120193 | |
| | SeqID_120276 SeqID_120425 | |
| | SeqID_120426 SeqID_120477 | |
| | SeqID_120618 SeqID_120675 | |
| | SeqID_123580 SeqID_121647 | |
| | SeqID_123958 SeqID_121785 | |
| Rho_GDI | SeqID_123503 SeqID_119733 | RHO protein GDP dissociation |
| | SeqID_121942 | inhibitor |
| E2F_TDP | SeqID_122353 SeqID_120460 | E2F/DP family winged-helix DNA- |
| | SeqID_120823 SeqID_124183 | binding domai |
| VPS28 | SeqID_122699 SeqID_119677 | VPS28 protein |
| | SeqID_124233 | |
| SNARE | SeqID_122431 SeqID_123902 | SNARE domain |
| CBM_14 | SeqID_120683 | Chitin binding Peritrophin-A |
| | | domain |
| Fic | SeqID_119770 | Fic protein family |
| Peptidase_M16_C | SeqID_123083 SeqID_119755 | Peptidase M16 inactive domain |
| efhand | SeqID_122031 SeqID_122171 | EF hand |
| | SeqID_122356 SeqID_122443 | |
| | SeqID_122544 SeqID_122641 | |
| | SeqID_122769 SeqID_122783 | |
| | SeqID_122802 SeqID_122976 | |
| | SeqID_123119 SeqID_119228 | |
| | SeqID_119553 SeqID_119614 | |
| zf-CCHC | SeqID_122365 SeqID_122548 | Zinc knuckle |
| | SeqID_123105 SeqID_121406 | |
| | SeqID_121418 SeqID_119748 | |
| | SeqID_119884 SeqID_119889 | |
| | SeqID_121017 SeqID_121081 | |
| | SeqID_121192 SeqID_123993 | |
| Rieske | SeqID_119282 | Rieske [2Fe—2S] domain |
| EF_TS | SeqID_122638 SeqID_121030 | Elongation factor TS |
| GTP_EFTU | SeqID_122392 SeqID_122600 | Elongation factor Tu GTP binding |
| | SeqID_122657 SeqID_121329 | domain |
| | SeqID_122792 SeqID_122872 | |
| | SeqID_123241 SeqID_121430 | |
| | SeqID_119311 SeqID_119332 | |
| | SeqID_119352 SeqID_119600 | |
| | SeqID_120413 SeqID_120540 | |
| | SeqID_121558 SeqID_121576 | |
| | SeqID_121613 SeqID_123754 | |
| | SeqID_121709 SeqID_123950 | |
| | SeqID_124180 SeqID_121717 | |
| | SeqID_121740 SeqID_121805 | |
| | SeqID_121824 | |
| TPD52 | SeqID_120171 | Tumour protein D52 family |
| UCR_TM | SeqID_119282 SeqID_121586 | Ubiquinol cytochrome reductase |
| | SeqID_121732 SeqID_121833 | transmembrane |
| Coq4 | SeqID_120870 | Coenzyme Q (ubiquinone) |
| | | biosynthesis protein |
| zf-HIT | SeqID_123532 | HIT zinc finger |
| CUB | SeqID_123097 SeqID_119304 | CUB domain |
| DUF32 | SeqID_119459 SeqID_119801 | Domain of unknown function |
| | SeqID_121149 | DUF32 |
| adh_short | SeqID_121285 SeqID_122087 | short chain dehydrogenase |
| | SeqID_122187 SeqID_122421 | |
| | SeqID_122523 SeqID_122530 | |
| | SeqID_122596 SeqID_121476 | |
| | SeqID_120081 SeqID_120916 | |
| | SeqID_123628 SeqID_123706 | |
| | SeqID_123772 SeqID_123943 | |
| RGS | SeqID_121152 | Regulator of G protein signaling |
| PMM | SeqID_122570 SeqID_124322 | Eukaryotic phosphomannomutase |
| ER | SeqID_121000 | Enhancer of rudimentary |
| Patched | SeqID_120169 SeqID_120785 | Patched family |
| | SeqID_120998 | |
| RRM_1 | SeqID_121236 SeqID_121239 | RNA recognition motif. (a.k.a. |
| | SeqID_122099 SeqID_122100 | RRM, RBD, or |
| | SeqID_122122 SeqID_122126 | |
| | SeqID_122158 SeqID_122202 | |
| | SeqID_122250 SeqID_122361 | |
| | SeqID_122469 SeqID_122526 | |
| | SeqID_122528 SeqID_122549 | |
| | SeqID_122676 SeqID_122700 | |
| | SeqID_122831 SeqID_122888 | |
| | SeqID_122938 SeqID_122962 | |
| | SeqID_123004 SeqID_123008 | |
| | SeqID_123071 SeqID_123101 | |
| | SeqID_123331 SeqID_123370 | |
| | SeqID_123384 SeqID_123396 | |
| | SeqID_123424 SeqID_119150 | |
| | SeqID_119180 SeqID_119191 | |
| | SeqID_119215 SeqID_119241 | |
| | SeqID_124159 SeqID_119361 | |
| | SeqID_119362 SeqID_119398 | |
| | SeqID_119489 SeqID_119527 | |
| | SeqID_119551 SeqID_124128 | |
| I-set | SeqID_119655 SeqID_119820 | Immunoglobulin I-set domain |
| | SeqID_119864 SeqID_119970 | |
| | SeqID_121498 SeqID_121513 | |
| | SeqID_120027 SeqID_123815 | |
| | SeqID_120174 SeqID_120251 | |
| | SeqID_120319 SeqID_120336 | |
| | SeqID_120348 SeqID_120467 | |
| | SeqID_120468 SeqID_120514 | |
| | SeqID_120570 SeqID_120741 | |
| | SeqID_120765 SeqID_123671 | |
| | SeqID_121559 SeqID_121578 | |
| | SeqID_121599 SeqID_121600 | |
| | SeqID_121609 SeqID_120880 | |
| | SeqID_120956 SeqID_121015 | |
| | SeqID_121055 SeqID_121119 | |
| | SeqID_121160 SeqID_123601 | |
| | SeqID_123673 SeqID_123785 | |
| | SeqID_123791 SeqID_123809 | |
| | SeqID_123819 SeqID_123820 | |
| | SeqID_123839 SeqID_121697 | |
| | SeqID_124070 SeqID_124091 | |
| | SeqID_124152 SeqID_124176 | |
| | SeqID_124194 SeqID_124259 | |
| | SeqID_121731 SeqID_121748 | |
| | SeqID_121845 SeqID_121882 | |
| | SeqID_121928 SeqID_121933 | |
| | SeqID_123529 SeqID_119158 | |
| | SeqID_119196 SeqID_119491 | |
| | SeqID_119569 SeqID_119713 | |
| | SeqID_119816 SeqID_120343 | |
| TBC | SeqID_119295 SeqID_119731 | TBC domain |
| | SeqID_121193 | |
| Calpain_III | SeqID_120374 | Calpain large subunit, domain III |
| CBFD_NFYB_HMF | SeqID_121234 SeqID_122039 | Histone-like transcription factor |
| | SeqID_122046 SeqID_122119 | (CBF/ |
| | SeqID_122455 SeqID_122483 | |
| | SeqID_122582 SeqID_122688 | |
| | SeqID_122744 SeqID_122766 | |
| | SeqID_122771 SeqID_121314 | |
| | SeqID_123003 SeqID_123317 | |
| | SeqID_123463 SeqID_123473 | |
| | SeqID_121448 SeqID_121446 | |
| | SeqID_119330 SeqID_119493 | |
| | SeqID_119512 SeqID_119521 | |
| | SeqID_119609 SeqID_119776 | |
| | SeqID_121479 SeqID_121482 | |
| | SeqID_120790 SeqID_121601 | |
| | SeqID_123744 SeqID_121643 | |
| | SeqID_121663 SeqID_121675 | |
| | SeqID_121684 SeqID_121688 | |
| | SeqID_121706 SeqID_124105 | |
| | SeqID_124164 SeqID_124258 | |
| | SeqID_124262 SeqID_124276 | |
| | SeqID_121771 SeqID_121809 | |
| | SeqID_121823 SeqID_121905 | |
| UDPG_MGDP_dh_C | SeqID_123494 | UDP-glucose/GDP-mannose |
| | | dehydrogenase |
| zf-UBP | SeqID_122511 SeqID_122662 | Zn-finger in ubiquitin-hydrolases |
| | SeqID_120244 | and other |
| UPF0184 | SeqID_122379 SeqID_123860 | Uncharacterised protein family |
| | | (UPF0184) |
| FF | SeqID_121478 SeqID_120846 | FF domain |
| | SeqID_121180 | |
| Rhodanese | SeqID_123181 SeqID_123269 | Rhodanese-like domain |
| TBP | SeqID_120108 SeqID_121146 | Transcription factor TFIID (or |
| | SeqID_121734 | TATA-binding |
| Cytochrom_C1 | SeqID_119212 | Cytochrome C1 family |
| PI-PLC-Y | SeqID_120248 | Phosphatidylinositol-specific |
| | | phospholipase |
| Glycolytic | SeqID_121242 SeqID_121268 | Fructose-bisphosphate aldolase |
| | SeqID_122585 SeqID_121503 | class-I |
| | SeqID_120227 SeqID_120758 | |
| | SeqID_123730 SeqID_124335 | |
| | SeqID_121856 | |
| COX15-CtaA | SeqID_119736 | Cytochrome oxidase assembly |
| Actin | SeqID_121231 SeqID_121257 | Actin |
| | SeqID_122239 SeqID_122271 | |
| | SeqID_122678 SeqID_122922 | |
| | SeqID_122921 SeqID_122940 | |
| | SeqID_122974 SeqID_122977 | |
| | SeqID_122985 SeqID_123092 | |
| | SeqID_123347 SeqID_123374 | |
| | SeqID_123381 SeqID_123376 | |
| | SeqID_123378 SeqID_123388 | |
| | SeqID_123397 SeqID_123394 | |
| | SeqID_123402 SeqID_119184 | |
| | SeqID_121411 SeqID_119898 | |
| | SeqID_121581 SeqID_121592 | |
| | SeqID_123541 SeqID_123542 | |
| | SeqID_123817 SeqID_123843 | |
| | SeqID_121690 SeqID_124081 | |
| | SeqID_124084 SeqID_124093 | |
| | SeqID_124188 SeqID_124303 | |
| | SeqID_121834 SeqID_121888 | |
| | SeqID_121911 | |
| ATP_synt_H | SeqID_122810 SeqID_120261 | ATP synthase subunit H |
| | SeqID_124197 | |
| SET | SeqID_122866 SeqID_123437 | SET domain |
| | SeqID_119452 SeqID_119703 | |
| | SeqID_121141 | |
| Ribosomal_L5_C | SeqID_121970 SeqID_122399 | ribosomal L5P family C-terminus |
| | SeqID_122665 SeqID_123116 | |
| | SeqID_123183 SeqID_120376 | |
| | SeqID_123547 SeqID_124178 | |
| ADK_lid | SeqID_121282 SeqID_122317 | Adenylate kinase, active site lid |
| GrpE | SeqID_122071 SeqID_123157 | GrpE |
| | SeqID_123878 SeqID_121526 | |
| | SeqID_120867 SeqID_123661 | |
| | SeqID_121743 | |
| XRN_N | SeqID_122345 SeqID_121207 | XRN 5′-3′ exonuclease N-terminus |
| | SeqID_124106 | |
| Ribosomal_L1 | SeqID_122679 SeqID_122715 | Ribosomal protein L1p/L10e family |
| | SeqID_124062 | |
| RhoGEF | SeqID_122254 SeqID_120745 | RhoGEF domain |
| Y_phosphatase | SeqID_123060 SeqID_119220 | Protein-tyrosine phosphatase |
| | SeqID_119686 SeqID_119866 | |
| | SeqID_119975 SeqID_120184 | |
| | SeqID_120234 SeqID_120792 | |
| | SeqID_121037 SeqID_121036 | |
| | SeqID_121105 | |
| Ribosomal_L2 | SeqID_122387 SeqID_122576 | Ribosomal Proteins L2, RNA |
| | SeqID_119709 SeqID_121219 | binding dom |
| | SeqID_123662 SeqID_124015 | |
| | SeqID_121891 | |
| 7tm_1 | SeqID_119786 | 7 transmembrane receptor |
| | | (rhodopsin family) |
| Ribosomal_L3 | SeqID_122659 SeqID_122727 | Ribosomal protein L3 |
| | SeqID_123246 SeqID_121145 | |
| | SeqID_123585 | |
| Sdh_cyt | SeqID_122442 SeqID_123881 | Succinate dehydrogenase |
| | | cytochrome b subunit |
| DNA_topoisoIV | SeqID_120500 | DNA gyrase/topoisomerase IV, |
| | | subunit A |
| 7tm_2 | SeqID_120113 | 7 transmembrane receptor |
| | | (Secretin family) |
| Ribosomal_L4 | SeqID_122113 SeqID_122385 | Ribosomal protein L4/L1 family |
| | SeqID_121324 SeqID_122845 | |
| | SeqID_121127 SeqID_123536 | |
| | SeqID_123727 | |
| 7tm_3 | SeqID_120501 SeqID_120729 | 7 transmembrane receptor |
| | SeqID_120999 | (metabotropic gluta |
| Ribosomal_L5 | SeqID_121970 SeqID_122399 | Ribosomal protein L5 |
| | SeqID_122665 SeqID_122908 | |
| | SeqID_123116 SeqID_123183 | |
| | SeqID_123517 SeqID_123547 | |
| | SeqID_124178 | |
| PAPS_reduct | SeqID_120874 | Phosphoadenosine |
| | | phosphosulfate reductase |
| Ribosomal_L6 | SeqID_122583 SeqID_123234 | Ribosomal protein L6 |
| | SeqID_121602 SeqID_120932 | |
| | SeqID_123631 | |
| ADAM_spacer1 | SeqID_119479 | ADAM-TS Spacer 1 |
| HSP90 | SeqID_121981 SeqID_122028 | HSP90 protein |
| | SeqID_122738 SeqID_121524 | |
| | SeqID_120445 SeqID_120787 | |
| | SeqID_121577 SeqID_123813 | |
| | SeqID_121774 SeqID_121829 | |
| | SeqID_121895 | |
| Abhydrolase_1 | SeqID_119405 SeqID_121610 | alpha/beta hydrolase fold |
| Peptidase_M1 | SeqID_120743 SeqID_120851 | Peptidase family M1 |
| Herpes_LP | SeqID_120428 | Herpesvirus leader protein |
| Pescadillo_N | SeqID_122934 | Pescadillo N-terminus |
| Abhydrolase_3 | SeqID_119940 SeqID_120282 | alpha/beta hydrolase fold |
| | SeqID_120891 | |
| CPSase_L_chain | SeqID_119260 SeqID_119619 | Carbamoyl-phosphate synthase L |
| | | chain, |
| PMI_typeI | SeqID_122372 SeqID_123985 | Phosphomannose isomerase type I |
| Glyco_hydro_18 | SeqID_122290 SeqID_119433 | Glycosyl hydrolases family 18 |
| | SeqID_123731 SeqID_124053 | |
| Profilin | SeqID_122484 SeqID_120556 | Profilin |
| | SeqID_123780 SeqID_121762 | |
| | SeqID_121862 | |
| RIO1 | SeqID_120808 | RIO1 family |
| TCTP | SeqID_122571 SeqID_123113 | Translationally controlled tumour |
| | SeqID_121485 SeqID_120084 | protein |
| | SeqID_120085 SeqID_123959 | |
| NTF2 | SeqID_122143 SeqID_123505 | Nuclear transport factor 2 (NTF2) |
| | SeqID_123530 SeqID_119273 | domain |
| | SeqID_120761 | |
| AP_endonuc_2 | SeqID_120685 | Xylose isomerase-like TIM barrel |
| GATase_2 | SeqID_122634 SeqID_119643 | Glutamine amidotransferases |
| | SeqID_123847 | class-II |
| RRS1 | SeqID_122559 SeqID_122857 | Ribosome biogenesis regulatory |
| | SeqID_123569 | protein (RRS1 |
| Gln-synt_C | SeqID_122482 SeqID_120289 | Glutamine synthetase, catalytic |
| | | domain |
| Pribosyltran | SeqID_122656 SeqID_122880 | Phosphoribosyl transferase |
| | SeqID_120272 SeqID_124138 | domain |
| DUF367 | SeqID_120808 | Domain of unknown function |
| | | (DUF367) |
| PWP2 | SeqID_121293 | Periodic tryptophan protein 2 WD |
| | | repeat asso |
| RNA_pol_Rpa2_4 | SeqID_119390 | RNA polymerase I, Rpa2 specific |
| | | domain |
| HesB | SeqID_123420 | HesB-like domain |
| SPRY | SeqID_122960 SeqID_119817 | SPRY domain |
| COX4 | SeqID_122622 SeqID_122739 | Cytochrome c oxidase subunit IV |
| | SeqID_121444 SeqID_121470 | |
| | SeqID_120419 SeqID_121605 | |
| | SeqID_123898 SeqID_121775 | |
| Gp-FAR-1 | SeqID_122790 SeqID_123533 | Nematode fatty acid retinoid |
| | SeqID_120157 SeqID_123934 | binding protein |
| | SeqID_124215 | |
| Gln-synt_N | SeqID_122482 SeqID_123792 | Glutamine synthetase, beta-Grasp |
| | | domain |
| Transketolase_C | SeqID_119346 | Transketolase, C-terminal domain |
| Ctr | SeqID_119988 | Ctr copper transporter family |
| RCC1 | SeqID_122092 SeqID_120326 | Regulator of chromosome |
| | SeqID_123910 | condensation (RCC1) |
| Pkinase_Tyr | SeqID_121233 SeqID_121271 | Protein tyrosine kinase |
| | SeqID_122086 SeqID_122117 | |
| | SeqID_122221 SeqID_122233 | |
| | SeqID_122285 SeqID_122384 | |
| | SeqID_122470 SeqID_122618 | |
| | SeqID_122687 SeqID_122758 | |
| | SeqID_123026 SeqID_123421 | |
| | SeqID_123491 SeqID_119148 | |
| | SeqID_121409 SeqID_121416 | |
| | SeqID_119206 SeqID_119219 | |
| | SeqID_119238 SeqID_119245 | |
| | SeqID_119296 SeqID_119338 | |
| | SeqID_119410 SeqID_119412 | |
| | SeqID_119422 SeqID_119436 | |
| | SeqID_119453 SeqID_119472 | |
| | SeqID_119483 SeqID_119520 | |
| | SeqID_119525 SeqID_119541 | |
| | SeqID_119728 SeqID_119764 | |
| | SeqID_119789 SeqID_119828 | |
| | SeqID_120006 SeqID_120051 | |
| | SeqID_120126 SeqID_120166 | |
| | SeqID_120298 SeqID_120406 | |
| | SeqID_120418 SeqID_120428 | |
| | SeqID_120452 SeqID_120453 | |
| | SeqID_120550 SeqID_120636 | |
| | SeqID_120663 SeqID_120672 | |
| | SeqID_120772 SeqID_121622 | |
| | SeqID_120934 SeqID_120996 | |
| | SeqID_121189 SeqID_123672 | |
| | SeqID_123838 SeqID_123977 | |
| | SeqID_123989 SeqID_124109 | |
| | SeqID_124294 SeqID_121714 | |
| | SeqID_121742 SeqID_121803 | |
| | SeqID_121897 SeqID_121907 | |
| OSCP | SeqID_122390 SeqID_123173 | ATP synthase delta (OSCP) |
| | SeqID_123852 SeqID_121694 | subunit |
| Ham1p_like | SeqID_120320 | Ham1 family |
| Transketolase_N | SeqID_122651 SeqID_119261 | Transketolase, thiamine |
| | SeqID_123846 | diphosphate b |
| HD | SeqID_119514 SeqID_119787 | HD domain |
| MreB_Mbl | SeqID_121224 SeqID_121246 | MreB/Mbl protein |
| | SeqID_121258 SeqID_121266 | |
| | SeqID_122340 SeqID_119310 | |
| | SeqID_120675 SeqID_123580 | |
| Fzo_mitofusin | SeqID_119682 | fzo-like conserved region |
| GCFC | SeqID_120111 | GC-rich sequence DNA-binding |
| | | factor-like pro |
| DER1 | SeqID_123172 SeqID_120680 | Der1-like family |
| Phosphorylase | SeqID_120862 | Carbohydrate phosphorylase |
| SH2 | SeqID_122470 SeqID_123228 | SH2 domain |
| | SeqID_119500 SeqID_120234 | |
| | SeqID_120452 SeqID_120453 | |
| | SeqID_120921 SeqID_120958 | |
| CXC | SeqID_121122 | Tesmin/TSO1-like CXC domain |
| Aldedh | SeqID_120628 | Aldehyde dehydrogenase family |
| CK_II_beta | SeqID_120267 | Casein kinase II regulatory subunit |
| ERM | SeqID_121435 SeqID_121811 | Ezrin/radixin/moesin family |
| 3HCDH_N | SeqID_122892 SeqID_119503 | 3-hydroxyacyl-CoA |
| | SeqID_120447 | dehydrogenase, NAD binding |
| Troponin | SeqID_121972 SeqID_122915 | Troponin |
| | SeqID_123477 SeqID_120512 | |
| | SeqID_123537 | |
| zf-U1 | SeqID_122257 SeqID_122817 | U1 zinc finger |
| | SeqID_119881 | |
| Dynamin_M | SeqID_121459 SeqID_121020 | Dynamin central region |
| LBP_BPI_CETP_C | SeqID_121024 | LBP/BPI/CETP family, C- |
| | | terminal do |
| UBA | SeqID_122024 SeqID_122255 | UBA/TS-N domain |
| | SeqID_122435 SeqID_122689 | |
| | SeqID_120244 SeqID_123742 | |
| | SeqID_123895 SeqID_121722 | |
| | SeqID_121739 | |
| Dynamin_N | SeqID_122325 SeqID_119276 | Dynamin family |
| | SeqID_119682 SeqID_121020 | |
| | SeqID_123830 | |
| FG-GAP | SeqID_120791 | FG-GAP repeat |
| Supt5 | SeqID_119904 | Supt5 repeat |
| CHORD | SeqID_122778 SeqID_121480 | CHORD |
| | SeqID_120611 SeqID_124127 | |
| Ribosomal_S6e | SeqID_122091 SeqID_122108 | Ribosomal protein S6e |
| | SeqID_123156 SeqID_123278 | |
| | SeqID_123328 SeqID_123341 | |
| | SeqID_123427 SeqID_119761 | |
| | SeqID_123571 SeqID_124292 | |
| Gtr1_RagA | SeqID_123193 SeqID_121217 | Gtr1/RagA G protein conserved |
| | | region |
| CAF1 | SeqID_122750 SeqID_123054 | CAF1 family ribonuclease |
| | SeqID_123367 SeqID_124146 | |
| | SeqID_121735 | |
| RNA_pol_Rpb6 | SeqID_122713 SeqID_120963 | RNA polymerase Rpb6 |
| | SeqID_124170 | |
| Hist_deacetyl | SeqID_122658 SeqID_120496 | Histone deacetylase domain |
| | SeqID_124304 | |
| RNA_pol_Rpb8 | SeqID_122008 SeqID_122789 | RNA polymerase Rpb8 |
| | SeqID_119393 SeqID_123747 | |
| Ribosomal_L10e | SeqID_122247 SeqID_122929 | Ribosomal L10 |
| | SeqID_123115 SeqID_123302 | |
| | SeqID_123354 SeqID_121429 | |
| | SeqID_119804 SeqID_123702 | |
| | SeqID_121800 SeqID_121851 | |
| DUF1127 | SeqID_121449 | Domain of unknown function |
| | | (DUF1127) |
| FARP | SeqID_121261 SeqID_122785 | FMRFamide related peptide family |
| ubiquitin | SeqID_121249 SeqID_121259 | Ubiquitin family |
| | SeqID_121959 SeqID_121966 | |
| | SeqID_121974 SeqID_121987 | |
| | SeqID_122018 SeqID_122017 | |
| | SeqID_122021 SeqID_122020 | |
| | SeqID_122023 SeqID_122026 | |
| | SeqID_122033 SeqID_122042 | |
| | SeqID_122053 SeqID_122150 | |
| | SeqID_122234 SeqID_122256 | |
| | SeqID_122415 SeqID_122461 | |
| | SeqID_122550 SeqID_122647 | |
| | SeqID_122726 SeqID_122768 | |
| | SeqID_121317 SeqID_121325 | |
| | SeqID_122784 SeqID_122823 | |
| | SeqID_123207 SeqID_123316 | |
| | SeqID_123462 SeqID_123488 | |
| | SeqID_123500 SeqID_119205 | |
| | SeqID_121408 SeqID_121458 | |
| | SeqID_119321 SeqID_119375 | |
| | SeqID_119457 SeqID_119597 | |
| | SeqID_119702 SeqID_119857 | |
| mRNA_cap_enzyme | SeqID_123044 SeqID_120040 | mRNA capping enzyme, catalytic |
| | | domain |
| Ribosomal_60s | SeqID_122215 SeqID_122490 | 60s Acidic ribosomal protein |
| | SeqID_123784 SeqID_124059 | |
| SHMT | SeqID_123444 | Serine hydroxymethyltransferase |
| TSP_1 | SeqID_121277 SeqID_119765 | Thrombospondin type 1 domain |
| | SeqID_121174 | |
| Bin3 | SeqID_122035 SeqID_120646 | Bicoid-interacting protein 3 (Bin3) |
| | SeqID_123803 | |
| APS_kinase | SeqID_119710 | Adenylylsulphate kinase |
| GSH_synthase | SeqID_122183 SeqID_119391 | Eukaryotic glutathione synthase |
| | SeqID_120121 SeqID_120409 | |
| | SeqID_120622 SeqID_120719 | |
| | SeqID_120886 SeqID_120895 | |
| | SeqID_121074 SeqID_123719 | |
| SFT2 | SeqID_123142 SeqID_121421 | SFT2-like protein |
| | SeqID_120229 | |
| Homeobox | SeqID_119358 SeqID_119397 | Homeobox domain |
| | SeqID_119915 SeqID_120364 | |
| | SeqID_120535 SeqID_121140 | |
| Pox_A_type_inc | SeqID_121260 SeqID_122546 | Viral A-type inclusion protein |
| | SeqID_123618 | repeat |
| iPGM_N | SeqID_122467 SeqID_123844 | BPG-independent PGAM N- |
| | SeqID_120794 | terminus (iPGM_N) |
| RNA_pol_L | SeqID_122755 SeqID_120230 | RNA polymerase Rpb3/Rpb11 |
| | SeqID_123595 | dimerisation doma |
| V-set | SeqID_123529 SeqID_119196 | Immunoglobulin V-set domain |
| | SeqID_119491 SeqID_119713 | |
| | SeqID_119816 SeqID_120343 | |
| CTP_synth_N | SeqID_122680 SeqID_120279 | CTP synthase N-terminus |
| | SeqID_120818 SeqID_123812 | |
| AAA | SeqID_122138 SeqID_122219 | ATPase family associated with |
| | SeqID_122276 SeqID_122358 | various cellul |
| | SeqID_122493 SeqID_122675 | |
| | SeqID_121315 SeqID_121378 | |
| | SeqID_123161 SeqID_119176 | |
| | SeqID_121460 SeqID_119267 | |
| | SeqID_119300 SeqID_119612 | |
| | SeqID_119652 SeqID_119734 | |
| | SeqID_119875 SeqID_120119 | |
| | SeqID_120736 SeqID_121618 | |
| | SeqID_120857 SeqID_120931 | |
| | SeqID_120938 SeqID_123801 | |
| | SeqID_123871 SeqID_124113 | |
| | SeqID_124117 SeqID_121875 | |
| | SeqID_121923 | |
| PP-binding | SeqID_123286 SeqID_123525 | Phosphopantetheine attachment |
| | SeqID_120461 SeqID_124213 | site |
| | SeqID_124214 | |
| CDC37 | SeqID_120246 | Cdc37 family |
| FtsJ | SeqID_120165 | FtsJ-like methyltransferase |
| Peroxin-13_N | SeqID_119323 | Peroxin 13, N-terminal |
| Ribosomal_S7e | SeqID_122524 SeqID_121334 | Ribosomal protein S7e |
| | SeqID_123124 SeqID_121922 | |
| Sugar_tr | SeqID_119607 SeqID_120612 | Sugar (and other) transporter |
| UCH | SeqID_122246 SeqID_122435 | Ubiquitin carboxyl-terminal |
| | SeqID_122511 SeqID_121433 | hydrolase |
| | SeqID_119366 SeqID_119785 | |
| | SeqID_119799 SeqID_120244 | |
| | SeqID_120577 SeqID_121090 | |
| | SeqID_123828 SeqID_123895 | |
| | SeqID_121784 | |
| HATPase_c | SeqID_121965 SeqID_121968 | Histidine kinase-, DNA gyrase B-, |
| | SeqID_121976 SeqID_122028 | and HSP90 |
| | SeqID_122252 SeqID_123282 | |
| | SeqID_124089 SeqID_120445 | |
| | SeqID_123704 | |
| Activin_recp | SeqID_123267 | Activin types I and II receptor |
| | | domain |
| DUF602 | SeqID_119868 | Protein of unknown function, |
| | | DUF602 |
| DUF1136 | SeqID_119196 | Repeat of unknown function |
| | | (DUF1136) |
| TAFII28 | SeqID_123141 | hTAFII28-like protein conserved |
| | | region |
| Pkinase | SeqID_121233 SeqID_121271 | Protein kinase domain |
| | SeqID_122086 SeqID_122117 | |
| | SeqID_122221 SeqID_122233 | |
| | SeqID_122285 SeqID_122384 | |
| | SeqID_122470 SeqID_122502 | |
| | SeqID_122618 SeqID_122687 | |
| | SeqID_122758 SeqID_122956 | |
| | SeqID_123026 SeqID_123491 | |
| | SeqID_119148 SeqID_121409 | |
| | SeqID_121416 SeqID_121441 | |
| | SeqID_119219 SeqID_119237 | |
| | SeqID_119238 SeqID_119245 | |
| | SeqID_119296 SeqID_119338 | |
| | SeqID_119365 SeqID_119410 | |
| | SeqID_119412 SeqID_119436 | |
| | SeqID_119453 SeqID_119472 | |
| | SeqID_119483 SeqID_119520 | |
| | SeqID_119525 SeqID_119576 | |
| | SeqID_119629 SeqID_119728 | |
| | SeqID_119764 SeqID_119789 | |
| | SeqID_119828 SeqID_119968 | |
| | SeqID_120006 SeqID_120126 | |
| | SeqID_120166 SeqID_120208 | |
| | SeqID_120298 SeqID_120406 | |
| | SeqID_120428 SeqID_120452 | |
| | SeqID_120453 SeqID_120550 | |
| | SeqID_120636 SeqID_120663 | |
| | SeqID_120672 SeqID_120701 | |
| | SeqID_120771 SeqID_120772 | |
| | SeqID_121561 SeqID_121583 | |
| | SeqID_121622 SeqID_120796 | |
| | SeqID_120934 SeqID_120996 | |
| | SeqID_121102 SeqID_121189 | |
| | SeqID_123672 SeqID_123947 | |
| | SeqID_123977 SeqID_123989 | |
| | SeqID_124109 SeqID_124130 | |
| | SeqID_124294 SeqID_121714 | |
| | SeqID_121742 SeqID_121803 | |
| | SeqID_121897 SeqID_121903 | |
| | SeqID_121907 SeqID_121920 | |
| KH_1 | SeqID_122074 SeqID_122460 | KH domain |
| | SeqID_121313 SeqID_123392 | |
| | SeqID_123476 SeqID_119195 | |
| | SeqID_120972 SeqID_124132 | |
| | SeqID_121787 | |
| FA_hydroxylase | SeqID_122136 SeqID_123602 | Fatty acid hydroxylase |
| Clc-like | SeqID_122446 SeqID_120339 | Clc-like |
| | SeqID_120721 SeqID_123875 | |
| KH_2 | SeqID_122074 SeqID_122370 | KH domain |
| | SeqID_123179 SeqID_121535 | |
| | SeqID_121549 SeqID_123699 | |
| | SeqID_124132 SeqID_124172 | |
| | SeqID_124328 SeqID_121787 | |
| Galactosyl_T_2 | SeqID_122573 SeqID_122681 | Galactosyltransferase |
| | SeqID_119322 SeqID_124349 | |
| Piwi | SeqID_121243 SeqID_121305 | Piwi domain |
| | SeqID_123411 SeqID_119347 | |
| | SeqID_119676 SeqID_120129 | |
| | SeqID_121773 SeqID_121792 | |
| RLI | SeqID_122076 SeqID_120449 | Possible metal-binding domain in |
| | SeqID_120808 SeqID_124131 | RNase L inh |
| HORMA | SeqID_121286 SeqID_119567 | HORMA domain |
| | SeqID_121728 | |
| RNA_pol_Rpb1_3 | SeqID_120039 SeqID_120437 | RNA polymerase Rpb1, domain 3 |
| | SeqID_120506 | |
| Ldh_2 | SeqID_122223 SeqID_121410 | Malate/L-lactate dehydrogenase |
| | SeqID_121556 SeqID_121574 | |
| | SeqID_124002 | |
| Neuralized | SeqID_122352 SeqID_120365 | Neuralized |
| | SeqID_124000 SeqID_124184 | |
| RNA_pol_Rpb1_4 | SeqID_120039 SeqID_120437 | RNA polymerase Rpb1, domain 4 |
| | SeqID_120506 SeqID_120541 | |
| RNA_pol_Rpb1_5 | SeqID_120506 | RNA polymerase Rpb1, domain 5 |
| RNA_pol_Rpb1_6 | SeqID_120506 | RNA polymerase Rpb1, domain 6 |
| Clat_adaptor_s | SeqID_122102 SeqID_122224 | Clathrin adaptor complex small |
| | SeqID_122801 SeqID_122988 | chain |
| | SeqID_120385 SeqID_120859 | |
| | SeqID_121131 SeqID_123790 | |
| | SeqID_124166 | |
| IF4E | SeqID_122412 SeqID_120589 | Eukaryotic initiation factor 4E |
| Kinesin | SeqID_121296 SeqID_122362 | Kinesin motor domain |
| | SeqID_119669 SeqID_124181 | |
| G10 | SeqID_122515 | G10 protein |
| Ground-like | SeqID_120751 | Ground-like domain |
| P34-Arc | SeqID_123215 SeqID_121855 | Arp2/3 complex, 34 kD subunit |
| | | p34-Arc |
| Ribosomal_S8e | SeqID_122003 SeqID_122010 | Ribosomal protein S8e |
| | SeqID_122130 SeqID_122508 | |
| | SeqID_121333 SeqID_123027 | |
| | SeqID_121508 SeqID_121531 | |
| | SeqID_121545 SeqID_123644 | |
| | SeqID_121667 | |
| Ribosomal_S3_C | SeqID_122370 SeqID_123179 | Ribosomal protein S3, C-terminal |
| | SeqID_119376 SeqID_121535 | domai |
| | SeqID_121126 SeqID_123699 | |
| ResIII | SeqID_122318 SeqID_119170 | Type III restriction enzyme, res |
| | SeqID_121443 SeqID_119233 | subunit |
| | SeqID_119766 SeqID_120168 | |
| | SeqID_123835 SeqID_124119 | |
| TFIIE_beta | SeqID_121012 | TFIIE beta subunit core domain |
| AA_kinase | SeqID_122430 | Amino acid kinase family |
| Exo_endo_phos | SeqID_122447 SeqID_123874 | Endonuclease/Exonuclease/phosphatase |
| | | fa |
| HLH | SeqID_122206 SeqID_119868 | Helix-loop-helix DNA-binding |
| | SeqID_120631 | domain |
| Keratin_B2 | SeqID_120481 | Keratin, high sulfur B2 protein |
| TspO_MBR | SeqID_122231 SeqID_122587 | TspO/MBR family |
| | SeqID_123338 SeqID_121431 | |
| | SeqID_119499 SeqID_123778 | |
| | SeqID_123779 SeqID_124344 | |
| | SeqID_121908 | |
| C1-set | SeqID_119491 SeqID_120343 | Immunoglobulin C1-set domain |
| SCO1-SenC | SeqID_121873 | SCO1/SenC |
| T-box | SeqID_122717 SeqID_123320 | T-box |
| PSI | SeqID_119510 | Plexin repeat |
| AAA_2 | SeqID_122219 SeqID_122276 | ATPase family associated with |
| | SeqID_121378 SeqID_119652 | various cellul |
| | SeqID_119734 SeqID_121618 | |
| | SeqID_120931 SeqID_123871 | |
| | SeqID_124113 SeqID_121923 | |
| DUF477 | SeqID_122322 SeqID_124018 | Domain of unknown function |
| | | (DUF477) |
| AAA_3 | SeqID_122493 SeqID_119176 | ATPase family associated with |
| | SeqID_119742 SeqID_119875 | various cellul |
| | SeqID_120649 SeqID_121618 | |
| ABC_membrane | SeqID_120493 | ABC transporter transmembrane |
| | | region |
| fn3 | SeqID_119158 SeqID_119225 | Fibronectin type III domain |
| | SeqID_119569 SeqID_120170 | |
| | SeqID_120951 SeqID_121023 | |
| AAA_5 | SeqID_122219 SeqID_122493 | ATPase family associated with |
| | SeqID_119176 SeqID_119875 | various cellul |
| | SeqID_120649 SeqID_120763 | |
| | SeqID_120931 SeqID_120936 | |
| | SeqID_123871 | |
| Destabilase | SeqID_122806 SeqID_124205 | Destabilase |
| Glyco_transf_22 | SeqID_123460 SeqID_120564 | Alg9-like mannosyltransferase |
| | | family |
| Not3 | SeqID_122203 SeqID_121162 | Not1 N-terminal domain, CCR4- |
| | | Not complex com |
| CDC50 | SeqID_122266 SeqID_121335 | LEM3 (ligand-effect modulator 3) |
| | SeqID_120160 SeqID_123808 | family/CD |
| Glyco_transf_25 | SeqID_121052 | Glycosyltransferase family 25 (LPS |
| | | bi |
| PSS | SeqID_119991 | Phosphatidyl serine synthase |
| PRP38 | SeqID_123506 SeqID_121713 | PRP38 family |
| UCR_14kD | SeqID_122477 SeqID_121481 | Ubiquinol-cytochrome C reductase |
| | SeqID_121514 SeqID_123716 | complex 14k |
| Biopterin_H | SeqID_122189 SeqID_122692 | Biopterin-dependent aromatic |
| | SeqID_122958 SeqID_120567 | amino acid h |
| | SeqID_123832 SeqID_124293 | |
| Cofilin_ADF | SeqID_122563 SeqID_122620 | Cofilin/tropomyosin-type actin- |
| | SeqID_121306 SeqID_121419 | binding pr |
| | SeqID_119918 SeqID_124332 | |
| MOZ_SAS | SeqID_123033 | MOZ/SAS family |
| SNase | SeqID_121415 SeqID_120155 | Staphylococcal nuclease |
| | | homologue |
| Skp1_POZ | SeqID_121262 SeqID_122339 | Skp1 family, tetramerisation |
| | SeqID_122672 SeqID_121318 | domain |
| | SeqID_119994 SeqID_123642 | |
| Acyl_transf_3 | SeqID_119415 | Acyltransferase family |
| Ribosomal_L10 | SeqID_123472 SeqID_120199 | Ribosomal protein L10 |
| | SeqID_121812 | |
| HMA | SeqID_122636 SeqID_123900 | Heavy-metal-associated domain |
| Ribosomal_S3Ae | SeqID_122253 SeqID_123202 | Ribosomal S3Ae family |
| | SeqID_119906 SeqID_121492 | |
| | SeqID_123962 | |
| Ribosomal_L11 | SeqID_122466 SeqID_122612 | Ribosomal protein L11, RNA |
| | SeqID_122798 SeqID_120200 | binding do |
| | SeqID_121603 SeqID_120902 | |
| | SeqID_123787 SeqID_121653 | |
| | SeqID_124218 | |
| eIF-1a | SeqID_122566 SeqID_123523 | Eukaryotic initiation factor 1A |
| | SeqID_119774 SeqID_124173 | |
| Ribosomal_L13e | SeqID_121985 SeqID_121989 | Ribosomal protein L13e |
| | SeqID_122082 SeqID_119425 | |
| | SeqID_123942 | |
| Ribosomal_L12 | SeqID_122236 SeqID_121124 | Ribosomal protein L7/L12 C- |
| | SeqID_123921 | terminal dom |
| S10_plectin | SeqID_122608 SeqID_119224 | Plectin/S10 domain |
| | SeqID_123551 | |
| Ribosomal_L14 | SeqID_122293 SeqID_123957 | Ribosomal protein L14p/L23e |
| DUF625 | SeqID_120752 | Protein of unknown function |
| | | (DUF625) |
| Sec23_trunk | SeqID_121381 SeqID_119647 | Sec23/Sec24 trunk domain |
| ig | SeqID_123529 SeqID_119196 | Immunoglobulin domain |
| | SeqID_119491 SeqID_119569 | |
| | SeqID_119713 SeqID_119816 | |
| | SeqID_120343 | |
| Ribosomal_L16 | SeqID_122247 SeqID_122653 | Ribosomal protein L16 |
| | SeqID_123302 SeqID_124211 | |
| Ion_trans | SeqID_119930 SeqID_120812 | Ion transport protein |
| NAF1 | SeqID_119903 | NAF1 domain |
| Aa_trans | SeqID_121971 SeqID_119531 | Transmembrane amino acid |
| | | transporter protein |
| APG6 | SeqID_122694 SeqID_121500 | Autophagy protein Apg6 |
| SEC-C | SeqID_120562 | SEC-C motif |
| KE2 | SeqID_122599 SeqID_122773 | KE2 family protein |
| | SeqID_124174 SeqID_124230 | |
| | SeqID_124235 | |
| Lyase_1 | SeqID_120948 SeqID_121661 | Lyase |
| | SeqID_121786 | |
| Ran_BP1 | SeqID_119729 SeqID_120815 | RanBP1 domain |
| PGM_PMM_IV | SeqID_119474 SeqID_120700 | Phosphoglucomutase/phosphomannomutase, |
| | | C-t |
| BAH | SeqID_123089 | BAH domain |
| UQ_con | SeqID_121983 SeqID_122089 | Ubiquitin-conjugating enzyme |
| | SeqID_122437 SeqID_122519 | |
| | SeqID_122757 SeqID_123232 | |
| ENTH | SeqID_122942 SeqID_123389 | ENTH domain |
| DUF6 | SeqID_119240 | Integral membrane protein DUF6 |
| Ribosomal_L21e | SeqID_122144 SeqID_123108 | Ribosomal protein L21e |
| | SeqID_123268 SeqID_123293 | |
| | SeqID_123298 SeqID_121434 | |
| | SeqID_119745 SeqID_123751 | |
| | SeqID_124341 SeqID_121876 | |
| Cyclin_C | SeqID_120722 | Cyclin, C-terminal domain |
| ADK | SeqID_121282 SeqID_122317 | Adenylate kinase |
| | SeqID_119710 | |
| MAS20 | SeqID_121991 SeqID_122410 | MAS20 protein import receptor |
| | SeqID_123936 | |
| TIG | SeqID_122994 | IPT/TIG domain |
| DNA_pol_B | SeqID_120301 | DNA polymerase family B |
| Ribosomal_L22 | SeqID_121995 SeqID_122261 | Ribosomal protein L22p/L17e |
| | SeqID_122840 SeqID_123164 | |
| | SeqID_123257 SeqID_121516 | |
| | SeqID_120038 SeqID_123674 | |
| Ribosomal_L14e | SeqID_122701 SeqID_123548 | Ribosomal protein L14 |
| Ribosomal_L23 | SeqID_122038 SeqID_123046 | Ribosomal protein L23 |
| | SeqID_119380 SeqID_119408 | |
| | SeqID_123694 SeqID_124231 | |
| SNF2_N | SeqID_119766 SeqID_120168 | SNF2 family N-terminal domain |
| | SeqID_120323 | |
| Cgr1 | SeqID_122506 SeqID_123609 | Cgr1 family |
| Glutaredoxin | SeqID_123129 | Glutaredoxin |
| PUA | SeqID_122707 SeqID_119847 | PUA domain |
| tRNA_m1G_MT_9 | SeqID_122151 SeqID_123209 | tRNA m(1)G methyltransferase |
| RNA_pol_Rpb2_3 | SeqID_123375 SeqID_121089 | RNA polymerase Rpb2, domain 3 |
| Ribosomal_L29 | SeqID_122312 SeqID_122610 | Ribosomal L29 protein |
| | SeqID_123285 SeqID_119200 | |
| | SeqID_123638 SeqID_123687 | |
| | SeqID_121725 | |
| RNA_pol_Rpb2_4 | SeqID_123375 SeqID_121089 | RNA polymerase Rpb2, domain 4 |
| zf-nanos | SeqID_121133 | Nanos RNA binding domain |
| RNA_pol_Rpb2_5 | SeqID_122280 SeqID_119390 | RNA polymerase Rpb2, domain 5 |
| | SeqID_121089 SeqID_124072 | |
| Peptidase_S8 | SeqID_121230 SeqID_123401 | Subtilase family |
| | SeqID_119631 | |
| PUF | SeqID_122211 SeqID_122825 | Pumilio-family RNA binding repeat |
| | SeqID_119161 SeqID_121389 | |
| | SeqID_123824 SeqID_121723 | |
| RNA_pol_Rpb2_6 | SeqID_122280 SeqID_122552 | RNA polymerase Rpb2, domain 6 |
| | SeqID_121330 SeqID_123182 | |
| | SeqID_119390 SeqID_123587 | |
| | SeqID_123831 | |
| Cyclin_N | SeqID_122428 SeqID_122670 | Cyclin, N-terminal domain |
| | SeqID_122816 SeqID_121486 | |
| | SeqID_120722 SeqID_121612 | |
| | SeqID_123768 SeqID_123905 | |
| Mod_r | SeqID_123251 SeqID_123409 | Modifier of rudimentary (Mod(r)) |
| | SeqID_120718 SeqID_123566 | protein |
| RNA_pol_Rpb2_7 | SeqID_122552 | RNA polymerase Rpb2, domain 7 |
| Ribosomal_L7Ae | SeqID_121269 SeqID_122134 | Ribosomal protein |
| | SeqID_122180 SeqID_122335 | L7Ae/L30e/S12e/Gadd4 |
| | SeqID_122367 SeqID_122404 | |
| | SeqID_122604 SeqID_122718 | |
| | SeqID_123155 SeqID_123294 | |
| | SeqID_123455 SeqID_119560 | |
| | SeqID_123888 SeqID_119859 | |
| | SeqID_121504 SeqID_123633 | |
| | SeqID_123660 SeqID_123698 | |
| | SeqID_123927 SeqID_123935 | |
| | SeqID_123992 SeqID_124144 | |
| POLO_box | SeqID_119828 SeqID_121022 | POLO box duplicated region |
| Nucleoporin2 | SeqID_120026 | Nucleoporin autopeptidase |
| zf-BED | SeqID_119515 | BED zinc finger |
| Ets | SeqID_119450 | Ets-domain |
| Ribosomal_S2 | SeqID_122439 SeqID_122525 | Ribosomal protein S2 |
| | SeqID_122923 SeqID_122995 | |
| | SeqID_123127 SeqID_123308 | |
| | SeqID_123382 SeqID_120337 | |
| | SeqID_120668 SeqID_123668 | |
| | SeqID_124044 | |
| Rcd1 | SeqID_121351 SeqID_119153 | Cell differentiation family, Rcd1- |
| | | like |
| Ribosomal_S4 | SeqID_121533 SeqID_121546 | Ribosomal protein S4/S9 N- |
| | | terminal domai |
| GMC_oxred_C | SeqID_122311 | GMC oxidoreductase |
| Ribosomal_S5 | SeqID_122366 SeqID_123421 | Ribosomal protein S5, N-terminal |
| | SeqID_123632 | domai |
| DUF1240 | SeqID_120294 | Protein of unknown function |
| | | (DUF1240) |
| Topoisom_I | SeqID_123167 SeqID_121520 | Eukaryotic DNA topoisomerase I, |
| | SeqID_121660 SeqID_121884 | catalytic |
| Ribosomal_S6 | SeqID_122928 SeqID_119470 | Ribosomal protein S6 |
| DUF1241 | SeqID_122262 SeqID_120893 | Protein of unknown function |
| | | (DUF1241) |
| Ribosomal_S7 | SeqID_122487 SeqID_122488 | Ribosomal protein S7p/S5e |
| | SeqID_122733 SeqID_123383 | |
| | SeqID_124307 SeqID_123688 | |
| | SeqID_124272 | |
| Ssl1 | SeqID_122605 SeqID_123911 | Ssl1-like |
| | SeqID_124066 SeqID_121741 | |
| Ribosomal_S8 | SeqID_122779 SeqID_120839 | Ribosomal protein S8 |
| Nop52 | SeqID_122283 SeqID_120786 | Nucleolar protein, Nop52 |
| | SeqID_121201 SeqID_124065 | |
| Ribosomal_L22e | SeqID_122791 SeqID_120882 | Ribosomal L22e protein family |
| Ribosomal_L30 | SeqID_121300 SeqID_122251 | Ribosomal protein L30p/L7e |
| | SeqID_122565 SeqID_123737 | |
| | SeqID_123736 SeqID_121777 | |
| | SeqID_121894 SeqID_121896 | |
| AdoHcyase | SeqID_122459 SeqID_123859 | S-adenosyl-L-homocysteine |
| | | hydrolase |
| Ribosomal_L15e | SeqID_121969 SeqID_122199 | Ribosomal L15 |
| | SeqID_123299 SeqID_119488 | |
| | SeqID_119941 SeqID_120030 | |
| | SeqID_123763 SeqID_123764 | |
| | SeqID_124342 | |
| V-ATPase_C | SeqID_120905 | V-ATPase subunit C |
| Proteasome | SeqID_121422 SeqID_121276 | Proteasome A-type and B-type |
| | SeqID_121284 SeqID_121960 | |
| | SeqID_121962 SeqID_122045 | |
| | SeqID_122055 SeqID_122190 | |
| | SeqID_122396 SeqID_122413 | |
| | SeqID_122474 SeqID_122498 | |
| | SeqID_121342 SeqID_122780 | |
| | SeqID_122803 SeqID_123336 | |
| | SeqID_123362 SeqID_123419 | |
| | SeqID_119278 SeqID_119909 | |
| | SeqID_121468 SeqID_120588 | |
| | SeqID_120924 SeqID_123604 | |
| | SeqID_123611 SeqID_123646 | |
| | SeqID_123681 SeqID_123825 | |
| | SeqID_124136 SeqID_124227 | |
| | SeqID_121889 | |
| GMC_oxred_N | SeqID_122311 SeqID_124037 | GMC oxidoreductase |
| PHF5 | SeqID_122542 SeqID_120850 | PHF5-like protein |
| | SeqID_123639 | |
| DNA_gyraseB | SeqID_120500 | DNA gyrase B |
| Cullin | SeqID_122420 SeqID_119796 | Cullin family |
| | SeqID_119797 SeqID_120045 | |
| | SeqID_123756 SeqID_120756 | |
| | SeqID_120773 SeqID_121682 | |
| | SeqID_121780 SeqID_121941 | |
| DUF572 | SeqID_119715 SeqID_120330 | Family of unknown function |
| | | (DUF572) |
| FAA_hydrolase | SeqID_122355 SeqID_124011 | Fumarylacetoacetate (FAA) |
| | | hydrolase fam |
| cNMP_binding | SeqID_119563 SeqID_121604 | Cyclic nucleotide-binding domain |
| V-ATPase_G | SeqID_122706 SeqID_123291 | Vacuolar (H+)-ATPase G subunit |
| | SeqID_119894 SeqID_119927 | |
| | SeqID_123872 | |
| V-ATPase_H | SeqID_120190 | V-ATPase subunit H |
| Epimerase | SeqID_119815 SeqID_120284 | NAD dependent |
| | SeqID_121143 | epimerase/dehydratase family |
| Lipase_2 | SeqID_119177 | Lipase (class 2) |
| Ribosomal_L39 | SeqID_122520 SeqID_122799 | Ribosomal L39 protein |
| HCNGP | SeqID_120697 SeqID_120698 | HCNGP-like protein |
| POP1 | SeqID_123216 | Ribonucleases P/MRP protein |
| | | subunit POP1 |
| SMN | SeqID_122580 SeqID_124165 | Survival motor neuron protein |
| | | (SMN) |
| ACPS | SeqID_122149 SeqID_124163 | 4′-phosphopantetheinyl transferase |
| | | superfami |
| Lamp | SeqID_122690 SeqID_123937 | Lysosome-associated membrane |
| | | glycoprotein (L |
| FragX_IP | SeqID_120422 | Cytoplasmic Fragile-X interacting |
| | | family |
| Aminotran_1_2 | SeqID_122344 | Aminotransferase class I and II |
| ABC_tran | SeqID_122402 SeqID_119524 | ABC transporter |
| | SeqID_119625 SeqID_120769 | |
| | SeqID_123949 | |
| GRP | SeqID_119747 SeqID_120570 | Glycine rich protein family |
| Vps54 | SeqID_122919 SeqID_119956 | Vps54-like protein |
| Aph-1 | SeqID_122155 SeqID_123059 | Aph-1 protein |
| | SeqID_124013 | |
| Radical_SAM | SeqID_120962 | Radical SAM superfamily |
| Josephin | SeqID_122683 SeqID_123774 | Josephin |
| | SeqID_123928 | |
| EF1G | SeqID_122057 SeqID_123454 | Elongation factor 1 gamma, |
| | SeqID_120547 SeqID_123557 | conserved domain |
| Monooxygenase | SeqID_122333 SeqID_123771 | Monooxygenase |
| EXS | SeqID_120654 | EXS family |
| PCNA_C | SeqID_122062 SeqID_122819 | Proliferating cell nuclear antigen, |
| | SeqID_120167 | C-termin |
| Sad1_UNC | SeqID_119813 SeqID_120250 | Sad1/UNC-like C-terminal |
| AMP-binding | SeqID_123152 SeqID_120233 | AMP-binding enzyme |
| DIM1 | SeqID_123449 SeqID_124285 | Mitosis protein DIM1 |
| ATP_bind_1 | SeqID_122375 SeqID_122533 | Conserved hypothetical ATP |
| | SeqID_122872 SeqID_119782 | binding protein |
| | SeqID_123655 SeqID_123983 | |
| DUF652 | SeqID_122800 SeqID_119259 | Protein of unknown function, |
| | SeqID_123553 SeqID_124216 | DUF652 |
| PCNA_N | SeqID_122062 SeqID_122819 | Proliferating cell nuclear antigen, |
| | SeqID_122829 SeqID_121061 | N-termin |
| | SeqID_124283 | |
| DUF727 | SeqID_122615 SeqID_119316 | Protein of unknown function |
| | SeqID_121702 SeqID_124046 | (DUF727) |
| Utp11 | SeqID_122295 SeqID_121156 | Utp11 protein |
| ThiF | SeqID_121273 SeqID_122346 | ThiF family |
| | SeqID_119266 SeqID_121104 | |
| | SeqID_124189 | |
| MMR_HSR1 | SeqID_121288 SeqID_122204 | GTPase of unknown function |
| | SeqID_122360 SeqID_122375 | |
| | SeqID_122392 SeqID_122397 | |
| | SeqID_122560 SeqID_122575 | |
| | SeqID_122579 SeqID_122600 | |
| | SeqID_122619 SeqID_122657 | |
| | SeqID_122671 SeqID_121329 | |
| | SeqID_122792 SeqID_122872 | |
| | SeqID_123422 SeqID_119204 | |
| | SeqID_121430 SeqID_119311 | |
| | SeqID_119332 SeqID_119352 | |
| | SeqID_119367 SeqID_119492 | |
| | SeqID_119523 SeqID_119645 | |
| | SeqID_119791 SeqID_120413 | |
| | SeqID_120523 SeqID_120766 | |
| | SeqID_121613 SeqID_120900 | |
| | SeqID_121038 SeqID_121093 | |
| | SeqID_123568 SeqID_123726 | |
| | SeqID_123740 SeqID_123754 | |
| | SeqID_121709 SeqID_123960 | |
| | SeqID_123950 SeqID_123988 | |
| | SeqID_123991 SeqID_124180 | |
| | SeqID_121717 SeqID_121740 | |
| zf-C2H2 | SeqID_122179 SeqID_122249 | Zinc finger, C2H2 type |
| | SeqID_122267 SeqID_123033 | |
| | SeqID_123091 SeqID_123110 | |
| | SeqID_123191 SeqID_119156 | |
| | SeqID_119250 SeqID_119283 | |
| | SeqID_119315 SeqID_119326 | |
| | SeqID_119455 SeqID_119515 | |
| | SeqID_119638 SeqID_119674 | |
| | SeqID_119915 SeqID_119925 | |
| | SeqID_120046 SeqID_120117 | |
| | SeqID_120617 SeqID_120707 | |
| | SeqID_121133 SeqID_121172 | |
| | SeqID_123906 SeqID_123914 | |
| | SeqID_124145 SeqID_121781 | |
| | SeqID_121822 | |
| HEAT | SeqID_122200 SeqID_122532 | HEAT repeat |
| | SeqID_121374 SeqID_121380 | |
| | SeqID_122870 SeqID_119166 | |
| | SeqID_121402 SeqID_119389 | |
| | SeqID_119427 SeqID_119658 | |
| | SeqID_124126 SeqID_119790 | |
| | SeqID_119852 SeqID_119929 | |
| | SeqID_121537 SeqID_119998 | |
| | SeqID_120055 SeqID_120163 | |
| | SeqID_120538 SeqID_120549 | |
| | SeqID_120581 SeqID_120656 | |
| | SeqID_121550 SeqID_121614 | |
| | SeqID_121006 SeqID_121175 | |
| | SeqID_121201 SeqID_123600 | |
| | SeqID_121708 | |
| PWI | SeqID_122736 SeqID_122749 | PWI domain |
| | SeqID_120835 SeqID_124267 | |
| | SeqID_124270 | |
| Syja_N | SeqID_119649 SeqID_120216 | Sacl homology domain |
| zf-Sec23_Sec24 | SeqID_120593 | Sec23/Sec24 zinc finger |
| Gcd10p | SeqID_122163 SeqID_119505 | Gcd10p family |
| | SeqID_124154 | |
| Gelsolin | SeqID_119286 SeqID_121187 | Gelsolin repeat |
| FUN14 | SeqID_122589 | FUN14 family |
| UcrQ | SeqID_122007 SeqID_122808 | UcrQ family |
| | SeqID_119696 SeqID_124290 | |
| Ribosomal_L31e | SeqID_122378 SeqID_123337 | Ribosomal protein L31e |
| | SeqID_123982 | |
| Ribosomal_L24e | SeqID_122132 SeqID_123616 | Ribosomal protein L24e |
| | SeqID_123617 SeqID_124161 | |
| Calreticulin | SeqID_122265 SeqID_122837 | Calreticulin family |
| | SeqID_119911 SeqID_123897 | |
| eIF-5a | SeqID_122554 SeqID_123204 | Eukaryotic initiation factor 5A |
| | SeqID_120378 SeqID_123582 | hypusine, DN |
| Pex14_N | SeqID_122174 SeqID_123766 | Peroxisomal membrane anchor |
| | | protein (Pex14p) |
| DUF663 | SeqID_123123 SeqID_120018 | Protein of unknown function |
| | | (DUF663) |
| UIM | SeqID_122683 SeqID_123389 | Ubiquitin interaction motif |
| | SeqID_123774 | |
| COX5A | SeqID_122529 SeqID_120371 | Cytochrome c oxidase subunit Va |
| | SeqID_123670 | |
| COX5B | SeqID_121281 SeqID_122395 | Cytochrome c oxidase subunit Vb |
| | SeqID_122479 SeqID_121428 | |
| | SeqID_119688 SeqID_123743 | |
| | SeqID_124156 | |
| Ribosomal_L23eN | SeqID_122038 SeqID_123046 | Ribosomal protein L23, N-terminal |
| | SeqID_119380 SeqID_119408 | dom |
| | SeqID_123694 | |
| PH | SeqID_121274 SeqID_123067 | PH domain |
| | SeqID_119258 SeqID_119463 | |
| | SeqID_120842 SeqID_120929 | |
| | SeqID_121878 | |
| GTP_EFTU_D2 | SeqID_122391 SeqID_122657 | Elongation factor Tu domain 2 |
| | SeqID_121299 SeqID_122792 | |
| | SeqID_123334 SeqID_123345 | |
| | SeqID_119311 SeqID_119352 | |
| | SeqID_121538 SeqID_121551 | |
| | SeqID_120413 SeqID_120540 | |
| | SeqID_123754 SeqID_123950 | |
| | SeqID_123967 SeqID_121805 | |
| | SeqID_121825 SeqID_121826 | |
| Sas10_Utp3 | SeqID_120054 | Sas10/Utp3 family |
| Prp18 | SeqID_123355 SeqID_120394 | Prp18 domain |
| GTP_EFTU_D3 | SeqID_122729 SeqID_122792 | Elongation factor Tu C-terminal |
| | SeqID_123334 SeqID_123345 | domain |
| | SeqID_121538 SeqID_121551 | |
| | SeqID_120413 SeqID_123754 | |
| | SeqID_121664 SeqID_121825 | |
| | SeqID_121826 SeqID_121939 | |
| GATA | SeqID_121080 | GATA zinc finger |
| Spectrin | SeqID_119246 SeqID_119482 | Spectrin repeat |
| | SeqID_119575 SeqID_120539 | |
| | SeqID_120627 | |
| V-SNARE | SeqID_122066 SeqID_121095 | Vesicle transport v-SNARE protein |
| | SeqID_123939 | |
| Ribosomal_S5_C | SeqID_122366 SeqID_123632 | Ribosomal protein S5, C-terminal |
| | SeqID_121839 | domai |
| PX | SeqID_120853 | PX domain |
| KID | SeqID_120763 | KID repeat |
| GSH_synth_ATP | SeqID_122183 SeqID_121436 | Eukaryotic glutathione synthase, |
| | SeqID_120021 SeqID_120101 | ATP bi |
| | SeqID_120121 SeqID_120409 | |
| | SeqID_120622 SeqID_120666 | |
| | SeqID_120719 SeqID_120782 | |
| | SeqID_120886 SeqID_120895 | |
| | SeqID_121074 SeqID_123719 | |
| MCM | SeqID_119742 SeqID_119912 | MCM2/3/5 family |
| | SeqID_120936 | |
| ETF_alpha | SeqID_121607 | Electron transfer flavoprotein alpha |
| | | subuni |
| L51_S25_CI-B8 | SeqID_122048 SeqID_123231 | Mitochondrial ribosomal protein |
| | SeqID_121114 SeqID_123645 | L51/S |
| CBS | SeqID_120735 SeqID_121213 | CBS domain |
| Ribosomal_L18e | SeqID_122342 SeqID_122374 | Eukaryotic ribosomal protein L18 |
| | SeqID_123713 SeqID_123753 | |
| | SeqID_121703 SeqID_124289 | |
| OTCace | SeqID_119435 | Aspartate/omithine |
| | | carbamoyltransferase, A |
| GRAM | SeqID_122481 SeqID_123794 | GRAM domain |
| | SeqID_121636 | |
| Rad21_Rec8 | SeqID_122963 | Conserved region of Rad21/Rec8 |
| | | like prot |
| DUF676 | SeqID_120421 | Putative serine esterase (DUF676) |
| Ribosomal_L18p | SeqID_120495 SeqID_121687 | Ribosomal L18p/L5e family |
| Metallophos | SeqID_122191 SeqID_122213 | Calcineurin-like phosphoesterase |
| | SeqID_122289 SeqID_123311 | |
| | SeqID_123307 SeqID_121426 | |
| | SeqID_119337 SeqID_119448 | |
| | SeqID_119502 SeqID_119572 | |
| | SeqID_119659 SeqID_119751 | |
| | SeqID_119860 SeqID_121540 | |
| | SeqID_120128 SeqID_120238 | |
| | SeqID_120434 SeqID_120484 | |
| | SeqID_120553 SeqID_120710 | |
| | SeqID_120825 SeqID_120824 | |
| | SeqID_120834 SeqID_120873 | |
| | SeqID_121046 SeqID_121142 | |
| | SeqID_121188 SeqID_121700 | |
| | SeqID_124029 SeqID_124030 | |
| | SeqID_124061 SeqID_121738 | |
| | SeqID_121746 SeqID_121770 | |
| | SeqID_121899 SeqID_121900 | |
| | SeqID_121915 | |
| HECT | SeqID_121283 SeqID_121316 | HECT-domain (ubiquitin- |
| | SeqID_119865 SeqID_120854 | transferase) |
| | SeqID_121657 SeqID_121712 | |
| Hormone_recep | SeqID_120699 SeqID_121758 | Ligand-binding domain of nuclear |
| | | hormon |
| NAC | SeqID_122153 SeqID_122689 | NAC domain |
| | SeqID_123502 SeqID_120888 | |
| | SeqID_123742 | |
| C1_1 | SeqID_120222 SeqID_120526 | Phorbol esters/diacylglycerol |
| | | binding domain |
| Calponin | SeqID_121222 SeqID_122248 | Calponin family repeat |
| | SeqID_122936 SeqID_123005 | |
| | SeqID_123171 SeqID_123188 | |
| | SeqID_123400 SeqID_120392 | |
| | SeqID_120928 SeqID_120927 | |
| | SeqID_123804 SeqID_123842 | |
| | SeqID_123853 SeqID_124187 | |
| RmaAD | SeqID_122723 SeqID_119487 | Ribosomal RNA adenine |
| | SeqID_123996 | dimethylase |
| SPX | SeqID_120654 | SPX domain |
| C1_3 | SeqID_119379 SeqID_120217 | C1-like domain |
| | SeqID_120788 | |
| GST_C | SeqID_122057 SeqID_122407 | Glutathione S-transferase, C- |
| | SeqID_122628 SeqID_122642 | terminal domain |
| | SeqID_121383 SeqID_123011 | |
| | SeqID_121623 SeqID_121132 | |
| | SeqID_123557 SeqID_123625 | |
| | SeqID_123709 SeqID_123708 | |
| | SeqID_124298 SeqID_121838 | |
| Na_Ca_ex | SeqID_120053 | Sodium/calcium exchanger protein |
| B3_4 | SeqID_120243 | B3/4 domain |
| Sec23_helical | SeqID_119286 | Sec23/Sec24 helical domain |
| Ribosomal_L40e | SeqID_122033 SeqID_121408 | Ribosomal L40e family |
| | SeqID_119857 SeqID_123721 | |
| ICIn_channel | SeqID_121998 SeqID_123531 | Nucleotide-sensitive chloride |
| | | conductanc |
| Histone | SeqID_121234 SeqID_122039 | Core histone H2A/H2B/H3/H4 |
| | SeqID_122046 SeqID_122096 | |
| | SeqID_122119 SeqID_122455 | |
| | SeqID_122483 SeqID_122582 | |
| | SeqID_122688 SeqID_122744 | |
| | SeqID_122766 SeqID_122771 | |
| | SeqID_121314 SeqID_122884 | |
| | SeqID_122955 SeqID_123003 | |
| | SeqID_123317 SeqID_123463 | |
| | SeqID_123466 SeqID_123473 | |
| | SeqID_121448 SeqID_121446 | |
| | SeqID_119330 SeqID_119493 | |
| | SeqID_119512 SeqID_119521 | |
| | SeqID_119609 SeqID_119776 | |
| | SeqID_119983 SeqID_121479 | |
| | SeqID_121482 SeqID_120068 | |
| | SeqID_120077 SeqID_120480 | |
| | SeqID_120534 SeqID_120790 | |
| | SeqID_121570 SeqID_121594 | |
| | SeqID_121601 SeqID_120813 | |
| | SeqID_121054 SeqID_123744 | |
| | SeqID_121643 SeqID_121663 | |
| | SeqID_121675 SeqID_121683 | |
| | SeqID_121684 SeqID_121688 | |
| | SeqID_121706 SeqID_121705 | |
| | SeqID_124105 SeqID_124164 | |
| | SeqID_124258 SeqID_124262 | |
| | SeqID_124276 SeqID_124314 | |
| | SeqID_121771 SeqID_121809 | |
| | SeqID_121819 SeqID_121828 | |
| | SeqID_121823 SeqID_121905 | |
| Disintegrin | SeqID_120481 | Disintegrin |
| 3HCDH | SeqID_120447 | 3-hydroxyacyl-CoA |
| | | dehydrogenase, C-terminal |
| NAP | SeqID_122303 SeqID_119982 | Nucleosome assembly protein |
| | SeqID_124050 | (NAP) |
| Tubulin | SeqID_122269 SeqID_122332 | Tubulin/FtsZ family, GTPase |
| | SeqID_122440 SeqID_121336 | domain |
| | SeqID_123013 SeqID_119381 | |
| | SeqID_119720 SeqID_124114 | |
| | SeqID_121499 SeqID_121506 | |
| | SeqID_121543 SeqID_120775 | |
| | SeqID_121555 SeqID_123545 | |
| | SeqID_123884 SeqID_124069 | |
| | SeqID_121761 SeqID_121820 | |
| | SeqID_121849 SeqID_121893 | |
| GST_N | SeqID_122057 SeqID_122407 | Glutathione S-transferase, N- |
| | SeqID_122628 SeqID_122642 | terminal domain |
| | SeqID_121383 SeqID_123011 | |
| | SeqID_123274 SeqID_119360 | |
| | SeqID_121496 SeqID_120438 | |
| | SeqID_121623 SeqID_123557 | |
| | SeqID_123625 SeqID_123709 | |
| | SeqID_123708 SeqID_124297 | |
| | SeqID_121838 | |
| ETC_C1_NDUFA5 | SeqID_122406 SeqID_123873 | ETC complex I subunit conserved |
| | | region |
| 2-Hacid_dh | SeqID_120275 | D-isomer specific 2-hydroxyacid |
| | | dehydrogen |
| Adenylsucc_synt | SeqID_122272 SeqID_121355 | Adenylosuccinate synthetase |
| | SeqID_119162 SeqID_119650 | |
| | SeqID_120090 SeqID_120822 | |
| | SeqID_124006 | |
| RTC | SeqID_122518 SeqID_123729 | RNA 3′-terminal phosphate cyclase |
| Ribosomal_L19e | SeqID_122613 SeqID_122869 | Ribosomal protein L19e |
| | SeqID_123303 SeqID_120779 | |
| TRAPP_Bet3 | SeqID_122875 | Transport protein particle (TRAPP) |
| | | compone |
| SMC_C | SeqID_119625 | SMC family, C-terminal domain |
| CDP-OH_P_transf | SeqID_123356 | CDP-alcohol |
| | | phosphatidyltransferase |
| Frataxin_Cyay | SeqID_122075 SeqID_123508 | Frataxin-like domain |
| | SeqID_120847 SeqID_124330 | |
| VHS | SeqID_120912 | VHS domain |
| DUF689 | SeqID_122204 | Protein of unknown function |
| | | (DUF689) |
| SMC_N | SeqID_119887 SeqID_119966 | RecF/RecN/SMC N terminal |
| | SeqID_120574 SeqID_120702 | domain |
| PTPLA | SeqID_120767 | Protein tyrosine phosphatase-like |
| | | protein, P |
| PfkB | SeqID_122553 SeqID_123583 | pfkB family carbohydrate kinase |
| DSPc | SeqID_122616 SeqID_122746 | Dual specificity phosphatase, |
| | SeqID_124323 SeqID_119299 | catalytic doma |
| | SeqID_119527 SeqID_120116 | |
| | SeqID_123836 SeqID_124056 | |
| Biotin_lipoyl | SeqID_120976 | Biotin-requiring enzyme |
| Pkinase_C | SeqID_122758 SeqID_122978 | Protein kinase C terminal domain |
| | SeqID_119365 SeqID_121625 | |
| | SeqID_120796 | |
| DAD | SeqID_119716 | DAD family |
| Alpha_adaptin_C | SeqID_120950 | Alpha adaptin AP2, C-terminal |
| | | domain |
| Ribosomal_L6e | SeqID_122489 SeqID_122949 | Ribosomal protein L6e |
| | SeqID_121011 SeqID_123683 | |
| S1 | SeqID_122067 SeqID_123689 | S1 RNA binding domain |
| | SeqID_123690 | |
| Oxidored_q6 | SeqID_121980 SeqID_122154 | NADH ubiquinone oxidoreductase, |
| | SeqID_119667 SeqID_124082 | 20 Kd sub |
| Extensin_2 | SeqID_120572 SeqID_120593 | Extensin-like region |
| | SeqID_120713 | |
| Gar1 | SeqID_119747 | Gar1 protein RNA binding region |
| S4 | SeqID_122623 SeqID_121533 | S4 domain |
| | SeqID_121546 SeqID_120098 | |
| | SeqID_124001 | |
| Bromodomain | SeqID_119794 | Bromodomain |
| Laminin_N | SeqID_119297 SeqID_119335 | Laminin N-terminal (Domain VI) |
| CDI | SeqID_122878 | Cyclin-dependent kinase inhibitor |
| Mago_nashi | SeqID_123521 SeqID_120904 | Mago nashi protein |
| SNF7 | SeqID_122586 SeqID_119719 | SNF7 |
| | SeqID_119746 SeqID_120690 | |
| | SeqID_121136 SeqID_124098 | |
| ShTK | SeqID_122581 SeqID_119601 | ShTK domain |
| | SeqID_120015 SeqID_120669 | |
| tRNA_anti | SeqID_122633 SeqID_120602 | OB-fold nucleic acid binding |
| | SeqID_124327 | domain |
| Linker_histone | SeqID_122931 SeqID_120058 | linker histone H1 and H5 family |
| DAO | SeqID_122333 SeqID_122338 | FAD dependent oxidoreductase |
| | SeqID_122411 SeqID_120662 | |
| | SeqID_121620 SeqID_123933 | |
| NDUF_B7 | SeqID_120001 SeqID_122009 | NADH-ubiquinone oxidoreductase |
| | SeqID_122777 SeqID_123519 | B18 subunit ( |
| | SeqID_123938 SeqID_124080 | |
| Ribosomal_L34e | SeqID_122631 SeqID_123111 | Ribosomal protein L34e |
| | SeqID_123332 SeqID_119760 | |
| | SeqID_123896 | |
| DUF906 | SeqID_119497 | Domain of Unknown Function |
| | | (DUF906) |
| SPC12 | SeqID_122753 SeqID_121566 | Microsomal signal peptidase 12 kDa |
| | SeqID_121590 SeqID_124248 | subunit ( |
| CLN3 | SeqID_123346 SeqID_120607 | CLN3 protein |
| | SeqID_120681 | |
| RVT_1 | SeqID_119187 SeqID_119374 | Reverse transcriptase (RNA- |
| | SeqID_119417 SeqID_119451 | dependent DNA pol |
| | SeqID_119461 SeqID_119462 | |
| | SeqID_119508 SeqID_119566 | |
| | SeqID_119662 SeqID_119663 | |
| | SeqID_119834 SeqID_119855 | |
| | SeqID_119943 SeqID_120004 | |
| | SeqID_120103 SeqID_120138 | |
| | SeqID_120352 SeqID_120433 | |
| | SeqID_120465 SeqID_120471 | |
| | SeqID_120546 SeqID_120566 | |
| | SeqID_120586 SeqID_120687 | |
| | SeqID_120716 SeqID_120852 | |
| | SeqID_120935 SeqID_121043 | |
| | SeqID_121058 SeqID_121128 | |
| | SeqID_121129 SeqID_121179 | |
| Gp_dh_C | SeqID_121978 SeqID_122147 | Glyceraldehyde 3-phosphate |
| | SeqID_121379 SeqID_121400 | dehydrogenase, C- |
| | SeqID_121457 SeqID_119718 | |
| | SeqID_123607 | |
| Ldi_recept_b | SeqID_119985 SeqID_120019 | Low-density lipoprotein receptor |
| | | repeat |
| F_actin_cap_B | SeqID_122095 SeqID_123254 | F-actin capping protein, beta |
| | SeqID_123555 | subunit |
| Methyltransf_8 | SeqID_122377 SeqID_119368 | Hypothetical methyltransferase |
| | SeqID_123981 | |
| Mt_ATP-synt_B | SeqID_122761 SeqID_120653 | Mitochondrial ATP synthase B |
| | SeqID_124245 SeqID_121789 | chain prec |
| KAP_NTPase | SeqID_120368 | KAP family P-loop domain |
| Mt_ATP-synt_D | SeqID_122314 SeqID_123912 | ATP synthase D chain, |
| | | mitochondrial (AT |
| SAC3_GANP | SeqID_121169 | SAC3/GANP family |
| Gp_dh_N | SeqID_121986 SeqID_122098 | Glyceraldehyde 3-phosphate |
| | SeqID_122147 SeqID_123064 | dehydrogenase, NA |
| | SeqID_123079 SeqID_123357 | |
| | SeqID_123457 SeqID_121379 | |
| | SeqID_121457 SeqID_123840 | |
| | SeqID_123607 SeqID_123870 | |
| | SeqID_124339 SeqID_121930 | |
| An_peroxidase | SeqID_120092 SeqID_120241 | Animal haem peroxidase |
| | SeqID_120906 | |
| Ephrin | SeqID_119824 | Ephrin |
| polyprenyl_synt | SeqID_120635 | Polyprenyl synthetase |
| Neur_chan_memb | SeqID_121005 SeqID_121087 | Neurotransmitter-gated ion- |
| | | channel tra |
| zf-NPL4 | SeqID_123465 SeqID_119522 | NPL4 family, putative zinc binding |
| | | region |
| XAP5 | SeqID_122814 SeqID_122850 | XAP5 protein |
| | SeqID_121167 | |
| RNA_pol | SeqID_120255 | DNA-dependent RNA polymerase |
| NMT_C | SeqID_121407 SeqID_120382 | Myristoyl-CoA:protein N- |
| | | myristoyltransferase |
| Aldose_epim | SeqID_122507 SeqID_120204 | Aldose 1-epimerase |
| | SeqID_123603 | |
| DUF841 | SeqID_120243 | Eukaryotic protein of unknown |
| | | function (DUF8 |
| Mov34 | SeqID_121290 SeqID_121294 | Mov34/MPN/PAD-1 family |
| | SeqID_122120 SeqID_122260 | |
| | SeqID_122735 SeqID_121344 | |
| | SeqID_122844 SeqID_123535 | |
| | SeqID_121382 SeqID_121417 | |
| | SeqID_119999 SeqID_120711 | |
| | SeqID_123682 SeqID_121693 | |
| | SeqID_124040 SeqID_124087 | |
| | SeqID_121736 | |
| NAD_binding_1 | SeqID_122444 SeqID_123823 | Oxidoreductase NAD-binding |
| | | domain |
| Ribosomal_L28e | SeqID_122648 SeqID_120682 | Ribosomal L28e protein family |
| | SeqID_123720 | |
| LIM | SeqID_122321 SeqID_123039 | LIM domain |
| | SeqID_123158 SeqID_123185 | |
| | SeqID_119388 SeqID_119555 | |
| | SeqID_119701 SeqID_120218 | |
| | SeqID_123816 SeqID_121638 | |
| | SeqID_124168 | |
| SPC25 | SeqID_122737 SeqID_124254 | Microsomal signal peptidase 25 kDa |
| | | subunit ( |
| WGR | SeqID_121544 | WGR domain |
| STT3 | SeqID_120152 | Oligosaccharyl transferase STT3 |
| | | subun |
| WH2 | SeqID_119377 | WH2 motif |
| 14-3-3 | SeqID_122166 SeqID_122862 | 14-3-3 protein |
| | SeqID_123514 SeqID_119268 | |
| | SeqID_119536 SeqID_119605 | |
| Alpha_adaptinC2 | SeqID_120950 | Adaptin C-terminal domain |
| CbiA | SeqID_122680 | CobQ/CobB/MinD/ParA nucleotide |
| | | binding do |
| zf-MIZ | SeqID_120096 | MIZ zinc finger |
| Lipocalin | SeqID_122101 SeqID_122172 | Lipocalin/cytosolic fatty-acid |
| | SeqID_123222 SeqID_119931 | binding pr |
| | SeqID_120164 SeqID_123572 | |
| | SeqID_123598 SeqID_121698 | |
| DLIC | SeqID_122981 | Dynein light intermediate chain |
| | | (DLIC) |
| tRNA-synt_1c_C | SeqID_120890 | tRNA synthetases class I (E and |
| | | Q), an |
| Bestrophin | SeqID_119636 | Bestrophin |
| eIF-3_zeta | SeqID_122685 SeqID_120237 | Eukaryotic translation initiation |
| | SeqID_123560 | factor 3 |
| Porin_3 | SeqID_122330 SeqID_121328 | Eukaryotic porin |
| | SeqID_119190 SeqID_121557 | |
| | SeqID_121575 SeqID_123999 | |
| ARID | SeqID_120573 | ARID/BRIGHT DNA binding |
| | | domain |
| CybS | SeqID_122786 SeqID_124202 | CybS |
| BCAS2 | SeqID_122510 SeqID_123556 | Breast carcinoma amplified |
| | | sequence 2 (BCAS2 |
| Motile_Sperm | SeqID_122721 SeqID_123310 | MSP (Major sperm protein) domain |
| | SeqID_119174 SeqID_119175 | |
| | SeqID_119281 SeqID_119604 | |
| | SeqID_119641 SeqID_119724 | |
| | SeqID_120035 SeqID_120095 | |
| | SeqID_120327 SeqID_120441 | |
| | SeqID_120517 SeqID_120563 | |
| | SeqID_120632 SeqID_120633 | |
| | SeqID_120910 SeqID_124175 | |
| | SeqID_121850 | |
| Transket_pyr | SeqID_122651 SeqID_119346 | Transketolase, pyridine binding |
| | SeqID_120804 SeqID_120844 | domai |
| | SeqID_123846 | |
| Fibrillarin | SeqID_123301 SeqID_119795 | Fibrillarin |
| PABP | SeqID_122526 SeqID_121469 | Poly-adenylate binding protein, |
| | SeqID_123820 SeqID_121869 | unique domai |
| BRCT | SeqID_121491 SeqID_120459 | BRCA1 C Terminus (BRCT) |
| | SeqID_121621 | domain |
| Psf2 | SeqID_119632 | Partner of SLD five, PSF2 |
| tRNA-synt_1 | SeqID_123431 SeqID_119678 | tRNA synthetases class I (I, L, M |
| | SeqID_121502 | and V) |
| Psf3 | SeqID_122668 SeqID_123586 | Partner of SLD five, PSF3 |
| tRNA-synt_2 | SeqID_122301 SeqID_124123 | tRNA synthetases class II (D, K |
| | SeqID_119833 SeqID_124052 | and N) |
| | SeqID_121567 SeqID_121591 | |
| | SeqID_121045 | |
| NDK | SeqID_121977 SeqID_122294 | Nucleoside diphosphate kinase |
| | SeqID_121345 SeqID_123201 | |
| | SeqID_123452 SeqID_123451 | |
| | SeqID_121388 SeqID_123559 | |
| ATP-synt_DE_N | SeqID_122751 SeqID_121401 | ATP synthase, Delta/Epsilon |
| | SeqID_124264 SeqID_123752 | chain, beta |
| zf-C4 | SeqID_122310 SeqID_122617 | Zinc-finger, C4 type (two domains) |
| | SeqID_122812 SeqID_123080 | |
| | SeqID_123445 SeqID_119666 | |
| | SeqID_120699 SeqID_120820 | |
| | SeqID_124333 | |
| DIRP | SeqID_119217 | DIRP |
| Ribosomal_L36e | SeqID_122112 SeqID_123552 | Ribosomal protein L36e |
| Filament | SeqID_121260 SeqID_122400 | Intermediate filament protein |
| | SeqID_122546 SeqID_123386 | |
| | SeqID_119327 SeqID_121473 | |
| | SeqID_120922 SeqID_123579 | |
| | SeqID_123618 SeqID_123953 | |
| TFIID_30kDa | SeqID_120863 | Transcription initiation factor TFIID |
| | | 23- |
| DUF926 | SeqID_120692 | Domain of Unknown Function |
| | | (DUF926) |
| DUF854 | SeqID_119289 SeqID_120777 | Caenorhabditis elegans repeat of |
| | | unknown fun |
| TPP_enzyme_M | SeqID_120595 | Thiamine pyrophosphate enzyme, |
| | | central d |
| PPI_Ypi1 | SeqID_122389 SeqID_120052 | Protein phosphatase inhibitor |
| | SeqID_123885 | |
| Myosin_head | SeqID_119861 | Myosin head (motor domain) |
| MH1 | SeqID_122197 SeqID_123448 | MH1 domain |
| | SeqID_121021 | |
| RWD | SeqID_122537 SeqID_120442 | RWD domain |
| DUF858 | SeqID_122961 | Eukaryotic protein of unknown |
| | | function (DUF8 |
| 3Beta_HSD | SeqID_123272 SeqID_121396 | 3-beta hydroxysteroid |
| | SeqID_119630 SeqID_121143 | dehydrogenase/isomera |
| BIR | SeqID_123175 SeqID_119442 | Inhibitor of Apoptosis domain |
| | SeqID_121665 | |
| MTHFR | SeqID_122188 SeqID_120829 | Methylenetetrahydrofolate |
| | SeqID_124115 | reductase |
| GYF | SeqID_121994 | GYF domain |
| E1_dh | SeqID_122564 SeqID_122651 | Dehydrogenase E1 component |
| | SeqID_123263 SeqID_123821 | |
| | SeqID_123846 | |
| Fork_head | SeqID_120305 | Fork head domain |
| DUF1604 | SeqID_119654 | Protein of unknown function |
| | | (DUF1604) |
| OST3_OST6 | SeqID_123025 | OST3/OST6 family |
| Cadherin | SeqID_119235 SeqID_119705 | Cadherin domain |
| PPTA | SeqID_122418 SeqID_123390 | Protein prenyltransferase alpha |
| | SeqID_121057 SeqID_123924 | subunit repe |
| GCV_H | SeqID_122462 SeqID_123213 | Glycine cleavage H-protein |
| | SeqID_119530 | |
| Aldolase_II | SeqID_121238 SeqID_122401 | Class II Aldolase and Adducin N- |
| | SeqID_122499 SeqID_121462 | terminal |
| | SeqID_121475 SeqID_123767 | |
| | SeqID_121689 SeqID_123952 | |
| | SeqID_121934 | |
| AIG1 | SeqID_119367 | AIG1 family |
| RNase_PH | SeqID_122716 SeqID_122887 | 3′ exoribonuclease family, domain 1 |
| | SeqID_120679 SeqID_124199 | |
| Ribosomal_L18ae | SeqID_122646 SeqID_122664 | Ribosomal L18ae protein family |
| | SeqID_122858 SeqID_123114 | |
| | SeqID_123121 SeqID_120878 | |
| | SeqID_123624 SeqID_123886 | |
| | SeqID_124236 SeqID_121791 | |
| | SeqID_121797 SeqID_121925 | |
| Nucleoside_tran | SeqID_123441 SeqID_124095 | Nucleoside transporter |
| Ribosomal_L37e | SeqID_122591 SeqID_121170 | Ribosomal protein L37e |
| | SeqID_123963 | |
| Prefoldin | SeqID_120211 SeqID_123679 | Prefoldin subunit |
| Beta-lactamase | SeqID_122907 SeqID_120056 | Beta-lactamase |
| PC_rep | SeqID_122969 | Proteasome/cyclosome repeat |
| DEAD | SeqID_122207 SeqID_122277 | DEAD/DEAH box helicase |
| | SeqID_122318 SeqID_122319 | |
| | SeqID_122381 SeqID_123007 | |
| | SeqID_123018 SeqID_119170 | |
| | SeqID_121414 SeqID_121443 | |
| | SeqID_119233 SeqID_119256 | |
| | SeqID_119300 SeqID_119324 | |
| | SeqID_119657 SeqID_119712 | |
| | SeqID_119766 SeqID_120168 | |
| | SeqID_120342 SeqID_120509 | |
| | SeqID_120575 SeqID_121032 | |
| | SeqID_121200 SeqID_123835 | |
| | SeqID_123976 SeqID_124021 | |
| | SeqID_124074 SeqID_124119 | |
| SURF4 | SeqID_120816 | SURF4 family |
| NCD3G | SeqID_120999 | Nine Cysteines Domain of family 3 |
| | | GPCR |
| SURF6 | SeqID_122863 | Surfeit locus protein 6 |
| Sec10 | SeqID_120206 | Exocyst complex component |
| | | Sec10 |
| Oxidored_molyb | SeqID_122426 SeqID_123908 | Oxidoreductase molybdopterin |
| | | binding d |
| Cation_efflux | SeqID_119547 SeqID_119854 | Cation efflux family |
| HisKA_2 | SeqID_121848 | Histidine kinase |
| RNA_pol_Rpb5_C | SeqID_122441 SeqID_123528 | RNA polymerase Rpb5, C-terminal |
| | SeqID_123883 | domain |
| dUTPase | SeqID_120762 | dUTPase |
| Calx-beta | SeqID_120919 | Calx-beta domain |
| FA_desaturase | SeqID_122220 SeqID_122258 | Fatty acid desaturase |
| BRF1 | SeqID_119280 | Brf1-like TBP-binding domain |
| W2 | SeqID_119265 SeqID_121487 | eIF4-gamma/eIF5/eIF2-epsilon |
| PIP5K | SeqID_123028 | Phosphatidylinositol-4-phosphate |
| | | 5-Kinase |
| Ribosomal_L35Ae | SeqID_122114 SeqID_122827 | Ribosomal protein L35Ae |
| | SeqID_123435 SeqID_123889 | |
| | SeqID_124288 | |
| RTC_insert | SeqID_122518 SeqID_120776 | RNA 3′-terminal phosphate cyclase |
| | SeqID_123973 | (RTC), i |
| SKIP_SNW | SeqID_121033 | SKIP/SNW domain |
| PAP_assoc | SeqID_122124 SeqID_123088 | PAP/25A associated domain |
| | SeqID_120195 | |
| DNA_pol_E_B | SeqID_122568 SeqID_124351 | DNA polymerase epsilon subunit B |
| RNA_pol_Rpb5_N | SeqID_122441 SeqID_123137 | RNA polymerase Rpb5, N-terminal |
| | SeqID_123528 SeqID_119977 | domain |
| | SeqID_123883 | |
| Vicilin_N | SeqID_121108 | Vicilin N terminal region |
| DEP | SeqID_120527 | Domain found in Dishevelled, Egl- |
| | | 10, and Ple |
| Cytochrom_C | SeqID_122036 SeqID_123651 | Cytochrome c |
| Ribosomal_L38e | SeqID_122040 SeqID_119735 | Ribosomal L38e protein family |
| | SeqID_123834 | |
| GRIM-19 | SeqID_123149 SeqID_119221 | GRIM-19 protein |
| | SeqID_121885 | |
| DUF947 | SeqID_120569 | Domain of unknown function |
| | | (DUF947) |
| DnaJ | SeqID_121245 SeqID_122232 | DnaJ domain |
| | SeqID_122521 SeqID_122541 | |
| | SeqID_122667 SeqID_122722 | |
| | SeqID_119277 SeqID_119288 | |
| | SeqID_119644 SeqID_120879 | |
| | SeqID_120983 SeqID_121206 | |
| | SeqID_123640 SeqID_123715 | |
| | SeqID_123882 SeqID_124112 | |
| | SeqID_124311 | |
| G6PD_C | SeqID_122743 SeqID_124271 | Glucose-6-phosphate |
| | | dehydrogenase, C-termina |
| PHO4 | SeqID_122752 SeqID_120810 | Phosphate transporter family |
| | SeqID_124256 | |
| Reprolysin | SeqID_120801 | Reprolysin (M12B) family zinc |
| | | metalloprote |
| MIT | SeqID_120407 | MIT domain |
| LRR_1 | SeqID_122148 SeqID_122601 | Leucine Rich Repeat |
| | SeqID_119275 SeqID_119350 | |
| | SeqID_120299 SeqID_120639 | |
| | SeqID_121187 SeqID_123576 | |
| | SeqID_123887 | |
| Ribosomal_S21e | SeqID_123512 SeqID_119578 | Ribosomal protein S21e |
| | SeqID_123570 | |
| tRNA-synt_1d_C | SeqID_122724 | DALR anticodon binding domain |
| RNA_pol_A_bac | SeqID_120230 SeqID_121039 | RNA polymerase Rpb3/RpoA |
| | | insert domain |
| KOW | SeqID_122127 SeqID_122516 | KOW motif |
| | SeqID_122554 SeqID_122701 | |
| | SeqID_122710 SeqID_123295 | |
| | SeqID_123458 SeqID_119904 | |
| | SeqID_123548 SeqID_123582 | |
| | SeqID_123634 SeqID_123734 | |
| ECH | SeqID_122281 SeqID_122454 | Enoyl-CoA hydratase/isomerase |
| | SeqID_119372 SeqID_123865 | family |
| | SeqID_124071 SeqID_121747 | |
| IF_tail | SeqID_121260 SeqID_122400 | Intermediate filament tail domain |
| | SeqID_120920 SeqID_123579 | |
| PAN | SeqID_120695 | PAN domain |
| zf-C3HC4 | SeqID_122347 SeqID_122496 | Zinc finger, C3HC4 type (RING |
| | SeqID_123384 SeqID_123511 | finger) |
| | SeqID_119241 SeqID_119357 | |
| | SeqID_120644 SeqID_123692 | |
| | SeqID_124075 | |
| WW | SeqID_122257 SeqID_122416 | WW domain |
| | SeqID_119608 SeqID_120846 | |
| | SeqID_120854 SeqID_123538 | |
| PB1 | SeqID_120217 | PB1 domain |
| NOG1 | SeqID_119367 | Nucleolar GTP-binding protein 1 |
| | | (NOG1) |
| PAS | SeqID_122206 | PAS domain |
| EI24 | SeqID_121718 | Etoposide-induced protein 2.4 |
| | | (EI24) |
| MIF4G | SeqID_120041 | MIF4G domain |
| PI3_PI4_kinase | SeqID_119291 SeqID_119922 | Phosphatidylinositol 3- and 4- |
| | SeqID_120521 SeqID_121582 | kinase |
| | SeqID_120853 SeqID_121831 | |
| PAZ | SeqID_121243 SeqID_119347 | PAZ domain |
| | SeqID_119944 SeqID_121539 | |
| | SeqID_120129 SeqID_121552 | |
| | SeqID_121086 SeqID_121913 | |
| Cpn60_TCP1 | SeqID_122080 SeqID_122245 | TCP-1/cpn60 chaperonin family |
| | SeqID_123243 SeqID_123369 | |
| | SeqID_119577 SeqID_119896 | |
| | SeqID_121517 SeqID_120191 | |
| | SeqID_120292 SeqID_120613 | |
| | SeqID_120876 SeqID_121091 | |
| | SeqID_123615 SeqID_123735 | |
| | SeqID_121655 SeqID_123955 | |
| Tim17 | SeqID_122097 SeqID_124320 | Tim17/Tim22/Tim23 family |
| | SeqID_121063 | |
| Ligase_CoA | SeqID_122725 SeqID_124060 | CoA-ligase |
| Trehalase | SeqID_121616 | Trehalase |
| PQ-loop | SeqID_122891 SeqID_123245 | PQ loop repeat |
| | SeqID_123591 | |
| TTL | SeqID_119185 | Tubulin-tyrosine ligase family |
| Myb_DNA-binding | SeqID_119288 SeqID_119345 | Myb-like DNA-binding domain |
| | SeqID_120201 SeqID_121080 | |
| | SeqID_121197 | |
| Ribonuclease_3 | SeqID_121044 | RNase3 domain |
| Ribophorin_I | SeqID_121320 SeqID_120333 | Ribophorin I |
| | SeqID_121666 | |
| CAS_CSE1 | SeqID_119961 | CAS/CSE protein, C-terminus |
| Pex2_Pex12 | SeqID_122740 SeqID_123980 | Pex2/Pex12 amino terminal |
| | | region |

Table 1 Legend:
Column 1 - pfam name or designation
Column 2 - gene family member listed by SEQ ID NO corresponding to amino acid sequence translation from vcDNA SEQ ID NO identified in feature field of peptide sequence
Column 3 - Protein annotation based on BLASTP comparisons

[0114] In order to construct a dsRNA sequence, or concatamers or chimeras of dsRNA sequences from various genes either within SCN, from other pest nucleotide sequences, or a combination thereof, nucleotide sequences corresponding to the SCN genome sequences were BLASTed against known vertebrate, soybean, and Rhizobium nucleotide sequences to first eliminate contiguous sequences in SCN that matched sequences in known vertebrate, soybean, and Rhozobium sequences that are at least about 21 nucleotides in length. This redacted set of SCN sequences was then compared to known nucleotide sequences in parasitic nematodes, insects, and fungi to identify sequences of substantial identity that could be useful in constructing sequences that, when expressed as a dsRNA sequence, are capable of effecting gene suppression in SCN as well as in another parasitic nematode, or insect, or fungal pest. The results of comparisons to other parasitic nematode sequences are shown in Table 2.

TABLE 2
Diverse Parasitic Nematode Nucleotide Coding
Sequences Matching H. glycines vcDNA sequences

| H. glycines | | | | |
|---|---|---|---|---|
| Sequence¹ | Position² | GeneID³ | Position⁴ | % identity⁵ |
| Seq ID NO: 50950 | 21-138 | gi\|28916076 | 1-119 | 91% |
| Seq ID NO: 50950 | 14-41 | gi\|159473 | 34-61 | 100% |
| Seq ID NO: 50950 | 14-41 | gi\|2454547 | 227-200 | 100% |
| Seq ID NO: 50950 | 14-41 | gi\|551594 | 194-221 | 100% |
| Seq ID NO: 50950 | 14-41 | gi\|551595 | 669-696 | 100% |
| Seq ID NO: 50950 | 14-41 | gi\|18032254 | 34-61 | 100% |
| Seq ID NO: 50950 | 18-41 | gi\|18477256 | 279-256 | 100% |
| Seq ID NO: 50950 | 18-41 | gi\|18477260 | 325-302 | 100% |
| Seq ID NO: 50950 | 18-41 | gi\|18477262 | 634-611 | 100% |
| Seq ID NO: 50950 | 14-35 | gi\|18477259 | 22-1 | 100% |
| Seq ID NO: 50950 | 14-35 | gi\|18477261 | 22-1 | 100% |
| Seq ID NO: 50950 | 14-35 | gi\|37780968 | 22-1 | 100% |
| Seq ID NO: 50973 | 88-108 | gi\|19267657 | 465-445 | 100% |
| Seq ID NO: 51012 | 302-411 | gi\|18080245 | 178-69 | 84% |
| Seq ID NO: 51132 | 182-360 | gi\|32323955 | 5-183 | 96% |
| Seq ID NO: 51132 | 184-359 | gi\|33139778 | 6-182 | 96% |
| Seq ID NO: 51132 | 182-351 | gi\|33140274 | 5-174 | 95% |
| Seq ID NO: 51132 | 195-360 | gi\|32324510 | 1-166 | 95% |
| Seq ID NO: 51132 | 218-354 | gi\|33140264 | 1-137 | 95% |
| Seq ID NO: 51132 | 182-284 | gi\|32324219 | 5-107 | 94% |
| Seq ID NO: 51164 | 117-137 | gi\|22543645 | 32-12 | 100% |
| Seq ID NO: 51169 | 1-236 | gi\|47118285 | 740-975 | 97% |
| Seq ID NO: 51169 | 1-236 | gi\|47118286 | 753-988 | 97% |
| Seq ID NO: 51169 | 1-219 | gi\|16797830 | 731-950 | 97% |
| Seq ID NO: 51169 | 1-219 | gi\|21885260 | 751-969 | 97% |
| Seq ID NO: 51169 | 1-219 | gi\|26000759 | 727-945 | 97% |
| Seq ID NO: 51169 | 1-219 | gi\|31442322 | 728-946 | 97% |
| Seq ID NO: 51169 | 1-219 | gi\|31442320 | 728-946 | 96% |
| Seq ID NO: 51169 | 4-219 | gi\|16797831 | 732-947 | 96% |
| Seq ID NO: 51169 | 1-219 | gi\|38096133 | 730-948 | 94% |
| Seq ID NO: 51169 | 1-33 | gi\|16797827 | 776-807 | 96% |
| Seq ID NO: 51169 | 131-159 | gi\|16797844 | 862-890 | 96% |
| Seq ID NO: 51169 | 216-236 | gi\|48479719 | 1112-1132 | 100% |
| Seq ID NO: 51184 | 16-47 | gi\|32324419 | 271-302 | 100% |
| Seq ID NO: 51378 | 184-459 | gi\|32325335 | 36-311 | 97% |
| Seq ID NO: 51378 | 504-626 | gi\|32325335 | 311-433 | 100% |
| Seq ID NO: 51378 | 753-841 | gi\|32325335 | 453-541 | 97% |
| Seq ID NO: 51378 | 101-139 | gi\|32325335 | 1-39 | 100% |
| Seq ID NO: 51378 | 676-702 | gi\|32325335 | 430-456 | 100% |
| Seq ID NO: 51561 | 402-476 | gi\|33139584 | 80-6 | 100% |
| Seq ID NO: 51561 | 192-229 | gi\|33139584 | 115-78 | 100% |
| Seq ID NO: 51561 | 192-215 | gi\|6969910 | 34-11 | 100% |
| Seq ID NO: 51579 | 1-138 | gi\|33139914 | 209-346 | 97% |
| Seq ID NO: 51823 | 55-187 | gi\|18081060 | 80-212 | 86% |
| Seq ID NO: 51824 | 3-97 | gi\|54548889 | 100-194 | 87% |
| Seq ID NO: 51824 | 3-97 | gi\|18089540 | 421-515 | 85% |
| Seq ID NO: 51824 | 3-79 | gi\|18081060 | 404-480 | 87% |
| Seq ID NO: 51978 | 1-314 | gi\|33139071 | 85-397 | 96% |
| Seq ID NO: 51978 | 307-395 | gi\|33139071 | 406-494 | 97% |
| Seq ID NO: 51978 | 406-452 | gi\|33139071 | 505-551 | 97% |
| Seq ID NO: 51978 | 406-475 | gi\|32325389 | 507-576 | 97% |
| Seq ID NO: 51978 | 1-237 | gi\|33140521 | 87-323 | 94% |
| Seq ID NO: 51991 | 239-260 | gi\|30028357 | 64-85 | 100% |
| Seq ID NO: 52051 | 1-78 | gi\|33140098 | 496-573 | 100% |
| Seq ID NO: 52051 | 1-74 | gi\|32324423 | 496-569 | 100% |
| Seq ID NO: 52051 | 1-61 | gi\|33139933 | 499-559 | 100% |
| Seq ID NO: 52051 | 1-58 | gi\|33139533 | 495-552 | 100% |
| Seq ID NO: 52051 | 56-168 | gi\|18082418 | 136-248 | 85% |
| Seq ID NO: 52162 | 163-185 | gi\|40670360 | 123-101 | 100% |
| Seq ID NO: 52240 | 388-410 | gi\|38513673 | 44-22 | 100% |
| Seq ID NO: 52285 | 172-204 | gi\|18090560 | 293-325 | 100% |
| Seq ID NO: 52293 | 1-133 | gi\|54549200 | 31-163 | 91% |
| Seq ID NO: 52293 | 11-133 | gi\|7144024 | 38-160 | 91% |
| Seq ID NO: 52293 | 30-133 | gi\|18090416 | 1-104 | 91% |
| Seq ID NO: 52293 | 11-133 | gi\|54545022 | 9-131 | 88% |
| Seq ID NO: 52293 | 41-133 | gi\|54545591 | 1-93 | 91% |
| Seq ID NO: 52311 | 1-75 | gi\|30028941 | 235-309 | 96% |
| Seq ID NO: 52311 | 1-75 | gi\|33140204 | 235-309 | 96% |
| Seq ID NO: 52432 | 1-102 | gi\|35504996 | 472-574 | 96% |
| Seq ID NO: 52432 | 1-58 | gi\|30028727 | 523-580 | 100% |
| Seq ID NO: 52432 | 1-54 | gi\|30028246 | 523-576 | 100% |
| Seq ID NO: 52432 | 1-39 | gi\|35505048 | 461-499 | 100% |
| Seq ID NO: 52438 | 179-210 | gi\|18383056 | 1007-976 | 100% |
| Seq ID NO: 52569 | 1-311 | gi\|32324631 | 49-359 | 95% |
| Seq ID NO: 52596 | 77-218 | gi\|30028020 | 420-279 | 97% |
| Seq ID NO: 52642 | 79-324 | gi\|33139639 | 249-493 | 86% |
| Seq ID NO: 52642 | 66-218 | gi\|33140673 | 201-49 | 91% |
| Seq ID NO: 52642 | 286-342 | gi\|32324211 | 207-263 | 91% |
| Seq ID NO: 52710 | 25-152 | gi\|33140374 | 1-128 | 94% |
| Seq ID NO: 52762 | 1-90 | gi\|34105813 | 1098-1009 | 98% |
| Seq ID NO: 52762 | 1-90 | gi\|2707748 | 1096-1007 | 97% |
| Seq ID NO: 52762 | 1-90 | gi\|51093962 | 1079-990 | 97% |
| Seq ID NO: 52762 | 1-90 | gi\|31376322 | 1040-952 | 95% |
| Seq ID NO: 52762 | 1-90 | gi\|31074278 | 1105-1017 | 94% |
| Seq ID NO: 52762 | 1-90 | gi\|31376323 | 1036-948 | 94% |
| Seq ID NO: 52762 | 1-90 | gi\|6983959 | 1059-971 | 94% |
| Seq ID NO: 52762 | 3-90 | gi\|31074279 | 1103-1017 | 94% |
| Seq ID NO: 52762 | 1-87 | gi\|34105806 | 1106-1020 | 94% |
| Seq ID NO: 52762 | 1-87 | gi\|30844180 | 1105-1019 | 93% |
| Seq ID NO: 52762 | 1-90 | gi\|30525812 | 1092-1002 | 92% |
| Seq ID NO: 52762 | 1-90 | gi\|31376331 | 1031-942 | 92% |
| Seq ID NO: 52762 | 1-90 | gi\|54873771 | 134-44 | 92% |
| Seq ID NO: 52762 | 1-64 | gi\|34105810 | 1104-1041 | 98% |
| Seq ID NO: 52831 | 1-47 | gi\|32324245 | 540-586 | 100% |
| Seq ID NO: 52831 | 1-40 | gi\|33139824 | 507-546 | 100% |
| Seq ID NO: 52831 | 2-101 | gi\|18089712 | 314-413 | 84% |
| Seq ID NO: 52831 | 1-29 | gi\|33140223 | 507-535 | 100% |
| Seq ID NO: 52831 | 2-52 | gi\|7143499 | 320-371 | 86% |
| Seq ID NO: 52831 | 1-23 | gi\|33140453 | 507-529 | 100% |
| Seq ID NO: 52854 | 153-174 | gi\|21378611 | 322-301 | 100% |
| Seq ID NO: 52965 | 21-138 | gi\|28916076 | 1-119 | 91% |
| Seq ID NO: 52965 | 14-41 | gi\|159473 | 34-61 | 100% |
| Seq ID NO: 52965 | 14-41 | gi\|2454547 | 227-200 | 100% |
| Seq ID NO: 52965 | 14-41 | gi\|551594 | 194-221 | 100% |
| Seq ID NO: 52965 | 14-41 | gi\|551595 | 669-696 | 100% |
| Seq ID NO: 52965 | 14-41 | gi\|18032254 | 34-61 | 100% |
| Seq ID NO: 52965 | 18-41 | gi\|18477256 | 279-256 | 100% |
| Seq ID NO: 52965 | 18-41 | gi\|18477260 | 325-302 | 100% |
| Seq ID NO: 52965 | 18-41 | gi\|18477262 | 634-611 | 100% |
| Seq ID NO: 52965 | 14-35 | gi\|18477259 | 22-1 | 100% |
| Seq ID NO: 52965 | 14-35 | gi\|18477261 | 22-1 | 100% |
| Seq ID NO: 52965 | 14-35 | gi\|37780968 | 22-1 | 100% |
| Seq ID NO: 52976 | 617-707 | gi\|32325459 | 205-290 | 83% |
| Seq ID NO: 52981 | 15-425 | gi\|33140136 | 92-502 | 87% |
| Seq ID NO: 53038 | 793-899 | gi\|18090533 | 269-375 | 89% |
| Seq ID NO: 53058 | 469-594 | gi\|18081946 | 320-195 | 90% |
| Seq ID NO: 53058 | 172-199 | gi\|1766021 | 225-252 | 96% |
| Seq ID NO: 53058 | 172-199 | gi\|7641281 | 173-200 | 96% |
| Seq ID NO: 53110 | 73-218 | gi\|33139131 | 99-244 | 89% |
| Seq ID NO: 53110 | 79-218 | gi\|32324211 | 1-140 | 88% |
| Seq ID NO: 53110 | 68-218 | gi\|33140673 | 199-49 | 85% |
| Seq ID NO: 53110 | 86-218 | gi\|33139639 | 256-388 | 84% |
| Seq ID NO: 53110 | 288-314 | gi\|33139639 | 467-493 | 96% |
| Seq ID NO: 53113 | 15-54 | gi\|28916076 | 1-40 | 97% |
| Seq ID NO: 53113 | 8-35 | gi\|159473 | 34-61 | 100% |
| Seq ID NO: 53113 | 8-35 | gi\|2454547 | 227-200 | 100% |
| Seq ID NO: 53113 | 8-35 | gi\|551594 | 194-221 | 100% |
| Seq ID NO: 53113 | 8-35 | gi\|551595 | 669-696 | 100% |
| Seq ID NO: 53113 | 8-35 | gi\|18032254 | 34-61 | 100% |
| Seq ID NO: 53113 | 12-35 | gi\|18477256 | 279-256 | 100% |
| Seq ID NO: 53113 | 12-35 | gi\|18477260 | 325-302 | 100% |
| Seq ID NO: 53113 | 12-35 | gi\|18477262 | 634-611 | 100% |
| Seq ID NO: 53113 | 8-29 | gi\|18477259 | 22-1 | 100% |
| Seq ID NO: 53113 | 8-29 | gi\|18477261 | 22-1 | 100% |
| Seq ID NO: 53113 | 8-29 | gi\|37780968 | 22-1 | 100% |
| Seq ID NO: 53345 | 33-68 | gi\|32324562 | 547-512 | 97% |
| Seq ID NO: 53381 | 122-150 | gi\|18382995 | 332-304 | 96% |
| Seq ID NO: 53444 | 20-42 | gi\|8005191 | 86-64 | 100% |
| Seq ID NO: 53584 | 1-223 | gi\|33139862 | 41-263 | 99% |
| Seq ID NO: 53584 | 266-445 | gi\|33139862 | 262-441 | 99% |
| Seq ID NO: 53584 | 1-129 | gi\|32325297 | 437-565 | 100% |
| Seq ID NO: 53584 | 601-702 | gi\|33139953 | 453-554 | 99% |
| Seq ID NO: 53584 | 1-146 | gi\|22544160 | 265-410 | 86% |
| Seq ID NO: 53584 | 767-855 | gi\|7143567 | 305-217 | 88% |
| Seq ID NO: 53584 | 1-128 | gi\|30167496 | 229-356 | 82% |
| Seq ID NO: 53771 | 15-54 | gi\|28916076 | 1-40 | 97% |
| Seq ID NO: 53771 | 8-35 | gi\|159473 | 34-61 | 100% |
| Seq ID NO: 53771 | 8-35 | gi\|2454547 | 227-200 | 100% |
| Seq ID NO: 53771 | 8-35 | gi\|551594 | 194-221 | 100% |
| Seq ID NO: 53771 | 8-35 | gi\|551595 | 669-696 | 100% |
| Seq ID NO: 53771 | 8-35 | gi\|18032254 | 34-61 | 100% |
| Seq ID NO: 53771 | 12-35 | gi\|18477256 | 279-256 | 100% |
| Seq ID NO: 53771 | 12-35 | gi\|18477260 | 325-302 | 100% |
| Seq ID NO: 53771 | 12-35 | gi\|18477262 | 634-611 | 100% |
| Seq ID NO: 53771 | 8-29 | gi\|18477259 | 22-1 | 100% |
| Seq ID NO: 53771 | 8-29 | gi\|18477261 | 22-1 | 100% |
| Seq ID NO: 53771 | 8-29 | gi\|37780968 | 22-1 | 100% |
| Seq ID NO: 53788 | 196-219 | gi\|19265811 | 51-74 | 100% |
| Seq ID NO: 53903 | 49-125 | gi\|51334373 | 320-396 | 90% |
| Seq ID NO: 53903 | 281-309 | gi\|7143754 | 460-488 | 100% |
| Seq ID NO: 53903 | 281-309 | gi\|54546250 | 453-481 | 100% |
| Seq ID NO: 53942 | 1-127 | gi\|33140348 | 254-128 | 87% |
| Seq ID NO: 53996 | 95-170 | gi\|18080046 | 260-334 | 90% |
| Seq ID NO: 54067 | 614-700 | gi\|18080124 | 72-159 | 84% |
| Seq ID NO: 54067 | 630-658 | gi\|18082691 | 129-157 | 96% |
| Seq ID NO: 54223 | 1-32 | gi\|18082819 | 494-463 | 100% |
| Seq ID NO: 54223 | 1-32 | gi\|32324738 | 389-420 | 100% |
| Seq ID NO: 54223 | 1-32 | gi\|54546964 | 145-176 | 100% |
| Seq ID NO: 54228 | 9-154 | gi\|33139017 | 5-150 | 99% |
| Seq ID NO: 54361 | 453-568 | gi\|33140744 | 29-141 | 84% |
| Seq ID NO: 54394 | 96-242 | gi\|33140673 | 195-49 | 90% |
| Seq ID NO: 54394 | 110-281 | gi\|33139639 | 256-428 | 88% |
| Seq ID NO: 54404 | 1-41 | gi\|18381736 | 808-848 | 90% |
| Seq ID NO: 54404 | 19-63 | gi\|18382098 | 510-554 | 89% |
| Seq ID NO: 54404 | 19-41 | gi\|18381713 | 520-542 | 100% |
| Seq ID NO: 54411 | 69-177 | gi\|18090579 | 65-176 | 86% |
| Seq ID NO: 54431 | 127-151 | gi\|18089765 | 337-361 | 100% |
| Seq ID NO: 45816 | 323-510 | gi\|52128303 | 201-388 | 81% |
| Seq ID NO: 54533 | 295-336 | gi\|7144329 | 64-105 | 97% |
| Seq ID NO: 54598 | 17-91 | gi\|33139131 | 116-190 | 92% |
| Seq ID NO: 54598 | 6-97 | gi\|32324211 | 1-92 | 87% |
| Seq ID NO: 54650 | 161-185 | gi\|32183975 | 527-551 | 100% |
| Seq ID NO: 54664 | 1-99 | gi\|33139292 | 225-323 | 100% |
| Seq ID NO: 54709 | 1-91 | gi\|6562543 | 742-832 | 98% |
| Seq ID NO: 54709 | 22-59 | gi\|18382129 | 349-386 | 92% |
| Seq ID NO: 54710 | 1-112 | gi\|18090579 | 65-176 | 90% |
| Seq ID NO: 54782 | 21-138 | gi\|28916076 | 1-119 | 91% |
| Seq ID NO: 54782 | 14-41 | gi\|159473 | 34-61 | 100% |
| Seq ID NO: 54782 | 14-41 | gi\|2454547 | 227-200 | 100% |
| Seq ID NO: 54782 | 14-41 | gi\|551594 | 194-221 | 100% |
| Seq ID NO: 54782 | 14-41 | gi\|551595 | 669-696 | 100% |
| Seq ID NO: 54782 | 14-41 | gi\|18032254 | 34-61 | 100% |
| Seq ID NO: 54782 | 18-41 | gi\|18477256 | 279-256 | 100% |
| Seq ID NO: 54782 | 18-41 | gi\|18477260 | 325-302 | 100% |
| Seq ID NO: 54782 | 18-41 | gi\|18477262 | 634-611 | 100% |
| Seq ID NO: 54782 | 14-35 | gi\|18477259 | 22-1 | 100% |
| Seq ID NO: 54782 | 14-35 | gi\|18477261 | 22-1 | 100% |
| Seq ID NO: 54782 | 14-35 | gi\|37780968 | 22-1 | 100% |
| Seq ID NO: 54811 | 73-94 | gi\|7641297 | 281-302 | 100% |
| Seq ID NO: 54839 | 194-282 | gi\|33139570 | 594-506 | 100% |
| Seq ID NO: 54839 | 198-282 | gi\|30029553 | 597-513 | 100% |
| Seq ID NO: 54839 | 131-282 | gi\|18079986 | 658-507 | 88% |
| Seq ID NO: 54839 | 218-282 | gi\|33139565 | 577-513 | 100% |
| Seq ID NO: 54839 | 132-220 | gi\|21493943 | 587-499 | 89% |
| Seq ID NO: 54839 | 232-282 | gi\|32324861 | 563-513 | 100% |
| Seq ID NO: 54839 | 240-282 | gi\|32324744 | 548-506 | 97% |
| Seq ID NO: 54847 | 3-101 | gi\|28916076 | 176-79 | 89% |
| Seq ID NO: 54865 | 54-202 | gi\|33140673 | 199-51 | 88% |
| Seq ID NO: 54865 | 61-202 | gi\|33139639 | 245-386 | 88% |
| Seq ID NO: 54865 | 59-199 | gi\|33139131 | 99-239 | 86% |
| Seq ID NO: 45847 | 183-308 | gi\|18080348 | 231-356 | 85% |
| Seq ID NO: 45847 | 190-308 | gi\|7144294 | 198-316 | 85% |
| Seq ID NO: 54946 | 128-285 | gi\|54546846 | 415-257 | 85% |
| Seq ID NO: 54981 | 83-126 | gi\|551594 | 1028-1070 | 93% |
| Seq ID NO: 54981 | 83-126 | gi\|551595 | 267-309 | 93% |
| Seq ID NO: 54999 | 328-498 | gi\|18382277 | 801-971 | 82% |
| Seq ID NO: 55025 | 372-395 | gi\|33138439 | 263-286 | 100% |
| Seq ID NO: 55025 | 419-439 | gi\|33952838 | 448-428 | 100% |
| Seq ID NO: 55106 | 21-138 | gi\|28916076 | 1-119 | 91% |
| Seq ID NO: 55106 | 14-41 | gi\|159473 | 34-61 | 100% |
| Seq ID NO: 55106 | 14-41 | gi\|2454547 | 227-200 | 100% |
| Seq ID NO: 55106 | 14-41 | gi\|551594 | 194-221 | 100% |
| Seq ID NO: 55106 | 14-41 | gi\|551595 | 669-696 | 100% |
| Seq ID NO: 55106 | 14-41 | gi\|18032254 | 34-61 | 100% |
| Seq ID NO: 55106 | 18-41 | gi\|18477256 | 279-256 | 100% |
| Seq ID NO: 55106 | 18-41 | gi\|18477260 | 325-302 | 100% |
| Seq ID NO: 55106 | 18-41 | gi\|18477262 | 634-611 | 100% |
| Seq ID NO: 55106 | 14-35 | gi\|18477259 | 22-1 | 100% |
| Seq ID NO: 55106 | 14-35 | gi\|18477261 | 22-1 | 100% |
| Seq ID NO: 55106 | 14-35 | gi\|37780968 | 22-1 | 100% |
| Seq ID NO: 55108 | 1-93 | gi\|7143864 | 42-134 | 82% |
| Seq ID NO: 55117 | 35-57 | gi\|7144284 | 325-303 | 100% |
| Seq ID NO: 55119 | 36-155 | gi\|28916076 | 140-20 | 90% |
| Seq ID NO: 55175 | 1-160 | gi\|5107411 | 189-30 | 100% |
| Seq ID NO: 55175 | 1-160 | gi\|2149587 | 189-30 | 95% |
| Seq ID NO: 55175 | 47-160 | gi\|34105813 | 1719-1606 | 100% |
| Seq ID NO: 55175 | 1-160 | gi\|2149585 | 189-30 | 92% |
| Seq ID NO: 55175 | 1-160 | gi\|2738785 | 190-30 | 92% |
| Seq ID NO: 55175 | 1-160 | gi\|2738792 | 190-30 | 92% |
| Seq ID NO: 55175 | 1-160 | gi\|2738799 | 190-30 | 92% |
| Seq ID NO: 55175 | 1-160 | gi\|2738800 | 190-30 | 92% |
| Seq ID NO: 55175 | 2-160 | gi\|2707748 | 1766-1607 | 90% |
| Seq ID NO: 55175 | 1-80 | gi\|48479719 | 191-112 | 98% |
| Seq ID NO: 55175 | 1-80 | gi\|37674501 | 194-115 | 98% |
| Seq ID NO: 55175 | 115-160 | gi\|37674501 | 75-30 | 95% |
| Seq ID NO: 55175 | 1-78 | gi\|1147729 | 2525-2448 | 98% |
| Seq ID NO: 55175 | 115-160 | gi\|1147729 | 2413-2368 | 97% |
| Seq ID NO: 55175 | 1-78 | gi\|2232021 | 87-10 | 98% |
| Seq ID NO: 55226 | 1-24 | gi\|33139696 | 554-577 | 100% |
| Seq ID NO: 55245 | 1-25 | gi\|32324959 | 40-64 | 96% |
| Seq ID NO: 55392 | 173-276 | gi\|35504550 | 57-160 | 99% |
| Seq ID NO: 55392 | 326-425 | gi\|35504550 | 164-263 | 97% |
| Seq ID NO: 55392 | 1-66 | gi\|35504862 | 10-74 | 89% |
| Seq ID NO: 55425 | 57-187 | gi\|54545475 | 93-224 | 92% |
| Seq ID NO: 55425 | 231-321 | gi\|54545475 | 220-310 | 90% |
| Seq ID NO: 55468 | 1-141 | gi\|32325191 | 449-589 | 94% |
| Seq ID NO: 55545 | 75-99 | gi\|32325459 | 266-290 | 100% |
| Seq ID NO: 55553 | 1-116 | gi\|33139587 | 121-6 | 94% |
| Seq ID NO: 55566 | 167-228 | gi\|18083080 | 182-243 | 88% |
| Seq ID NO: 55640 | 887-1044 | gi\|33139586 | 1-158 | 96% |
| Seq ID NO: 55660 | 21-138 | gi\|28916076 | 1-119 | 91% |
| Seq ID NO: 55660 | 14-41 | gi\|159473 | 34-61 | 100% |
| Seq ID NO: 55660 | 14-41 | gi\|2454547 | 227-200 | 100% |
| Seq ID NO: 55660 | 14-41 | gi\|551594 | 194-221 | 100% |
| Seq ID NO: 55660 | 14-41 | gi\|551595 | 669-696 | 100% |
| Seq ID NO: 55660 | 14-41 | gi\|18032254 | 34-61 | 100% |
| Seq ID NO: 55660 | 18-41 | gi\|18477256 | 279-256 | 100% |
| Seq ID NO: 55660 | 18-41 | gi\|18477260 | 325-302 | 100% |
| Seq ID NO: 55660 | 18-41 | gi\|18477262 | 634-611 | 100% |
| Seq ID NO: 55660 | 14-35 | gi\|18477259 | 22-1 | 100% |
| Seq ID NO: 55660 | 14-35 | gi\|18477261 | 22-1 | 100% |
| Seq ID NO: 55660 | 14-35 | gi\|37780968 | 22-1 | 100% |
| Seq ID NO: 55719 | 1-146 | gi\|18080802 | 354-209 | 97% |
| Seq ID NO: 55719 | 1-131 | gi\|7144157 | 137-7 | 97% |
| Seq ID NO: 55719 | 1-130 | gi\|18088100 | 130-1 | 97% |
| Seq ID NO: 55719 | 1-124 | gi\|54549688 | 124-1 | 96% |
| Seq ID NO: 55719 | 1-118 | gi\|18089409 | 118-1 | 97% |
| Seq ID NO: 55719 | 1-117 | gi\|18090782 | 117-1 | 97% |
| Seq ID NO: 55719 | 25-146 | gi\|52128973 | 94-215 | 88% |
| Seq ID NO: 55719 | 1-78 | gi\|18083086 | 537-614 | 96% |
| Seq ID NO: 55719 | 1-75 | gi\|18090403 | 75-1 | 96% |
| Seq ID NO: 55719 | 25-121 | gi\|52129301 | 319-415 | 86% |
| Seq ID NO: 55719 | 100-146 | gi\|52129005 | 1-47 | 95% |
| Seq ID NO: 55719 | 83-146 | gi\|9033884 | 441-503 | 90% |
| Seq ID NO: 55719 | 83-146 | gi\|15768080 | 331-393 | 90% |
| Seq ID NO: 55719 | 71-146 | gi\|19383550 | 397-471 | 88% |
| Seq ID NO: 55719 | 83-146 | gi\|39747546 | 344-406 | 90% |
| Seq ID NO: 55719 | 100-146 | gi\|39747568 | 266-312 | 95% |
| Seq ID NO: 55719 | 100-146 | gi\|46984679 | 145-99 | 95% |
| Seq ID NO: 55719 | 105-146 | gi\|15769768 | 391-432 | 97% |
| Seq ID NO: 55719 | 105-146 | gi\|40669510 | 255-296 | 97% |
| Seq ID NO: 55719 | 100-140 | gi\|46986671 | 175-135 | 97% |
| Seq ID NO: 55719 | 108-146 | gi\|31326272 | 1-39 | 97% |
| Seq ID NO: 55719 | 105-146 | gi\|159682 | 379-420 | 92% |
| Seq ID NO: 55759 | 302-322 | gi\|46984484 | 89-109 | 100% |
| Seq ID NO: 55808 | 1-74 | gi\|54545841 | 238-311 | 91% |
| Seq ID NO: 55827 | 140-161 | gi\|46983788 | 125-146 | 100% |
| Seq ID NO: 55849 | 95-269 | gi\|54548527 | 231-405 | 87% |
| Seq ID NO: 55849 | 138-269 | gi\|54545989 | 2-133 | 88% |
| Seq ID NO: 55931 | 140-268 | gi\|33139063 | 130-258 | 96% |
| Seq ID NO: 55931 | 1-60 | gi\|33139063 | 71-130 | 98% |
| Seq ID NO: 56068 | 123-187 | gi\|21432594 | 122-186 | 86% |
| Seq ID NO: 56211 | 1-101 | gi\|7144157 | 39-139 | 97% |
| Seq ID NO: 56211 | 1-101 | gi\|54549688 | 26-126 | 96% |
| Seq ID NO: 56211 | 22-101 | gi\|18083086 | 614-535 | 96% |
| Seq ID NO: 56211 | 25-101 | gi\|18090403 | 1-77 | 96% |
| Seq ID NO: 56211 | 54-75 | gi\|52129301 | 340-319 | 100% |
| Seq ID NO: 56333 | 36-56 | gi\|33140432 | 264-284 | 100% |
| Seq ID NO: 56402 | 639-718 | gi\|33139730 | 156-76 | 93% |
| Seq ID NO: 56411 | 1-73 | gi\|16797830 | 749-821 | 100% |
| Seq ID NO: 56411 | 1-73 | gi\|16797832 | 747-819 | 100% |
| Seq ID NO: 56411 | 1-73 | gi\|26000759 | 745-817 | 100% |
| Seq ID NO: 56411 | 1-73 | gi\|31442320 | 746-818 | 100% |
| Seq ID NO: 56411 | 1-73 | gi\|31442322 | 746-818 | 98% |
| Seq ID NO: 56411 | 8-73 | gi\|21885259 | 776-841 | 98% |
| Seq ID NO: 45947 | 974-995 | gi\|46988291 | 426-405 | 100% |
| Seq ID NO: 56551 | 187-242 | gi\|18381363 | 1139-1194 | 91% |
| Seq ID NO: 56640 | 1-65 | gi\|33140765 | 16-80 | 98% |
| Seq ID NO: 56699 | 36-174 | gi\|28916076 | 140-1 | 92% |
| Seq ID NO: 56699 | 154-181 | gi\|159473 | 61-34 | 100% |
| Seq ID NO: 56699 | 154-181 | gi\|2454547 | 200-227 | 100% |
| Seq ID NO: 56699 | 154-181 | gi\|551594 | 221-194 | 100% |
| Seq ID NO: 56699 | 154-181 | gi\|551595 | 696-669 | 100% |
| Seq ID NO: 56699 | 154-181 | gi\|18032254 | 61-34 | 100% |
| Seq ID NO: 56699 | 154-177 | gi\|18477256 | 256-279 | 100% |
| Seq ID NO: 56699 | 154-177 | gi\|18477260 | 302-325 | 100% |
| Seq ID NO: 56699 | 154-177 | gi\|18477262 | 611-634 | 100% |
| Seq ID NO: 56699 | 160-181 | gi\|18477259 | 1-22 | 100% |
| Seq ID NO: 56699 | 160-181 | gi\|18477261 | 1-22 | 100% |
| Seq ID NO: 56699 | 160-181 | gi\|37780968 | 1-22 | 100% |
| Seq ID NO: 56752 | 348-369 | gi\|7235459 | 41-20 | 100% |
| Seq ID NO: 45973 | 404-544 | gi\|54546305 | 483-623 | 88% |
| Seq ID NO: 45973 | 181-293 | gi\|54546305 | 345-457 | 83% |
| Seq ID NO: 45973 | 434-544 | gi\|54544886 | 269-379 | 90% |
| Seq ID NO: 56872 | 764-956 | gi\|33140201 | 149-341 | 99% |
| Seq ID NO: 56872 | 569-719 | gi\|33140201 | 1-151 | 98% |
| Seq ID NO: 56889 | 189-333 | gi\|54544976 | 245-389 | 89% |
| Seq ID NO: 56927 | 75-226 | gi\|33139131 | 99-250 | 87% |
| Seq ID NO: 56927 | 81-221 | gi\|32324211 | 1-141 | 87% |
| Seq ID NO: 56972 | 1-101 | gi\|35504916 | 448-548 | 96% |
| Seq ID NO: 56972 | 1-85 | gi\|35504725 | 448-533 | 94% |
| Seq ID NO: 57065 | 168-188 | gi\|33952655 | 9-29 | 100% |
| Seq ID NO: 57065 | 168-188 | gi\|46422144 | 284-304 | 100% |
| Seq ID NO: 57084 | 62-214 | gi\|33140673 | 201-49 | 92% |
| Seq ID NO: 57084 | 71-214 | gi\|33139639 | 245-388 | 93% |
| Seq ID NO: 57086 | 190-217 | gi\|54547991 | 157-184 | 96% |
| Seq ID NO: 57220 | 1-66 | gi\|37517244 | 1816-1881 | 96% |
| Seq ID NO: 57351 | 5-196 | gi\|32323971 | 353-544 | 98% |
| Seq ID NO: 57416 | 412-434 | gi\|551595 | 853-875 | 100% |
| Seq ID NO: 57422 | 783-808 | gi\|46986223 | 315-290 | 100% |
| Seq ID NO: 57468 | 1-221 | gi\|2239108 | 36-256 | 100% |
| Seq ID NO: 57539 | 18-223 | gi\|32325381 | 184-389 | 92% |
| Seq ID NO: 57539 | 415-498 | gi\|32325381 | 398-481 | 97% |
| Seq ID NO: 57539 | 174-223 | gi\|33139814 | 8-57 | 100% |
| Seq ID NO: 57713 | 253-552 | gi\|33139068 | 28-327 | 97% |
| Seq ID NO: 57713 | 633-701 | gi\|33139068 | 334-402 | 98% |
| Seq ID NO: 57713 | 169-198 | gi\|33139068 | 1-30 | 100% |
| Seq ID NO: 57713 | 750-877 | gi\|33139557 | 441-568 | 93% |
| Seq ID NO: 57713 | 176-198 | gi\|33139557 | 1-23 | 100% |
| Seq ID NO: 57713 | 750-892 | gi\|33140099 | 424-566 | 92% |
| Seq ID NO: 57713 | 255-552 | gi\|33139079 | 16-313 | 97% |
| Seq ID NO: 57713 | 750-849 | gi\|33139079 | 434-533 | 94% |
| Seq ID NO: 57713 | 1-198 | gi\|32324666 | 26-223 | 96% |
| Seq ID NO: 57713 | 633-661 | gi\|32324666 | 527-555 | 100% |
| Seq ID NO: 57713 | 271-552 | gi\|33139103 | 1-282 | 97% |
| Seq ID NO: 57713 | 287-554 | gi\|33139308 | 38-306 | 97% |
| Seq ID NO: 57713 | 637-864 | gi\|33139308 | 315-545 | 90% |
| Seq ID NO: 57713 | 1232-1423 | gi\|33139521 | 162-353 | 96% |
| Seq ID NO: 57713 | 811-966 | gi\|33139521 | 1-159 | 89% |
| Seq ID NO: 57713 | 750-878 | gi\|33140185 | 112-240 | 93% |
| Seq ID NO: 57713 | 636-701 | gi\|33140185 | 1-66 | 98% |
| Seq ID NO: 57713 | 300-551 | gi\|32325329 | 51-302 | 90% |
| Seq ID NO: 57713 | 1229-1384 | gi\|32325562 | 408-563 | 99% |
| Seq ID NO: 57713 | 750-966 | gi\|32325562 | 189-408 | 89% |
| Seq ID NO: 57713 | 598-701 | gi\|32325562 | 40-143 | 96% |
| Seq ID NO: 57713 | 300-534 | gi\|32324015 | 367-601 | 90% |
| Seq ID NO: 57713 | 1229-1374 | gi\|33140373 | 408-553 | 100% |
| Seq ID NO: 57713 | 655-698 | gi\|32325327 | 481-524 | 90% |
| Seq ID NO: 57713 | 655-776 | gi\|32325443 | 481-599 | 83% |
| Seq ID NO: 57713 | 300-533 | gi\|33140304 | 225-458 | 89% |
| Seq ID NO: 57713 | 300-517 | gi\|33140764 | 367-584 | 89% |
| Seq ID NO: 57713 | 1229-1347 | gi\|32324619 | 408-526 | 100% |
| Seq ID NO: 57713 | 300-490 | gi\|32325078 | 367-557 | 90% |
| Seq ID NO: 57713 | 1254-1423 | gi\|33139825 | 258-427 | 90% |
| Seq ID NO: 57713 | 300-453 | gi\|33139892 | 410-563 | 90% |
| Seq ID NO: 57713 | 300-452 | gi\|33140637 | 410-562 | 90% |
| Seq ID NO: 57713 | 1288-1423 | gi\|32324536 | 247-382 | 91% |
| Seq ID NO: 57713 | 414-551 | gi\|32324536 | 10-147 | 89% |
| Seq ID NO: 57713 | 384-551 | gi\|33140589 | 1-168 | 88% |
| Seq ID NO: 57713 | 393-551 | gi\|33140074 | 4-162 | 88% |
| Seq ID NO: 57713 | 655-896 | gi\|32325371 | 173-411 | 83% |
| Seq ID NO: 57713 | 300-401 | gi\|32324162 | 476-577 | 92% |
| Seq ID NO: 57713 | 428-551 | gi\|32324623 | 225-348 | 88% |
| Seq ID NO: 57713 | 300-375 | gi\|32324623 | 103-178 | 93% |
| Seq ID NO: 57713 | 300-353 | gi\|33139035 | 491-544 | 94% |
| Seq ID NO: 57793 | 1-189 | gi\|33139897 | 347-535 | 91% |
| Seq ID NO: 57824 | 6-146 | gi\|32324211 | 1-141 | 88% |
| Seq ID NO: 57824 | 17-151 | gi\|33139131 | 116-250 | 88% |
| Seq ID NO: 57824 | 1-145 | gi\|33140673 | 193-49 | 83% |
| Seq ID NO: 57824 | 13-145 | gi\|33139639 | 256-388 | 82% |
| Seq ID NO: 57824 | 152-172 | gi\|45563795 | 521-501 | 100% |
| Seq ID NO: 57907 | 1213-1367 | gi\|18081696 | 127-281 | 85% |
| Seq ID NO: 57996 | 664-684 | gi\|39747573 | 93-113 | 100% |
| Seq ID NO: 58001 | 4-65 | gi\|27541441 | 265-326 | 84% |
| Seq ID NO: 46037 | 415-488 | gi\|21393234 | 329-402 | 91% |
| Seq ID NO: 46037 | 117-143 | gi\|21393234 | 148-174 | 100% |
| Seq ID NO: 46037 | 377-488 | gi\|18080246 | 261-372 | 85% |
| Seq ID NO: 46037 | 418-488 | gi\|18381808 | 299-229 | 90% |
| Seq ID NO: 46037 | 427-488 | gi\|52128281 | 271-332 | 91% |
| Seq ID NO: 58171 | 85-106 | gi\|22139607 | 133-112 | 100% |
| Seq ID NO: 58223 | 117-138 | gi\|16746280 | 49-70 | 100% |
| Seq ID NO: 58237 | 123-269 | gi\|33139639 | 245-388 | 89% |
| Seq ID NO: 58237 | 114-269 | gi\|33140673 | 201-49 | 87% |
| Seq ID NO: 58237 | 121-246 | gi\|33139131 | 99-224 | 82% |
| Seq ID NO: 58237 | 333-378 | gi\|32324211 | 211-256 | 91% |
| Seq ID NO: 58264 | 869-1010 | gi\|18082514 | 100-241 | 90% |
| Seq ID NO: 58264 | 1203-1298 | gi\|18082514 | 245-340 | 92% |
| Seq ID NO: 58357 | 136-238 | gi\|54549492 | 497-599 | 88% |
| Seq ID NO: 58357 | 369-416 | gi\|54549492 | 633-680 | 91% |
| Seq ID NO: 58382 | 12-159 | gi\|18383012 | 1144-1291 | 84% |
| Seq ID NO: 58427 | 1-143 | gi\|16797830 | 62-204 | 97% |
| Seq ID NO: 58427 | 1-143 | gi\|16797831 | 62-202 | 97% |
| Seq ID NO: 58427 | 1-143 | gi\|16797832 | 63-203 | 97% |
| Seq ID NO: 58427 | 1-143 | gi\|47118285 | 74-214 | 96% |
| Seq ID NO: 58427 | 1-142 | gi\|26000762 | 62-201 | 95% |
| Seq ID NO: 58427 | 1-143 | gi\|31442322 | 62-202 | 95% |
| Seq ID NO: 58427 | 1-143 | gi\|38096133 | 62-202 | 93% |
| Seq ID NO: 58438 | 319-443 | gi\|32324393 | 180-307 | 96% |
| Seq ID NO: 58438 | 1-83 | gi\|32324393 | 25-108 | 98% |
| Seq ID NO: 58438 | 154-195 | gi\|32324393 | 107-148 | 100% |
| Seq ID NO: 58438 | 239-273 | gi\|32324393 | 147-181 | 100% |
| Seq ID NO: 58438 | 319-383 | gi\|33140257 | 413-477 | 98% |
| Seq ID NO: 58438 | 154-191 | gi\|33140257 | 345-382 | 100% |
| Seq ID NO: 58478 | 192-238 | gi\|18089268 | 22-68 | 89% |
| Seq ID NO: 58670 | 81-148 | gi\|18090251 | 452-519 | 88% |
| Seq ID NO: 58722 | 346-432 | gi\|19266104 | 21-107 | 84% |
| Seq ID NO: 46083 | 1-119 | gi\|33139765 | 458-576 | 99% |
| Seq ID NO: 46083 | 265-305 | gi\|52128426 | 396-436 | 95% |
| Seq ID NO: 46084 | 295-415 | gi\|33139765 | 576-456 | 99% |
| Seq ID NO: 46084 | 479-528 | gi\|33139765 | 454-405 | 100% |
| Seq ID NO: 46084 | 109-149 | gi\|52128426 | 436-396 | 95% |
| Seq ID NO: 58765 | 150-170 | gi\|18081306 | 417-437 | 100% |
| Seq ID NO: 58768 | 2-66 | gi\|7143917 | 219-283 | 90% |
| Seq ID NO: 58912 | 483-676 | gi\|7144233 | 308-501 | 87% |
| Seq ID NO: 58912 | 483-667 | gi\|7144339 | 311-495 | 86% |
| Seq ID NO: 58913 | 201-271 | gi\|52128794 | 102-172 | 90% |
| Seq ID NO: 58913 | 187-272 | gi\|46985091 | 319-234 | 85% |
| Seq ID NO: 58913 | 85-121 | gi\|18080422 | 365-401 | 94% |
| Seq ID NO: 58913 | 249-272 | gi\|46985022 | 259-236 | 100% |
| Seq ID NO: 59048 | 23-135 | gi\|33139660 | 491-603 | 98% |
| Seq ID NO: 59083 | 221-245 | gi\|46987193 | 49-25 | 96% |
| Seq ID NO: 59131 | 1-107 | gi\|18082168 | 3-109 | 94% |
| Seq ID NO: 59131 | 16-108 | gi\|51334509 | 37-129 | 88% |
| Seq ID NO: 59131 | 70-108 | gi\|52129549 | 138-176 | 89% |
| Seq ID NO: 59132 | 1-56 | gi\|7641359 | 475-420 | 91% |
| Seq ID NO: 59132 | 1-59 | gi\|14085900 | 55-113 | 90% |
| Seq ID NO: 59132 | 1-47 | gi\|14086110 | 51-97 | 93% |
| Seq ID NO: 59132 | 1-56 | gi\|15767660 | 65-120 | 89% |
| Seq ID NO: 59132 | 1-56 | gi\|18495580 | 501-446 | 89% |
| Seq ID NO: 59132 | 19-59 | gi\|39747527 | 61-101 | 92% |
| Seq ID NO: 59201 | 21-138 | gi\|28916076 | 1-119 | 91% |
| Seq ID NO: 59201 | 14-41 | gi\|159473 | 34-61 | 100% |
| Seq ID NO: 59201 | 14-41 | gi\|2454547 | 227-200 | 100% |
| Seq ID NO: 59201 | 14-41 | gi\|551594 | 194-221 | 100% |
| Seq ID NO: 59201 | 14-41 | gi\|551595 | 669-696 | 100% |
| Seq ID NO: 59201 | 14-41 | gi\|18032254 | 34-61 | 100% |
| Seq ID NO: 59201 | 18-41 | gi\|18477256 | 279-256 | 100% |
| Seq ID NO: 59201 | 18-41 | gi\|18477260 | 325-302 | 100% |
| Seq ID NO: 59201 | 18-41 | gi\|18477262 | 634-611 | 100% |
| Seq ID NO: 59201 | 14-35 | gi\|18477259 | 22-1 | 100% |
| Seq ID NO: 59201 | 14-35 | gi\|18477261 | 22-1 | 100% |
| Seq ID NO: 59201 | 14-35 | gi\|37780968 | 22-1 | 100% |
| Seq ID NO: 59268 | 131-256 | gi\|33139189 | 152-277 | 99% |
| Seq ID NO: 59268 | 1-56 | gi\|33139189 | 96-151 | 98% |
| Seq ID NO: 59269 | 3-85 | gi\|7143543 | 482-564 | 88% |
| Seq ID NO: 59311 | 1-81 | gi\|7144052 | 441-521 | 90% |
| Seq ID NO: 59484 | 1-118 | gi\|18080802 | 329-209 | 95% |
| Seq ID NO: 59484 | 1-103 | gi\|7144157 | 112-7 | 95% |
| Seq ID NO: 59484 | 1-102 | gi\|18088100 | 105-1 | 95% |
| Seq ID NO: 59484 | 1-96 | gi\|54549688 | 99-1 | 93% |
| Seq ID NO: 59484 | 1-90 | gi\|18089409 | 93-1 | 94% |
| Seq ID NO: 59484 | 1-89 | gi\|18090782 | 92-1 | 94% |
| Seq ID NO: 59484 | 56-118 | gi\|9033884 | 441-503 | 90% |
| Seq ID NO: 59484 | 56-118 | gi\|15768080 | 331-393 | 90% |
| Seq ID NO: 59484 | 56-118 | gi\|39747546 | 344-406 | 90% |
| Seq ID NO: 59484 | 77-118 | gi\|15769768 | 391-432 | 97% |
| Seq ID NO: 59484 | 77-118 | gi\|19383550 | 430-471 | 97% |
| Seq ID NO: 59484 | 77-118 | gi\|39747568 | 271-312 | 97% |
| Seq ID NO: 59484 | 77-112 | gi\|46986671 | 170-135 | 100% |
| Seq ID NO: 59484 | 80-118 | gi\|31326272 | 1-39 | 97% |
| Seq ID NO: 59484 | 77-118 | gi\|159682 | 379-420 | 92% |
| Seq ID NO: 59484 | 77-118 | gi\|15784370 | 177-218 | 92% |
| Seq ID NO: 59530 | 1-129 | gi\|33139697 | 192-63 | 97% |
| Seq ID NO: 59558 | 15-54 | gi\|28916076 | 1-40 | 97% |
| Seq ID NO: 59558 | 8-35 | gi\|159473 | 34-61 | 100% |
| Seq ID NO: 59558 | 8-35 | gi\|2454547 | 227-200 | 100% |
| Seq ID NO: 59558 | 8-35 | gi\|551594 | 194-221 | 100% |
| Seq ID NO: 59558 | 8-35 | gi\|551595 | 669-696 | 100% |
| Seq ID NO: 59558 | 8-35 | gi\|18032254 | 34-61 | 100% |
| Seq ID NO: 59558 | 12-35 | gi\|18477256 | 279-256 | 100% |
| Seq ID NO: 59558 | 12-35 | gi\|18477260 | 325-302 | 100% |
| Seq ID NO: 59558 | 12-35 | gi\|18477262 | 634-611 | 100% |
| Seq ID NO: 59558 | 8-29 | gi\|18477259 | 22-1 | 100% |
| Seq ID NO: 59558 | 8-29 | gi\|18477261 | 22-1 | 100% |
| Seq ID NO: 59558 | 8-29 | gi\|37780968 | 22-1 | 100% |
| Seq ID NO: 59597 | 141-230 | gi\|33139639 | 297-386 | 85% |
| Seq ID NO: 59597 | 141-193 | gi\|33140673 | 140-88 | 90% |
| Seq ID NO: 59652 | 7-89 | gi\|33140014 | 182-264 | 100% |
| Seq ID NO: 59901 | 94-114 | gi\|7798143 | 245-225 | 100% |
| Seq ID NO: 59911 | 1-141 | gi\|2239106 | 1166-1307 | 98% |
| Seq ID NO: 59911 | 1-141 | gi\|37517243 | 1166-1307 | 98% |
| Seq ID NO: 59944 | 178-340 | gi\|33139639 | 257-419 | 89% |
| Seq ID NO: 59944 | 159-310 | gi\|33140673 | 199-48 | 87% |
| Seq ID NO: 60099 | 81-221 | gi\|32324211 | 1-141 | 90% |
| Seq ID NO: 60099 | 92-226 | gi\|33139131 | 116-250 | 89% |
| Seq ID NO: 60099 | 305-349 | gi\|33139131 | 293-337 | 93% |
| Seq ID NO: 60099 | 70-220 | gi\|33140673 | 199-49 | 86% |
| Seq ID NO: 60099 | 89-264 | gi\|33139639 | 257-429 | 84% |
| Seq ID NO: 60155 | 1-67 | gi\|7144157 | 200-134 | 91% |
| Seq ID NO: 60155 | 1-67 | gi\|54549688 | 187-121 | 91% |
| Seq ID NO: 60206 | 46-72 | gi\|159473 | 61-35 | 100% |
| Seq ID NO: 60206 | 46-72 | gi\|2454547 | 200-226 | 100% |
| Seq ID NO: 60206 | 46-72 | gi\|551594 | 221-195 | 100% |
| Seq ID NO: 60206 | 46-72 | gi\|551595 | 696-670 | 100% |
| Seq ID NO: 60206 | 46-72 | gi\|18032254 | 61-35 | 100% |
| Seq ID NO: 60206 | 46-69 | gi\|18477256 | 256-279 | 100% |
| Seq ID NO: 60206 | 46-69 | gi\|18477260 | 302-325 | 100% |
| Seq ID NO: 60206 | 46-69 | gi\|18477262 | 611-634 | 100% |
| Seq ID NO: 60206 | 52-72 | gi\|18477259 | 1-21 | 100% |
| Seq ID NO: 60206 | 52-72 | gi\|18477261 | 1-21 | 100% |
| Seq ID NO: 60206 | 52-72 | gi\|37780968 | 1-21 | 100% |
| Seq ID NO: 60211 | 305-361 | gi\|18081798 | 206-262 | 91% |
| Seq ID NO: 60211 | 305-361 | gi\|54547765 | 204-260 | 89% |
| Seq ID NO: 60211 | 52-77 | gi\|9829211 | 55-80 | 100% |
| Seq ID NO: 60211 | 52-77 | gi\|21652727 | 26-51 | 100% |
| Seq ID NO: 60220 | 1-95 | gi\|33140348 | 161-255 | 96% |
| Seq ID NO: 60378 | 15-74 | gi\|28916076 | 1-60 | 93% |
| Seq ID NO: 60378 | 8-35 | gi\|159473 | 34-61 | 100% |
| Seq ID NO: 60378 | 8-35 | gi\|2454547 | 227-200 | 100% |
| Seq ID NO: 60378 | 8-35 | gi\|551594 | 194-221 | 100% |
| Seq ID NO: 60378 | 8-35 | gi\|551595 | 669-696 | 100% |
| Seq ID NO: 60378 | 8-35 | gi\|18032254 | 34-61 | 100% |
| Seq ID NO: 60378 | 12-35 | gi\|18477256 | 279-256 | 100% |
| Seq ID NO: 60378 | 12-35 | gi\|18477260 | 325-302 | 100% |
| Seq ID NO: 60378 | 12-35 | gi\|18477262 | 634-611 | 100% |
| Seq ID NO: 60378 | 8-29 | gi\|18477259 | 22-1 | 100% |
| Seq ID NO: 60378 | 8-29 | gi\|18477261 | 22-1 | 100% |
| Seq ID NO: 60378 | 8-29 | gi\|37780968 | 22-1 | 100% |
| Seq ID NO: 60409 | 273-620 | gi\|32324347 | 2-350 | 96% |
| Seq ID NO: 60409 | 680-806 | gi\|32324347 | 351-477 | 98% |
| Seq ID NO: 60409 | 680-784 | gi\|33139657 | 351-455 | 98% |
| Seq ID NO: 60409 | 289-615 | gi\|33140241 | 13-338 | 97% |
| Seq ID NO: 60409 | 677-806 | gi\|33140241 | 341-470 | 98% |
| Seq ID NO: 60409 | 272-619 | gi\|33139259 | 1-348 | 95% |
| Seq ID NO: 60409 | 278-620 | gi\|33139000 | 12-355 | 96% |
| Seq ID NO: 60409 | 272-615 | gi\|33139478 | 1-339 | 96% |
| Seq ID NO: 60409 | 268-620 | gi\|32324919 | 1-354 | 95% |
| Seq ID NO: 60409 | 273-609 | gi\|33139390 | 2-339 | 95% |
| Seq ID NO: 60409 | 391-620 | gi\|33140350 | 66-296 | 96% |
| Seq ID NO: 60409 | 273-337 | gi\|33140350 | 2-66 | 93% |
| Seq ID NO: 60409 | 498-615 | gi\|33139683 | 1-118 | 98% |
| Seq ID NO: 60495 | 1-88 | gi\|5107411 | 569-656 | 100% |
| Seq ID NO: 60495 | 1-88 | gi\|16797830 | 379-466 | 100% |
| Seq ID NO: 60495 | 1-88 | gi\|16797831 | 377-464 | 98% |
| Seq ID NO: 60495 | 1-88 | gi\|16797832 | 378-465 | 98% |
| Seq ID NO: 60495 | 1-88 | gi\|31442322 | 377-464 | 98% |
| Seq ID NO: 60495 | 5-88 | gi\|26000760 | 381-464 | 98% |
| Seq ID NO: 60495 | 1-88 | gi\|38096135 | 377-465 | 95% |
| Seq ID NO: 60495 | 12-86 | gi\|31442314 | 392-467 | 93% |
| Seq ID NO: 60495 | 4-86 | gi\|38096138 | 386-468 | 90% |
| Seq ID NO: 60495 | 3-86 | gi\|16797838 | 399-482 | 89% |
| Seq ID NO: 60532 | 243-263 | gi\|46986928 | 44-64 | 100% |
| Seq ID NO: 60533 | 237-257 | gi\|46986928 | 64-44 | 100% |
| Seq ID NO: 60534 | 122-248 | gi\|33139568 | 363-489 | 99% |
| Seq ID NO: 60534 | 1-75 | gi\|33139568 | 293-367 | 98% |
| Seq ID NO: 60596 | 1-99 | gi\|33139131 | 122-220 | 89% |
| Seq ID NO: 60596 | 29-92 | gi\|33140673 | 143-80 | 87% |
| Seq ID NO: 60782 | 367-405 | gi\|54547981 | 61-24 | 94% |
| Seq ID NO: 60782 | 792-812 | gi\|19435901 | 24-4 | 100% |
| Seq ID NO: 60783 | 218-256 | gi\|54547981 | 24-61 | 94% |
| Seq ID NO: 60788 | 36-165 | gi\|28916076 | 140-10 | 92% |
| Seq ID NO: 60644 | 26-217 | gi\|18080216 | 20-211 | 86% |
| Seq ID NO: 60947 | 1-85 | gi\|33140348 | 171-255 | 97% |
| Seq ID NO: 61051 | 73-95 | gi\|39746742 | 647-625 | 100% |
| Seq ID NO: 61179 | 139-160 | gi\|34316675 | 229-208 | 100% |
| Seq ID NO: 61217 | 76-324 | gi\|33139639 | 245-493 | 87% |
| Seq ID NO: 61217 | 71-219 | gi\|33140673 | 197-49 | 89% |
| Seq ID NO: 61217 | 115-219 | gi\|32324211 | 36-140 | 88% |
| Seq ID NO: 61303 | 36-174 | gi\|28916076 | 140-1 | 92% |
| Seq ID NO: 61303 | 154-181 | gi\|159473 | 61-34 | 100% |
| Seq ID NO: 61303 | 154-181 | gi\|2454547 | 200-227 | 100% |
| Seq ID NO: 61303 | 154-181 | gi\|551594 | 221-194 | 100% |
| Seq ID NO: 61303 | 154-181 | gi\|551595 | 696-669 | 100% |
| Seq ID NO: 61303 | 154-181 | gi\|18032254 | 61-34 | 100% |
| Seq ID NO: 61303 | 154-177 | gi\|18477256 | 256-279 | 100% |
| Seq ID NO: 61303 | 154-177 | gi\|18477260 | 302-325 | 100% |
| Seq ID NO: 61303 | 154-177 | gi\|18477262 | 611-634 | 100% |
| Seq ID NO: 61303 | 160-181 | gi\|18477259 | 1-22 | 100% |
| Seq ID NO: 61303 | 160-181 | gi\|18477261 | 1-22 | 100% |
| Seq ID NO: 61303 | 160-181 | gi\|37780968 | 1-22 | 100% |
| Seq ID NO: 61351 | 4-140 | gi\|18080057 | 229-93 | 85% |
| Seq ID NO: 61351 | 4-140 | gi\|54547707 | 233-97 | 84% |
| Seq ID NO: 61352 | 186-312 | gi\|18080057 | 303-429 | 90% |
| Seq ID NO: 61352 | 1-134 | gi\|18080057 | 159-292 | 88% |
| Seq ID NO: 61352 | 1-139 | gi\|54547707 | 163-300 | 88% |
| Seq ID NO: 61352 | 186-312 | gi\|54547707 | 307-433 | 89% |
| Seq ID NO: 61352 | 363-405 | gi\|54547707 | 443-485 | 90% |
| Seq ID NO: 61526 | 29-138 | gi\|28916076 | 9-119 | 91% |
| Seq ID NO: 61553 | 31-90 | gi\|51237572 | 280-339 | 86% |
| Seq ID NO: 46246 | 1-165 | gi\|33139608 | 404-567 | 98% |
| Seq ID NO: 46246 | 1-62 | gi\|32323997 | 404-464 | 98% |
| Seq ID NO: 61561 | 480-500 | gi\|54546754 | 60-40 | 100% |
| Seq ID NO: 61600 | 3-49 | gi\|32324211 | 94-140 | 93% |
| Seq ID NO: 61643 | 680-700 | gi\|23260226 | 280-260 | 100% |
| Seq ID NO: 61686 | 1-73 | gi\|16797830 | 749-821 | 100% |
| Seq ID NO: 61686 | 1-73 | gi\|16797832 | 747-819 | 100% |
| Seq ID NO: 61686 | 1-73 | gi\|26000759 | 745-817 | 100% |
| Seq ID NO: 61686 | 1-73 | gi\|31442320 | 746-818 | 100% |
| Seq ID NO: 61686 | 1-73 | gi\|31442322 | 746-818 | 98% |
| Seq ID NO: 61686 | 8-73 | gi\|21885259 | 776-841 | 98% |
| Seq ID NO: 61688 | 97-117 | gi\|52128725 | 61-81 | 100% |
| Seq ID NO: 61719 | 701-721 | gi\|32185118 | 164-144 | 100% |
| Seq ID NO: 61810 | 13-290 | gi\|33140136 | 39-317 | 85% |
| Seq ID NO: 61937 | 5-25 | gi\|19267937 | 180-160 | 100% |
| Seq ID NO: 61955 | 1-89 | gi\|33139270 | 471-383 | 100% |
| Seq ID NO: 61980 | 1-78 | gi\|33140673 | 126-49 | 92% |
| Seq ID NO: 61980 | 19-84 | gi\|33139131 | 185-250 | 92% |
| Seq ID NO: 61980 | 250-309 | gi\|33139639 | 521-580 | 91% |
| Seq ID NO: 46268 | 777-960 | gi\|33140770 | 55-237 | 99% |
| Seq ID NO: 46268 | 639-695 | gi\|33140770 | 1-57 | 98% |
| Seq ID NO: 62170 | 207-227 | gi\|46422740 | 369-349 | 100% |
| Seq ID NO: 62176 | 200-225 | gi\|30028086 | 358-383 | 100% |
| Seq ID NO: 62176 | 198-218 | gi\|16005270 | 477-497 | 100% |
| Seq ID NO: 46279 | 5-190 | gi\|35504456 | 365-180 | 96% |
| Seq ID NO: 46279 | 63-188 | gi\|7143616 | 133-258 | 91% |
| Seq ID NO: 46279 | 63-188 | gi\|18381740 | 382-507 | 91% |
| Seq ID NO: 46279 | 63-184 | gi\|18381740 | 131-252 | 91% |
| Seq ID NO: 46279 | 76-188 | gi\|18381923 | 603-491 | 92% |
| Seq ID NO: 46279 | 73-188 | gi\|21493480 | 425-310 | 85% |
| Seq ID NO: 62414 | 1-128 | gi\|32323987 | 182-309 | 100% |
| Seq ID NO: 62414 | 173-246 | gi\|32323987 | 309-382 | 100% |
| Seq ID NO: 62414 | 173-222 | gi\|33140527 | 311-360 | 98% |
| Seq ID NO: 62539 | 200-225 | gi\|54547695 | 79-104 | 96% |
| Seq ID NO: 62576 | 170-298 | gi\|33139556 | 85-213 | 94% |
| Seq ID NO: 62576 | 42-126 | gi\|33139556 | 1-85 | 98% |
| Seq ID NO: 46293 | 154-303 | gi\|18080373 | 337-486 | 91% |
| Seq ID NO: 62611 | 1-45 | gi\|33139645 | 197-241 | 97% |
| Seq ID NO: 62636 | 254-285 | gi\|18382597 | 630-661 | 96% |
| Seq ID NO: 46302 | 262-359 | gi\|18381117 | 806-709 | 92% |
| Seq ID NO: 46302 | 262-362 | gi\|7144103 | 148-248 | 91% |
| Seq ID NO: 46305 | 314-411 | gi\|54548221 | 329-232 | 88% |
| Seq ID NO: 62776 | 3-93 | gi\|33140348 | 248-158 | 89% |
| Seq ID NO: 62899 | 1-140 | gi\|32325217 | 127-267 | 96% |
| Seq ID NO: 62904 | 154-306 | gi\|18082113 | 218-370 | 89% |
| Seq ID NO: 62904 | 158-306 | gi\|54549200 | 528-380 | 87% |
| Seq ID NO: 62904 | 159-306 | gi\|54545591 | 457-310 | 87% |
| Seq ID NO: 62904 | 179-306 | gi\|7144024 | 503-377 | 87% |
| Seq ID NO: 62986 | 504-558 | gi\|32324842 | 158-212 | 92% |
| Seq ID NO: 63015 | 1-98 | gi\|32324253 | 114-17 | 94% |
| Seq ID NO: 63100 | 554-708 | gi\|32324459 | 81-235 | 95% |
| Seq ID NO: 63107 | 36-174 | gi\|28916076 | 140-1 | 92% |
| Seq ID NO: 63107 | 154-181 | gi\|159473 | 61-34 | 100% |
| Seq ID NO: 63107 | 154-181 | gi\|2454547 | 200-227 | 100% |
| Seq ID NO: 63107 | 154-181 | gi\|551594 | 221-194 | 100% |
| Seq ID NO: 63107 | 154-181 | gi\|551595 | 696-669 | 100% |
| Seq ID NO: 63107 | 154-181 | gi\|18032254 | 61-34 | 100% |
| Seq ID NO: 63107 | 154-177 | gi\|18477256 | 256-279 | 100% |
| Seq ID NO: 63107 | 154-177 | gi\|18477260 | 302-325 | 100% |
| Seq ID NO: 63107 | 154-177 | gi\|18477262 | 611-634 | 100% |
| Seq ID NO: 63107 | 160-181 | gi\|18477259 | 1-22 | 100% |
| Seq ID NO: 63107 | 160-181 | gi\|18477261 | 1-22 | 100% |
| Seq ID NO: 63107 | 160-181 | gi\|37780968 | 1-22 | 100% |
| Seq ID NO: 63189 | 13-47 | gi\|7143962 | 302-269 | 94% |
| Seq ID NO: 63384 | 576-772 | gi\|32325427 | 297-493 | 97% |
| Seq ID NO: 63384 | 217-381 | gi\|32325427 | 50-214 | 98% |
| Seq ID NO: 63384 | 428-514 | gi\|32325427 | 213-299 | 100% |
| Seq ID NO: 63384 | 110-159 | gi\|32325427 | 1-50 | 94% |
| Seq ID NO: 63384 | 629-772 | gi\|18089917 | 1-144 | 88% |
| Seq ID NO: 63450 | 15-54 | gi\|28916076 | 1-40 | 97% |
| Seq ID NO: 63450 | 8-35 | gi\|159473 | 34-61 | 100% |
| Seq ID NO: 63450 | 8-35 | gi\|2454547 | 227-200 | 100% |
| Seq ID NO: 63450 | 8-35 | gi\|551594 | 194-221 | 100% |
| Seq ID NO: 63450 | 8-35 | gi\|551595 | 669-696 | 100% |
| Seq ID NO: 63450 | 8-35 | gi\|18032254 | 34-61 | 100% |
| Seq ID NO: 63450 | 12-35 | gi\|18477256 | 279-256 | 100% |
| Seq ID NO: 63450 | 12-35 | gi\|18477260 | 325-302 | 100% |
| Seq ID NO: 63450 | 12-35 | gi\|18477262 | 634-611 | 100% |
| Seq ID NO: 63450 | 8-29 | gi\|18477259 | 22-1 | 100% |
| Seq ID NO: 63450 | 8-29 | gi\|18477261 | 22-1 | 100% |
| Seq ID NO: 63450 | 8-29 | gi\|37780968 | 22-1 | 100% |
| Seq ID NO: 63508 | 16-41 | gi\|30166029 | 39-64 | 96% |
| Seq ID NO: 63529 | 4-111 | gi\|33140348 | 148-255 | 93% |
| Seq ID NO: 46344 | 3-176 | gi\|54548367 | 26-199 | 85% |
| Seq ID NO: 46344 | 461-533 | gi\|54548367 | 299-371 | 90% |
| Seq ID NO: 63626 | 1-138 | gi\|18090776 | 20-157 | 88% |
| Seq ID NO: 46358 | 286-423 | gi\|7144085 | 453-591 | 91% |
| Seq ID NO: 63905 | 1-73 | gi\|16797830 | 749-821 | 100% |
| Seq ID NO: 63905 | 1-73 | gi\|16797832 | 747-819 | 100% |
| Seq ID NO: 63905 | 1-73 | gi\|26000759 | 745-817 | 100% |
| Seq ID NO: 63905 | 1-73 | gi\|31442320 | 746-818 | 100% |
| Seq ID NO: 63905 | 1-73 | gi\|31442322 | 746-818 | 98% |
| Seq ID NO: 63905 | 8-73 | gi\|21885259 | 776-841 | 98% |
| Seq ID NO: 63930 | 36-103 | gi\|18080500 | 393-460 | 86% |
| Seq ID NO: 64030 | 21-138 | gi\|28916076 | 1-119 | 91% |
| Seq ID NO: 64030 | 14-41 | gi\|159473 | 34-61 | 100% |
| Seq ID NO: 64030 | 14-41 | gi\|2454547 | 227-200 | 100% |
| Seq ID NO: 64030 | 14-41 | gi\|551594 | 194-221 | 100% |
| Seq ID NO: 64030 | 14-41 | gi\|551595 | 669-696 | 100% |
| Seq ID NO: 64030 | 14-41 | gi\|18032254 | 34-61 | 100% |
| Seq ID NO: 64030 | 18-41 | gi\|18477256 | 279-256 | 100% |
| Seq ID NO: 64030 | 18-41 | gi\|18477260 | 325-302 | 100% |
| Seq ID NO: 64030 | 18-41 | gi\|18477262 | 634-611 | 100% |
| Seq ID NO: 64030 | 14-35 | gi\|18477259 | 22-1 | 100% |
| Seq ID NO: 64030 | 14-35 | gi\|18477261 | 22-1 | 100% |
| Seq ID NO: 64030 | 14-35 | gi\|37780968 | 22-1 | 100% |
| Seq ID NO: 64057 | 318-354 | gi\|33139730 | 82-119 | 97% |
| Seq ID NO: 64082 | 276-364 | gi\|32325034 | 20-108 | 96% |
| Seq ID NO: 64082 | 74-140 | gi\|32324889 | 134-68 | 100% |
| Seq ID NO: 64082 | 325-364 | gi\|33139589 | 1-40 | 97% |
| Seq ID NO: 64082 | 74-147 | gi\|21393259 | 27-100 | 85% |
| Seq ID NO: 64082 | 74-147 | gi\|20498904 | 25-98 | 85% |
| Seq ID NO: 64106 | 2-35 | gi\|20064584 | 1-34 | 97% |
| Seq ID NO: 64146 | 339-442 | gi\|33140237 | 332-229 | 100% |
| Seq ID NO: 64146 | 21-109 | gi\|33140237 | 419-331 | 97% |
| Seq ID NO: 64146 | 452-518 | gi\|33140237 | 219-153 | 98% |
| Seq ID NO: 64146 | 580-617 | gi\|33140237 | 151-114 | 100% |
| Seq ID NO: 64148 | 457-691 | gi\|32325211 | 200-434 | 98% |
| Seq ID NO: 64148 | 302-406 | gi\|32325211 | 96-200 | 96% |
| Seq ID NO: 64148 | 145-221 | gi\|32325211 | 24-99 | 96% |
| Seq ID NO: 64148 | 735-788 | gi\|32325211 | 434-487 | 100% |
| Seq ID NO: 64148 | 897-948 | gi\|32325211 | 540-591 | 100% |
| Seq ID NO: 64148 | 798-842 | gi\|32325211 | 497-541 | 100% |
| Seq ID NO: 64148 | 75-101 | gi\|32325211 | 1-27 | 100% |
| Seq ID NO: 64148 | 897-1003 | gi\|32324168 | 477-583 | 99% |
| Seq ID NO: 64148 | 186-221 | gi\|32324168 | 1-36 | 97% |
| Seq ID NO: 64148 | 457-684 | gi\|33139272 | 319-546 | 98% |
| Seq ID NO: 64148 | 1-101 | gi\|33139272 | 46-146 | 99% |
| Seq ID NO: 64148 | 897-996 | gi\|33139975 | 485-584 | 99% |
| Seq ID NO: 64148 | 178-221 | gi\|33139975 | 1-44 | 97% |
| Seq ID NO: 64181 | 21-138 | gi\|28916076 | 1-119 | 91% |
| Seq ID NO: 64181 | 14-41 | gi\|159473 | 34-61 | 100% |
| Seq ID NO: 64181 | 14-41 | gi\|2454547 | 227-200 | 100% |
| Seq ID NO: 64181 | 14-41 | gi\|551594 | 194-221 | 100% |
| Seq ID NO: 64181 | 14-41 | gi\|551595 | 669-696 | 100% |
| Seq ID NO: 64181 | 14-41 | gi\|18032254 | 34-61 | 100% |
| Seq ID NO: 64181 | 18-41 | gi\|18477256 | 279-256 | 100% |
| Seq ID NO: 64181 | 18-41 | gi\|18477260 | 325-302 | 100% |
| Seq ID NO: 64181 | 18-41 | gi\|18477262 | 634-611 | 100% |
| Seq ID NO: 64181 | 14-35 | gi\|18477259 | 22-1 | 100% |
| Seq ID NO: 64181 | 14-35 | gi\|18477261 | 22-1 | 100% |
| Seq ID NO: 64181 | 14-35 | gi\|37780968 | 22-1 | 100% |
| Seq ID NO: 64254 | 169-189 | gi\|18083118 | 116-136 | 100% |
| Seq ID NO: 64254 | 169-189 | gi\|18382418 | 749-769 | 100% |
| Seq ID NO: 64268 | 399-518 | gi\|54546846 | 257-382 | 82% |
| Seq ID NO: 64305 | 240-260 | gi\|24467850 | 41-21 | 100% |
| Seq ID NO: 64309 | 148-249 | gi\|18088868 | 401-300 | 90% |
| Seq ID NO: 46394 | 286-347 | gi\|46987704 | 361-300 | 85% |
| Seq ID NO: 64348 | 295-324 | gi\|7922575 | 190-218 | 96% |
| Seq ID NO: 64377 | 645-702 | gi\|54544818 | 520-577 | 91% |
| Seq ID NO: 64390 | 83-126 | gi\|551594 | 1028-1070 | 93% |
| Seq ID NO: 64390 | 83-126 | gi\|551595 | 267-309 | 93% |
| Seq ID NO: 64477 | 21-138 | gi\|28916076 | 1-119 | 91% |
| Seq ID NO: 64477 | 14-41 | gi\|159473 | 34-61 | 100% |
| Seq ID NO: 64477 | 14-41 | gi\|2454547 | 227-200 | 100% |
| Seq ID NO: 64477 | 14-41 | gi\|551594 | 194-221 | 100% |
| Seq ID NO: 64477 | 14-41 | gi\|551595 | 669-696 | 100% |
| Seq ID NO: 64477 | 14-41 | gi\|18032254 | 34-61 | 100% |
| Seq ID NO: 64477 | 18-41 | gi\|18477256 | 279-256 | 100% |
| Seq ID NO: 64477 | 18-41 | gi\|18477260 | 325-302 | 100% |
| Seq ID NO: 64477 | 18-41 | gi\|18477262 | 634-611 | 100% |
| Seq ID NO: 64477 | 14-35 | gi\|18477259 | 22-1 | 100% |
| Seq ID NO: 64477 | 14-35 | gi\|18477261 | 22-1 | 100% |
| Seq ID NO: 64477 | 14-35 | gi\|37780968 | 22-1 | 100% |
| Seq ID NO: 64508 | 27-157 | gi\|32324692 | 9-139 | 97% |
| Seq ID NO: 64514 | 52-204 | gi\|32324211 | 369-521 | 85% |
| Seq ID NO: 64570 | 21-138 | gi\|28916076 | 1-119 | 91% |
| Seq ID NO: 64570 | 14-41 | gi\|159473 | 34-61 | 100% |
| Seq ID NO: 64570 | 14-41 | gi\|2454547 | 227-200 | 100% |
| Seq ID NO: 64570 | 14-41 | gi\|551594 | 194-221 | 100% |
| Seq ID NO: 64570 | 14-41 | gi\|551595 | 669-696 | 100% |
| Seq ID NO: 64570 | 14-41 | gi\|18032254 | 34-61 | 100% |
| Seq ID NO: 64570 | 18-41 | gi\|18477256 | 279-256 | 100% |
| Seq ID NO: 64570 | 18-41 | gi\|18477260 | 325-302 | 100% |
| Seq ID NO: 64570 | 18-41 | gi\|18477262 | 634-611 | 100% |
| Seq ID NO: 64570 | 14-35 | gi\|18477259 | 22-1 | 100% |
| Seq ID NO: 64570 | 14-35 | gi\|18477261 | 22-1 | 100% |
| Seq ID NO: 64570 | 14-35 | gi\|37780968 | 22-1 | 100% |
| Seq ID NO: 64580 | 33-147 | gi\|32325191 | 1-115 | 92% |
| Seq ID NO: 64633 | 2-114 | gi\|33140530 | 1-113 | 100% |
| Seq ID NO: 64669 | 300-320 | gi\|52129537 | 617-637 | 100% |
| Seq ID NO: 64692 | 1-57 | gi\|30028941 | 55-111 | 98% |
| Seq ID NO: 64692 | 1-57 | gi\|33140204 | 55-111 | 98% |
| Seq ID NO: 64694 | 95-147 | gi\|30028941 | 402-454 | 100% |
| Seq ID NO: 64694 | 1-43 | gi\|30028941 | 308-350 | 100% |
| Seq ID NO: 64694 | 95-146 | gi\|30029072 | 395-446 | 100% |
| Seq ID NO: 64694 | 95-146 | gi\|33140204 | 402-453 | 100% |
| Seq ID NO: 64694 | 1-43 | gi\|33140204 | 308-350 | 100% |
| Seq ID NO: 64711 | 1-93 | gi\|33139524 | 233-141 | 98% |
| Seq ID NO: 64760 | 19-144 | gi\|54546846 | 257-383 | 84% |
| Seq ID NO: 64762 | 174-194 | gi\|9829276 | 404-424 | 100% |
| Seq ID NO: 64762 | 174-194 | gi\|39747004 | 520-540 | 100% |
| Seq ID NO: 64780 | 1-118 | gi\|33140548 | 49-166 | 95% |
| Seq ID NO: 64780 | 151-225 | gi\|33140548 | 199-273 | 100% |
| Seq ID NO: 64797 | 33-77 | gi\|54549640 | 11-55 | 93% |
| Seq ID NO: 64847 | 42-190 | gi\|33140348 | 108-255 | 92% |
| Seq ID NO: 64847 | 1-70 | gi\|33140348 | 105-174 | 92% |
| Seq ID NO: 64847 | 1-28 | gi\|32324498 | 17-44 | 96% |
| Seq ID NO: 64862 | 7-144 | gi\|7144222 | 169-306 | 92% |
| Seq ID NO: 64862 | 7-144 | gi\|54547280 | 139-276 | 92% |
| Seq ID NO: 64862 | 32-149 | gi\|51334182 | 168-285 | 88% |
| Seq ID NO: 64862 | 27-146 | gi\|21494008 | 204-323 | 86% |
| Seq ID NO: 64874 | 205-293 | gi\|18082074 | 129-217 | 83% |
| Seq ID NO: 64931 | 21-41 | gi\|46984838 | 273-293 | 100% |
| Seq ID NO: 64935 | 1-84 | gi\|16797830 | 749-832 | 98% |
| Seq ID NO: 64935 | 1-84 | gi\|16797832 | 747-830 | 98% |
| Seq ID NO: 64935 | 1-84 | gi\|26000759 | 745-828 | 98% |
| Seq ID NO: 64935 | 1-84 | gi\|31442320 | 746-829 | 98% |
| Seq ID NO: 64935 | 1-84 | gi\|31442322 | 746-829 | 97% |
| Seq ID NO: 64935 | 1-77 | gi\|16797831 | 747-823 | 98% |
| Seq ID NO: 64935 | 8-84 | gi\|21885259 | 776-852 | 97% |
| Seq ID NO: 65078 | 15-54 | gi\|28916076 | 1-40 | 97% |
| Seq ID NO: 65084 | 1-166 | gi\|35504916 | 448-612 | 94% |
| Seq ID NO: 65084 | 1-85 | gi\|35504725 | 448-533 | 94% |
| Seq ID NO: 65205 | 338-610 | gi\|33140653 | 131-403 | 100% |
| Seq ID NO: 65205 | 160-291 | gi\|33140653 | 1-132 | 97% |
| Seq ID NO: 65205 | 663-717 | gi\|33140653 | 401-455 | 100% |
| Seq ID NO: 65205 | 725-746 | gi\|33140653 | 463-484 | 100% |
| Seq ID NO: 65205 | 338-462 | gi\|32325169 | 130-254 | 100% |
| Seq ID NO: 65205 | 161-291 | gi\|32325169 | 1-131 | 97% |
| Seq ID NO: 65205 | 500-610 | gi\|32325169 | 254-364 | 100% |
| Seq ID NO: 65205 | 162-291 | gi\|33139964 | 1-130 | 98% |
| Seq ID NO: 65261 | 1-243 | gi\|33140806 | 9-255 | 95% |
| Seq ID NO: 65261 | 62-234 | gi\|33139704 | 24-199 | 95% |
| Seq ID NO: 46445 | 556-665 | gi\|33139443 | 1-111 | 95% |
| Seq ID NO: 65328 | 1-145 | gi\|18090481 | 97-241 | 85% |
| Seq ID NO: 46452 | 1-163 | gi\|7143710 | 57-220 | 89% |
| Seq ID NO: 46452 | 1-171 | gi\|54549870 | 42-213 | 89% |
| Seq ID NO: 46452 | 16-163 | gi\|18089601 | 5-153 | 90% |
| Seq ID NO: 46452 | 29-163 | gi\|54547929 | 1-136 | 90% |
| Seq ID NO: 46452 | 1-171 | gi\|51237630 | 23-194 | 85% |
| Seq ID NO: 65377 | 274-524 | gi\|33140174 | 121-371 | 98% |
| Seq ID NO: 65377 | 109-229 | gi\|33140174 | 1-121 | 99% |
| Seq ID NO: 65377 | 578-680 | gi\|33140174 | 372-474 | 100% |
| Seq ID NO: 65377 | 274-527 | gi\|32324003 | 302-555 | 98% |
| Seq ID NO: 65377 | 1-229 | gi\|32324003 | 74-302 | 97% |
| Seq ID NO: 65377 | 579-621 | gi\|32324003 | 554-596 | 97% |
| Seq ID NO: 65377 | 42-229 | gi\|32324933 | 13-200 | 97% |
| Seq ID NO: 65377 | 579-680 | gi\|32324933 | 452-553 | 99% |
| Seq ID NO: 65397 | 90-152 | gi\|18081066 | 414-476 | 90% |
| Seq ID NO: 65474 | 2-53 | gi\|28916076 | 52-1 | 94% |
| Seq ID NO: 65474 | 33-59 | gi\|159473 | 61-35 | 100% |
| Seq ID NO: 65474 | 33-59 | gi\|2454547 | 200-226 | 100% |
| Seq ID NO: 65474 | 33-59 | gi\|551594 | 221-195 | 100% |
| Seq ID NO: 65474 | 33-59 | gi\|551595 | 696-670 | 100% |
| Seq ID NO: 65474 | 33-59 | gi\|18032254 | 61-35 | 100% |
| Seq ID NO: 65474 | 33-56 | gi\|18477256 | 256-279 | 100% |
| Seq ID NO: 65474 | 33-56 | gi\|18477260 | 302-325 | 100% |
| Seq ID NO: 65474 | 33-56 | gi\|18477262 | 611-634 | 100% |
| Seq ID NO: 65474 | 39-59 | gi\|18477259 | 1-21 | 100% |
| Seq ID NO: 65474 | 39-59 | gi\|18477261 | 1-21 | 100% |
| Seq ID NO: 65474 | 39-59 | gi\|37780968 | 1-21 | 100% |
| Seq ID NO: 65553 | 1-63 | gi\|33140188 | 109-171 | 98% |
| Seq ID NO: 65553 | 2-50 | gi\|33140188 | 305-353 | 90% |
| Seq ID NO: 65558 | 14-173 | gi\|18383267 | 801-960 | 86% |
| Seq ID NO: 65560 | 480-623 | gi\|35504861 | 212-70 | 97% |
| Seq ID NO: 65572 | 411-582 | gi\|33139585 | 153-324 | 94% |
| Seq ID NO: 65572 | 135-258 | gi\|33139585 | 1-124 | 96% |
| Seq ID NO: 65591 | 217-309 | gi\|32324909 | 25-117 | 93% |
| Seq ID NO: 46459 | 203-386 | gi\|18081711 | 111-294 | 86% |
| Seq ID NO: 46459 | 1-35 | gi\|54549088 | 64-98 | 94% |
| Seq ID NO: 46459 | 14-35 | gi\|54549319 | 1-22 | 100% |
| Seq ID NO: 65643 | 1-194 | gi\|33140010 | 238-431 | 96% |
| Seq ID NO: 65643 | 121-194 | gi\|33139314 | 1-74 | 97% |
| Seq ID NO: 46465 | 159-238 | gi\|9829340 | 394-315 | 87% |
| Seq ID NO: 65738 | 166-205 | gi\|33140813 | 1-40 | 95% |
| Seq ID NO: 65755 | 83-126 | gi\|551594 | 1028-1070 | 93% |
| Seq ID NO: 65755 | 83-126 | gi\|551595 | 267-309 | 93% |
| Seq ID NO: 65813 | 1-121 | gi\|28916076 | 122-1 | 91% |
| Seq ID NO: 65813 | 101-126 | gi\|159473 | 61-36 | 100% |
| Seq ID NO: 65813 | 101-126 | gi\|2454547 | 200-225 | 100% |
| Seq ID NO: 65813 | 101-126 | gi\|551594 | 221-196 | 100% |
| Seq ID NO: 65813 | 101-126 | gi\|551595 | 696-671 | 100% |
| Seq ID NO: 65813 | 101-126 | gi\|18032254 | 61-36 | 100% |
| Seq ID NO: 65813 | 101-124 | gi\|18477256 | 256-279 | 100% |
| Seq ID NO: 65813 | 101-124 | gi\|18477260 | 302-325 | 100% |
| Seq ID NO: 65813 | 101-124 | gi\|18477262 | 611-634 | 100% |
| Seq ID NO: 65831 | 80-203 | gi\|33140348 | 128-252 | 92% |
| Seq ID NO: 65932 | 77-335 | gi\|33139639 | 245-503 | 87% |
| Seq ID NO: 65932 | 70-225 | gi\|33140673 | 199-44 | 88% |
| Seq ID NO: 65932 | 245-349 | gi\|32324211 | 165-269 | 86% |
| Seq ID NO: 65932 | 293-327 | gi\|33139131 | 293-327 | 94% |
| Seq ID NO: 65966 | 1-215 | gi\|33140309 | 306-520 | 97% |
| Seq ID NO: 66029 | 1-143 | gi\|16797830 | 62-204 | 98% |
| Seq ID NO: 66029 | 1-143 | gi\|16797831 | 62-202 | 97% |
| Seq ID NO: 66029 | 1-143 | gi\|16797832 | 63-203 | 97% |
| Seq ID NO: 66029 | 1-143 | gi\|26000759 | 62-202 | 96% |
| Seq ID NO: 66029 | 1-142 | gi\|26000762 | 62-201 | 95% |
| Seq ID NO: 66029 | 1-143 | gi\|31442322 | 62-202 | 95% |
| Seq ID NO: 66029 | 1-143 | gi\|38096133 | 62-202 | 93% |
| Seq ID NO: 46479 | 143-293 | gi\|18090185 | 96-246 | 90% |
| Seq ID NO: 46479 | 412-474 | gi\|18090185 | 320-382 | 92% |
| Seq ID NO: 66115 | 83-126 | gi\|551594 | 1028-1070 | 93% |
| Seq ID NO: 66115 | 83-126 | gi\|551595 | 267-309 | 93% |
| Seq ID NO: 66138 | 21-168 | gi\|54546322 | 121-268 | 87% |
| Seq ID NO: 66223 | 311-331 | gi\|32184515 | 225-245 | 100% |
| Seq ID NO: 66245 | 118-139 | gi\|54544778 | 203-224 | 100% |
| Seq ID NO: 46493 | 113-266 | gi\|33139869 | 326-476 | 92% |
| Seq ID NO: 46493 | 115-269 | gi\|18080529 | 142-293 | 90% |
| Seq ID NO: 46493 | 113-240 | gi\|32325143 | 467-591 | 91% |
| Seq ID NO: 46493 | 113-229 | gi\|33139507 | 467-580 | 92% |
| Seq ID NO: 46493 | 113-236 | gi\|33139658 | 467-587 | 91% |
| Seq ID NO: 46493 | 113-217 | gi\|33139078 | 467-568 | 91% |
| Seq ID NO: 46493 | 171-286 | gi\|7143888 | 280-392 | 89% |
| Seq ID NO: 46493 | 113-216 | gi\|33140145 | 467-567 | 91% |
| Seq ID NO: 46493 | 186-269 | gi\|18080754 | 174-257 | 92% |
| Seq ID NO: 46493 | 144-269 | gi\|52129866 | 585-708 | 86% |
| Seq ID NO: 46493 | 192-286 | gi\|18080844 | 1-95 | 89% |
| Seq ID NO: 46493 | 144-254 | gi\|52129769 | 700-808 | 87% |
| Seq ID NO: 46493 | 113-190 | gi\|32324728 | 467-544 | 92% |
| Seq ID NO: 46493 | 113-204 | gi\|33140539 | 467-555 | 90% |
| Seq ID NO: 46493 | 118-239 | gi\|19264211 | 454-572 | 82% |
| Seq ID NO: 46493 | 211-245 | gi\|22140574 | 144-178 | 97% |
| Seq ID NO: 46493 | 220-254 | gi\|52129262 | 3-37 | 94% |
| Seq ID NO: 46493 | 113-182 | gi\|15784199 | 440-509 | 84% |
| Seq ID NO: 46493 | 113-148 | gi\|15785306 | 458-492 | 91% |
| Seq ID NO: 66327 | 1-81 | gi\|35504440 | 192-272 | 95% |
| Seq ID NO: 66372 | 317-509 | gi\|54546686 | 284-476 | 85% |
| Seq ID NO: 66372 | 454-509 | gi\|33139916 | 1-56 | 100% |
| Seq ID NO: 66454 | 23-43 | gi\|21285223 | 168-148 | 100% |
| Seq ID NO: 66513 | 28-80 | gi\|54545135 | 100-152 | 96% |
| Seq ID NO: 66513 | 154-198 | gi\|54549414 | 410-454 | 93% |
| Seq ID NO: 66513 | 38-80 | gi\|54548968 | 1-43 | 95% |
| Seq ID NO: 66611 | 1-107 | gi\|33140780 | 433-539 | 98% |
| Seq ID NO: 46522 | 1-101 | gi\|18382566 | 65-165 | 89% |
| Seq ID NO: 46522 | 6-101 | gi\|18089815 | 1-96 | 88% |
| Seq ID NO: 46522 | 64-98 | gi\|21493534 | 40-74 | 91% |
| Seq ID NO: 66645 | 80-246 | gi\|32324211 | 1-167 | 86% |
| Seq ID NO: 66645 | 69-219 | gi\|33140673 | 199-49 | 83% |
| Seq ID NO: 66645 | 87-219 | gi\|33139639 | 256-388 | 83% |
| Seq ID NO: 66691 | 1-141 | gi\|16797830 | 62-202 | 98% |
| Seq ID NO: 66691 | 1-141 | gi\|16797831 | 62-200 | 97% |
| Seq ID NO: 66691 | 1-141 | gi\|16797832 | 63-201 | 97% |
| Seq ID NO: 66691 | 1-141 | gi\|26000759 | 62-200 | 96% |
| Seq ID NO: 66691 | 1-141 | gi\|31442322 | 62-200 | 95% |
| Seq ID NO: 66691 | 1-141 | gi\|38096133 | 62-200 | 93% |
| Seq ID NO: 66692 | 1-160 | gi\|5107411 | 189-30 | 100% |
| Seq ID NO: 66692 | 1-160 | gi\|2149587 | 189-30 | 95% |
| Seq ID NO: 66692 | 47-160 | gi\|34105813 | 1719-1606 | 100% |
| Seq ID NO: 66692 | 1-160 | gi\|2149585 | 189-30 | 92% |
| Seq ID NO: 66692 | 1-160 | gi\|2738785 | 190-30 | 92% |
| Seq ID NO: 66692 | 1-160 | gi\|2738792 | 190-30 | 92% |
| Seq ID NO: 66692 | 1-160 | gi\|2738799 | 190-30 | 92% |
| Seq ID NO: 66692 | 1-160 | gi\|2738800 | 190-30 | 92% |
| Seq ID NO: 66692 | 2-160 | gi\|2707748 | 1766-1607 | 90% |
| Seq ID NO: 66692 | 1-80 | gi\|48479719 | 191-112 | 98% |
| Seq ID NO: 66692 | 1-80 | gi\|37674501 | 194-115 | 98% |
| Seq ID NO: 66692 | 115-160 | gi\|37674501 | 75-30 | 95% |
| Seq ID NO: 66692 | 1-78 | gi\|1147729 | 2525-2448 | 98% |
| Seq ID NO: 66692 | 115-160 | gi\|1147729 | 2413-2368 | 97% |
| Seq ID NO: 66692 | 1-78 | gi\|2232021 | 87-10 | 98% |
| Seq ID NO: 66718 | 182-203 | gi\|15766531 | 77-56 | 100% |
| Seq ID NO: 66870 | 256-452 | gi\|18381486 | 666-469 | 84% |
| Seq ID NO: 66870 | 407-452 | gi\|18381486 | 257-212 | 95% |
| Seq ID NO: 67072 | 1-90 | gi\|33139333 | 250-161 | 96% |
| Seq ID NO: 46553 | 13-97 | gi\|54546152 | 237-321 | 94% |
| Seq ID NO: 67199 | 23-130 | gi\|18089328 | 199-92 | 87% |
| Seq ID NO: 46562 | 169-329 | gi\|18081141 | 23-183 | 90% |
| Seq ID NO: 67282 | 129-150 | gi\|45563616 | 32-53 | 100% |
| Seq ID NO: 67295 | 19-157 | gi\|54546846 | 257-396 | 85% |
| Seq ID NO: 46571 | 9-99 | gi\|18082482 | 10-100 | 92% |
| Seq ID NO: 67414 | 1-211 | gi\|35505285 | 2-212 | 99% |
| Seq ID NO: 67414 | 251-397 | gi\|35505285 | 211-357 | 99% |
| Seq ID NO: 67414 | 446-535 | gi\|35505285 | 357-446 | 87% |
| Seq ID NO: 67414 | 152-211 | gi\|7144110 | 176-235 | 91% |
| Seq ID NO: 67465 | 21-138 | gi\|28916076 | 1-119 | 91% |
| Seq ID NO: 67465 | 14-41 | gi\|159473 | 34-61 | 100% |
| Seq ID NO: 67465 | 14-41 | gi\|2454547 | 227-200 | 100% |
| Seq ID NO: 67465 | 14-41 | gi\|551594 | 194-221 | 100% |
| Seq ID NO: 67465 | 14-41 | gi\|551595 | 669-696 | 100% |
| Seq ID NO: 67465 | 14-41 | gi\|18032254 | 34-61 | 100% |
| Seq ID NO: 67465 | 18-41 | gi\|18477256 | 279-256 | 100% |
| Seq ID NO: 67465 | 18-41 | gi\|18477260 | 325-302 | 100% |
| Seq ID NO: 67465 | 18-41 | gi\|18477262 | 634-611 | 100% |
| Seq ID NO: 67465 | 14-35 | gi\|18477259 | 22-1 | 100% |
| Seq ID NO: 67465 | 14-35 | gi\|18477261 | 22-1 | 100% |
| Seq ID NO: 67465 | 14-35 | gi\|37780968 | 22-1 | 100% |
| Seq ID NO: 67477 | 36-173 | gi\|28916076 | 140-1 | 90% |
| Seq ID NO: 67477 | 157-180 | gi\|159473 | 57-34 | 100% |
| Seq ID NO: 67477 | 157-180 | gi\|2454547 | 204-227 | 100% |
| Seq ID NO: 67477 | 157-180 | gi\|551594 | 217-194 | 100% |
| Seq ID NO: 67477 | 157-180 | gi\|551595 | 692-669 | 100% |
| Seq ID NO: 67477 | 157-180 | gi\|18032254 | 57-34 | 100% |
| Seq ID NO: 67477 | 159-180 | gi\|18477259 | 1-22 | 100% |
| Seq ID NO: 67477 | 159-180 | gi\|18477261 | 1-22 | 100% |
| Seq ID NO: 67477 | 159-180 | gi\|37780968 | 1-22 | 100% |
| Seq ID NO: 67682 | 1-101 | gi\|7144157 | 39-139 | 97% |
| Seq ID NO: 67682 | 1-101 | gi\|54549688 | 26-126 | 96% |
| Seq ID NO: 67682 | 22-101 | gi\|18083086 | 614-535 | 96% |
| Seq ID NO: 67682 | 25-101 | gi\|18090403 | 1-77 | 96% |
| Seq ID NO: 67682 | 54-75 | gi\|52129301 | 340-319 | 100% |
| Seq ID NO: 67725 | 80-268 | gi\|33139635 | 1-188 | 96% |
| Seq ID NO: 67725 | 324-389 | gi\|33139635 | 188-253 | 98% |
| Seq ID NO: 67725 | 81-268 | gi\|32325323 | 1-188 | 93% |
| Seq ID NO: 67762 | 5-150 | gi\|18081743 | 87-232 | 83% |
| Seq ID NO: 67856 | 66-470 | gi\|33140136 | 92-496 | 90% |
| Seq ID NO: 67953 | 1-45 | gi\|33139122 | 150-194 | 97% |
| Seq ID NO: 67954 | 469-489 | gi\|19384388 | 444-464 | 100% |
| Seq ID NO: 67956 | 88-241 | gi\|32324211 | 1-154 | 89% |
| Seq ID NO: 67956 | 82-233 | gi\|33139131 | 99-250 | 86% |
| Seq ID NO: 67956 | 312-349 | gi\|33139131 | 293-330 | 94% |
| Seq ID NO: 67956 | 77-227 | gi\|33140673 | 199-49 | 86% |
| Seq ID NO: 67956 | 95-227 | gi\|33139639 | 256-388 | 85% |
| Seq ID NO: 67994 | 273-323 | gi\|33139445 | 12-62 | 96% |
| Seq ID NO: 67996 | 1-157 | gi\|32325279 | 266-422 | 98% |
| Seq ID NO: 68073 | 21-187 | gi\|7619738 | 1078-1244 | 88% |
| Seq ID NO: 68073 | 119-200 | gi\|33139362 | 1-82 | 100% |
| Seq ID NO: 68073 | 12-164 | gi\|1235973 | 712-864 | 88% |
| Seq ID NO: 68073 | 12-164 | gi\|54547532 | 371-523 | 87% |
| Seq ID NO: 68073 | 82-164 | gi\|54549430 | 381-463 | 91% |
| Seq ID NO: 68073 | 92-114 | gi\|6382623 | 174-152 | 100% |
| Seq ID NO: 68073 | 92-114 | gi\|23259469 | 284-306 | 100% |
| Seq ID NO: 68317 | 36-174 | gi\|28916076 | 140-1 | 90% |
| Seq ID NO: 68317 | 161-181 | gi\|551595 | 689-669 | 100% |
| Seq ID NO: 68317 | 161-181 | gi\|30168621 | 52-32 | 100% |
| Seq ID NO: 46608 | 1-166 | gi\|18081390 | 329-164 | 87% |
| Seq ID NO: 46608 | 1-166 | gi\|54545329 | 221-386 | 86% |
| Seq ID NO: 46608 | 15-116 | gi\|21056382 | 128-229 | 85% |
| Seq ID NO: 68351 | 4-128 | gi\|18083059 | 281-405 | 85% |
| Seq ID NO: 68370 | 4-68 | gi\|33140590 | 143-79 | 98% |
| Seq ID NO: 68423 | 15-54 | gi\|28916076 | 1-40 | 97% |
| Seq ID NO: 68423 | 8-35 | gi\|159473 | 34-61 | 100% |
| Seq ID NO: 68423 | 8-35 | gi\|2454547 | 227-200 | 100% |
| Seq ID NO: 68423 | 8-35 | gi\|551594 | 194-221 | 100% |
| Seq ID NO: 68423 | 8-35 | gi\|551595 | 669-696 | 100% |
| Seq ID NO: 68423 | 8-35 | gi\|18032254 | 34-61 | 100% |
| Seq ID NO: 68423 | 12-35 | gi\|18477256 | 279-256 | 100% |
| Seq ID NO: 68423 | 12-35 | gi\|18477260 | 325-302 | 100% |
| Seq ID NO: 68423 | 12-35 | gi\|18477262 | 634-611 | 100% |
| Seq ID NO: 68423 | 8-29 | gi\|18477259 | 22-1 | 100% |
| Seq ID NO: 68423 | 8-29 | gi\|18477261 | 22-1 | 100% |
| Seq ID NO: 68423 | 8-29 | gi\|37780968 | 22-1 | 100% |
| Seq ID NO: 68429 | 22-42 | gi\|28916076 | 280-260 | 100% |
| Seq ID NO: 68464 | 546-566 | gi\|46985670 | 328-348 | 100% |
| Seq ID NO: 68514 | 1-59 | gi\|32324676 | 60-118 | 96% |
| Seq ID NO: 68541 | 305-325 | gi\|19103835 | 404-424 | 100% |
| Seq ID NO: 68615 | 21-138 | gi\|28916076 | 1-119 | 91% |
| Seq ID NO: 68615 | 14-41 | gi\|159473 | 34-61 | 100% |
| Seq ID NO: 68615 | 14-41 | gi\|2454547 | 227-200 | 100% |
| Seq ID NO: 68615 | 14-41 | gi\|551594 | 194-221 | 100% |
| Seq ID NO: 68615 | 14-41 | gi\|551595 | 669-696 | 100% |
| Seq ID NO: 68615 | 14-41 | gi\|18032254 | 34-61 | 100% |
| Seq ID NO: 68615 | 18-41 | gi\|18477256 | 279-256 | 100% |
| Seq ID NO: 68615 | 18-41 | gi\|18477260 | 325-302 | 100% |
| Seq ID NO: 68615 | 18-41 | gi\|18477262 | 634-611 | 100% |
| Seq ID NO: 68615 | 14-35 | gi\|18477259 | 22-1 | 100% |
| Seq ID NO: 68615 | 14-35 | gi\|18477261 | 22-1 | 100% |
| Seq ID NO: 68615 | 14-35 | gi\|37780968 | 22-1 | 100% |
| Seq ID NO: 68654 | 317-337 | gi\|30165848 | 173-193 | 100% |
| Seq ID NO: 68761 | 1-197 | gi\|33139403 | 83-280 | 89% |
| Seq ID NO: 68761 | 515-623 | gi\|33139403 | 421-528 | 85% |
| Seq ID NO: 68761 | 45-157 | gi\|54546450 | 388-500 | 85% |
| Seq ID NO: 68783 | 328-492 | gi\|33140476 | 83-247 | 99% |
| Seq ID NO: 68783 | 129-212 | gi\|33140476 | 1-84 | 100% |
| Seq ID NO: 68783 | 653-732 | gi\|33140476 | 245-324 | 98% |
| Seq ID NO: 68833 | 21-138 | gi\|28916076 | 1-119 | 91% |
| Seq ID NO: 68833 | 14-41 | gi\|159473 | 34-61 | 100% |
| Seq ID NO: 68833 | 14-41 | gi\|2454547 | 227-200 | 100% |
| Seq ID NO: 68833 | 14-41 | gi\|551594 | 194-221 | 100% |
| Seq ID NO: 68833 | 14-41 | gi\|551595 | 669-696 | 100% |
| Seq ID NO: 68833 | 14-41 | gi\|18032254 | 34-61 | 100% |
| Seq ID NO: 68833 | 18-41 | gi\|18477256 | 279-256 | 100% |
| Seq ID NO: 68833 | 18-41 | gi\|18477260 | 325-302 | 100% |
| Seq ID NO: 68833 | 18-41 | gi\|18477262 | 634-611 | 100% |
| Seq ID NO: 68833 | 14-35 | gi\|18477259 | 22-1 | 100% |
| Seq ID NO: 68833 | 14-35 | gi\|18477261 | 22-1 | 100% |
| Seq ID NO: 68833 | 14-35 | gi\|37780968 | 22-1 | 100% |
| Seq ID NO: 46630 | 218-408 | gi\|33139957 | 1-193 | 98% |
| Seq ID NO: 46630 | 486-631 | gi\|33139957 | 192-337 | 98% |
| Seq ID NO: 46630 | 659-791 | gi\|33139957 | 325-457 | 98% |
| Seq ID NO: 46630 | 838-944 | gi\|33139957 | 452-558 | 96% |
| Seq ID NO: 46630 | 218-406 | gi\|33139361 | 1-191 | 97% |
| Seq ID NO: 46630 | 487-631 | gi\|33139361 | 193-337 | 98% |
| Seq ID NO: 46630 | 838-887 | gi\|33139361 | 452-501 | 96% |
| Seq ID NO: 69016 | 185-264 | gi\|18383042 | 974-895 | 85% |
| Seq ID NO: 69016 | 230-264 | gi\|18383054 | 1411-1445 | 97% |
| Seq ID NO: 69046 | 16-120 | gi\|28916076 | 252-352 | 88% |
| Seq ID NO: 69089 | 15-54 | gi\|28916076 | 1-40 | 97% |
| Seq ID NO: 69089 | 8-35 | gi\|159473 | 34-61 | 100% |
| Seq ID NO: 69089 | 8-35 | gi\|2454547 | 227-200 | 100% |
| Seq ID NO: 69089 | 8-35 | gi\|551594 | 194-221 | 100% |
| Seq ID NO: 69089 | 8-35 | gi\|551595 | 669-696 | 100% |
| Seq ID NO: 69089 | 8-35 | gi\|18032254 | 34-61 | 100% |
| Seq ID NO: 69089 | 12-35 | gi\|18477256 | 279-256 | 100% |
| Seq ID NO: 69089 | 12-35 | gi\|18477260 | 325-302 | 100% |
| Seq ID NO: 69089 | 12-35 | gi\|18477262 | 634-611 | 100% |
| Seq ID NO: 69089 | 8-29 | gi\|18477259 | 22-1 | 100% |
| Seq ID NO: 69089 | 8-29 | gi\|18477261 | 22-1 | 100% |
| Seq ID NO: 69089 | 8-29 | gi\|37780968 | 22-1 | 100% |
| Seq ID NO: 69170 | 15-54 | gi\|28916076 | 1-40 | 97% |
| Seq ID NO: 69170 | 8-35 | gi\|159473 | 34-61 | 100% |
| Seq ID NO: 69170 | 8-35 | gi\|2454547 | 227-200 | 100% |
| Seq ID NO: 69170 | 8-35 | gi\|551594 | 194-221 | 100% |
| Seq ID NO: 69170 | 8-35 | gi\|551595 | 669-696 | 100% |
| Seq ID NO: 69170 | 8-35 | gi\|18032254 | 34-61 | 100% |
| Seq ID NO: 69170 | 12-35 | gi\|18477256 | 279-256 | 100% |
| Seq ID NO: 69170 | 12-35 | gi\|18477260 | 325-302 | 100% |
| Seq ID NO: 69170 | 12-35 | gi\|18477262 | 634-611 | 100% |
| Seq ID NO: 69170 | 8-29 | gi\|18477259 | 22-1 | 100% |
| Seq ID NO: 69170 | 8-29 | gi\|18477261 | 22-1 | 100% |
| Seq ID NO: 69170 | 8-29 | gi\|37780968 | 22-1 | 100% |
| Seq ID NO: 69314 | 36-174 | gi\|28916076 | 140-1 | 92% |
| Seq ID NO: 69314 | 154-181 | gi\|159473 | 61-34 | 100% |
| Seq ID NO: 69314 | 154-181 | gi\|2454547 | 200-227 | 100% |
| Seq ID NO: 69314 | 154-181 | gi\|551594 | 221-194 | 100% |
| Seq ID NO: 69314 | 154-181 | gi\|551595 | 696-669 | 100% |
| Seq ID NO: 69314 | 154-181 | gi\|18032254 | 61-34 | 100% |
| Seq ID NO: 69314 | 154-177 | gi\|18477256 | 256-279 | 100% |
| Seq ID NO: 69314 | 154-177 | gi\|18477260 | 302-325 | 100% |
| Seq ID NO: 69314 | 154-177 | gi\|18477262 | 611-634 | 100% |
| Seq ID NO: 69314 | 160-181 | gi\|18477259 | 1-22 | 100% |
| Seq ID NO: 69314 | 160-181 | gi\|18477261 | 1-22 | 100% |
| Seq ID NO: 69314 | 160-181 | gi\|37780968 | 1-22 | 100% |
| Seq ID NO: 69324 | 1-369 | gi\|51093880 | 722-352 | 84% |
| Seq ID NO: 69324 | 1-369 | gi\|51093884 | 722-352 | 83% |
| Seq ID NO: 69324 | 1-252 | gi\|51093883 | 723-469 | 85% |
| Seq ID NO: 69324 | 313-369 | gi\|51093883 | 407-352 | 91% |
| Seq ID NO: 69324 | 134-369 | gi\|51093882 | 587-352 | 84% |
| Seq ID NO: 69324 | 134-369 | gi\|54545658 | 621-387 | 83% |
| Seq ID NO: 69327 | 1-128 | gi\|33139874 | 74-201 | 90% |
| Seq ID NO: 69351 | 1-124 | gi\|33140792 | 30-153 | 98% |
| Seq ID NO: 69351 | 43-124 | gi\|45643642 | 1-82 | 98% |
| Seq ID NO: 69351 | 58-124 | gi\|45643646 | 1-67 | 92% |
| Seq ID NO: 46651 | 3-78 | gi\|18081363 | 236-310 | 96% |
| Seq ID NO: 46651 | 3-76 | gi\|54544882 | 242-315 | 95% |
| Seq ID NO: 69410 | 1-141 | gi\|16797830 | 62-202 | 98% |
| Seq ID NO: 69410 | 1-141 | gi\|16797831 | 62-200 | 97% |
| Seq ID NO: 69410 | 1-141 | gi\|16797832 | 63-201 | 97% |
| Seq ID NO: 69410 | 1-141 | gi\|26000759 | 62-200 | 96% |
| Seq ID NO: 69410 | 1-141 | gi\|31442322 | 62-200 | 95% |
| Seq ID NO: 69410 | 1-141 | gi\|38096133 | 62-200 | 93% |
| Seq ID NO: 69440 | 221-245 | gi\|46987193 | 49-25 | 96% |
| Seq ID NO: 69448 | 1-53 | gi\|18081057 | 88-140 | 94% |
| Seq ID NO: 69449 | 42-186 | gi\|35504946 | 49-193 | 97% |
| Seq ID NO: 69463 | 1-156 | gi\|54548643 | 39-188 | 87% |
| Seq ID NO: 69463 | 21-156 | gi\|18089480 | 9-138 | 86% |
| Seq ID NO: 69489 | 1-118 | gi\|16797830 | 147-264 | 99% |
| Seq ID NO: 69489 | 1-118 | gi\|26000761 | 147-262 | 95% |
| Seq ID NO: 69489 | 1-118 | gi\|16797832 | 148-263 | 94% |
| Seq ID NO: 69489 | 1-118 | gi\|47118286 | 171-286 | 94% |
| Seq ID NO: 69489 | 1-118 | gi\|31442322 | 147-262 | 94% |
| Seq ID NO: 69489 | 1-118 | gi\|21885259 | 169-284 | 91% |
| Seq ID NO: 69494 | 323-427 | gi\|33139639 | 245-349 | 90% |
| Seq ID NO: 69494 | 316-441 | gi\|33140673 | 199-74 | 86% |
| Seq ID NO: 69501 | 113-190 | gi\|54549674 | 422-500 | 94% |
| Seq ID NO: 69501 | 13-53 | gi\|54549674 | 321-361 | 95% |
| Seq ID NO: 69570 | 16-153 | gi\|7143498 | 58-196 | 85% |
| Seq ID NO: 69592 | 1-136 | gi\|16797830 | 686-821 | 100% |
| Seq ID NO: 69592 | 1-136 | gi\|16797832 | 684-819 | 100% |
| Seq ID NO: 69592 | 1-136 | gi\|31442320 | 683-818 | 100% |
| Seq ID NO: 69592 | 1-136 | gi\|26000759 | 682-817 | 99% |
| Seq ID NO: 69592 | 1-136 | gi\|31442322 | 683-818 | 99% |
| Seq ID NO: 69592 | 1-136 | gi\|38096133 | 685-820 | 97% |
| Seq ID NO: 69592 | 1-120 | gi\|16797846 | 702-824 | 90% |
| Seq ID NO: 69592 | 1-120 | gi\|16797847 | 692-814 | 90% |
| Seq ID NO: 69592 | 1-120 | gi\|14600264 | 704-826 | 90% |
| Seq ID NO: 69592 | 1-80 | gi\|16797841 | 691-769 | 97% |
| Seq ID NO: 69592 | 1-80 | gi\|16797843 | 725-803 | 97% |
| Seq ID NO: 69592 | 1-114 | gi\|16797848 | 691-807 | 90% |
| Seq ID NO: 69592 | 1-80 | gi\|16797849 | 692-770 | 97% |
| Seq ID NO: 69593 | 1-68 | gi\|5107411 | 156-89 | 100% |
| Seq ID NO: 69593 | 14-68 | gi\|34105813 | 1719-1665 | 100% |
| Seq ID NO: 69593 | 1-51 | gi\|2149587 | 156-106 | 100% |
| Seq ID NO: 69593 | 1-48 | gi\|2738785 | 157-110 | 100% |
| Seq ID NO: 69593 | 1-48 | gi\|2738792 | 157-110 | 100% |
| Seq ID NO: 69593 | 1-48 | gi\|2738799 | 157-110 | 100% |
| Seq ID NO: 69593 | 1-48 | gi\|2738800 | 157-110 | 100% |
| Seq ID NO: 69593 | 1-54 | gi\|2149585 | 156-103 | 96% |
| Seq ID NO: 69593 | 1-47 | gi\|31074278 | 1741-1695 | 97% |
| Seq ID NO: 69593 | 1-47 | gi\|31074279 | 1741-1695 | 97% |
| Seq ID NO: 69593 | 1-47 | gi\|48479719 | 158-112 | 97% |
| Seq ID NO: 69593 | 1-47 | gi\|37674501 | 161-115 | 97% |
| Seq ID NO: 69593 | 1-45 | gi\|30844179 | 1735-1691 | 97% |
| Seq ID NO: 69716 | 1-121 | gi\|28916076 | 122-1 | 91% |
| Seq ID NO: 69716 | 101-128 | gi\|159473 | 61-34 | 100% |
| Seq ID NO: 69716 | 101-128 | gi\|2454547 | 200-227 | 100% |
| Seq ID NO: 69716 | 101-128 | gi\|551594 | 221-194 | 100% |
| Seq ID NO: 69716 | 101-128 | gi\|551595 | 696-669 | 100% |
| Seq ID NO: 69716 | 101-128 | gi\|18032254 | 61-34 | 100% |
| Seq ID NO: 69716 | 101-124 | gi\|18477256 | 256-279 | 100% |
| Seq ID NO: 69716 | 101-124 | gi\|18477260 | 302-325 | 100% |
| Seq ID NO: 69716 | 101-124 | gi\|18477262 | 611-634 | 100% |
| Seq ID NO: 69716 | 107-128 | gi\|18477259 | 1-22 | 100% |
| Seq ID NO: 69716 | 107-128 | gi\|18477261 | 1-22 | 100% |
| Seq ID NO: 69716 | 107-128 | gi\|37780968 | 1-22 | 100% |
| Seq ID NO: 69747 | 6-258 | gi\|51093884 | 252-7 | 91% |
| Seq ID NO: 69747 | 6-258 | gi\|18080808 | 295-50 | 89% |
| Seq ID NO: 69747 | 207-258 | gi\|18032252 | 2936-2885 | 92% |
| Seq ID NO: 69747 | 219-252 | gi\|30049837 | 62-29 | 97% |
| Seq ID NO: 69747 | 219-252 | gi\|20064115 | 400-367 | 94% |
| Seq ID NO: 69747 | 219-251 | gi\|19267510 | 33-1 | 94% |
| Seq ID NO: 69747 | 219-241 | gi\|19268366 | 27-5 | 100% |
| Seq ID NO: 69795 | 145-251 | gi\|52129366 | 202-308 | 85% |
| Seq ID NO: 69795 | 50-74 | gi\|52129366 | 161-185 | 100% |
| Seq ID NO: 69821 | 1-101 | gi\|32324237 | 442-541 | 98% |
| Seq ID NO: 46679 | 448-820 | gi\|33139644 | 1-373 | 93% |
| Seq ID NO: 46679 | 1053-1213 | gi\|33139644 | 387-546 | 95% |
| Seq ID NO: 69829 | 21-138 | gi\|28916078 | 1-119 | 91% |
| Seq ID NO: 69829 | 14-41 | gi\|159473 | 34-61 | 100% |
| Seq ID NO: 69829 | 14-41 | gi\|2454547 | 227-200 | 100% |
| Seq ID NO: 69829 | 14-41 | gi\|551594 | 194-221 | 100% |
| Seq ID NO: 69829 | 14-41 | gi\|551595 | 669-696 | 100% |
| Seq ID NO: 69829 | 14-41 | gi\|18032254 | 34-61 | 100% |
| Seq ID NO: 69829 | 18-41 | gi\|18477256 | 279-256 | 100% |
| Seq ID NO: 69829 | 18-41 | gi\|18477260 | 325-302 | 100% |
| Seq ID NO: 69829 | 18-41 | gi\|18477262 | 634-611 | 100% |
| Seq ID NO: 69829 | 14-35 | gi\|18477259 | 22-1 | 100% |
| Seq ID NO: 69829 | 14-35 | gi\|18477261 | 22-1 | 100% |
| Seq ID NO: 69829 | 14-35 | gi\|37780968 | 22-1 | 100% |
| Seq ID NO: 69838 | 1-98 | gi\|18382603 | 1075-978 | 89% |
| Seq ID NO: 69838 | 25-98 | gi\|18382603 | 520-447 | 91% |
| Seq ID NO: 69893 | 21-138 | gi\|28916076 | 1-119 | 91% |
| Seq ID NO: 69893 | 14-41 | gi\|159473 | 34-61 | 100% |
| Seq ID NO: 69893 | 14-41 | gi\|2454547 | 227-200 | 100% |
| Seq ID NO: 69893 | 14-41 | gi\|551594 | 194-221 | 100% |
| Seq ID NO: 69893 | 14-41 | gi\|551595 | 669-696 | 100% |
| Seq ID NO: 69893 | 14-41 | gi\|18032254 | 34-61 | 100% |
| Seq ID NO: 69893 | 18-41 | gi\|18477256 | 279-256 | 100% |
| Seq ID NO: 69893 | 18-41 | gi\|18477260 | 325-302 | 100% |
| Seq ID NO: 69893 | 18-41 | gi\|18477262 | 634-611 | 100% |
| Seq ID NO: 69893 | 14-35 | gi\|18477259 | 22-1 | 100% |
| Seq ID NO: 69893 | 14-35 | gi\|18477261 | 22-1 | 100% |
| Seq ID NO: 69893 | 14-35 | gi\|37780968 | 22-1 | 100% |
| Seq ID NO: 69930 | 1-65 | gi\|14280572 | 7058-7122 | 100% |
| Seq ID NO: 69972 | 1-247 | gi\|47118286 | 742-988 | 97% |
| Seq ID NO: 69972 | 1-247 | gi\|47118285 | 729-975 | 96% |
| Seq ID NO: 69972 | 1-230 | gi\|16797830 | 720-950 | 96% |
| Seq ID NO: 69972 | 1-230 | gi\|21885260 | 740-969 | 96% |
| Seq ID NO: 69972 | 1-230 | gi\|31442322 | 717-946 | 96% |
| Seq ID NO: 69972 | 1-230 | gi\|26000759 | 716-945 | 96% |
| Seq ID NO: 69972 | 1-230 | gi\|31442320 | 717-946 | 96% |
| Seq ID NO: 69972 | 1-230 | gi\|38096133 | 719-948 | 94% |
| Seq ID NO: 69972 | 1-44 | gi\|16797827 | 765-807 | 95% |
| Seq ID NO: 69972 | 142-170 | gi\|16797844 | 862-890 | 96% |
| Seq ID NO: 69972 | 227-247 | gi\|48479719 | 1112-1132 | 100% |
| Seq ID NO: 69978 | 1-157 | gi\|33139812 | 208-364 | 98% |
| Seq ID NO: 69998 | 1-79 | gi\|28916077 | 109-31 | 87% |
| Seq ID NO: 70006 | 213-380 | gi\|33139204 | 1-168 | 98% |
| Seq ID NO: 70006 | 96-177 | gi\|33139204 | 462-542 | 97% |
| Seq ID NO: 70006 | 96-214 | gi\|33139268 | 461-579 | 98% |
| Seq ID NO: 70072 | 1-107 | gi\|18087923 | 4-110 | 87% |
| Seq ID NO: 70072 | 34-68 | gi\|51237696 | 40-74 | 91% |
| Seq ID NO: 70096 | 21-138 | gi\|28916076 | 1-119 | 91% |
| Seq ID NO: 70096 | 14-41 | gi\|159473 | 34-61 | 100% |
| Seq ID NO: 70096 | 14-41 | gi\|2454547 | 227-200 | 100% |
| Seq ID NO: 70096 | 14-41 | gi\|551594 | 194-221 | 100% |
| Seq ID NO: 70096 | 14-41 | gi\|551595 | 669-696 | 100% |
| Seq ID NO: 70096 | 14-41 | gi\|18032254 | 34-61 | 100% |
| Seq ID NO: 70096 | 18-41 | gi\|18477256 | 279-256 | 100% |
| Seq ID NO: 70096 | 18-41 | gi\|18477260 | 325-302 | 100% |
| Seq ID NO: 70096 | 18-41 | gi\|18477262 | 634-611 | 100% |
| Seq ID NO: 70096 | 14-35 | gi\|18477259 | 22-1 | 100% |
| Seq ID NO: 70096 | 14-35 | gi\|18477261 | 22-1 | 100% |
| Seq ID NO: 70096 | 14-35 | gi\|37780968 | 22-1 | 100% |
| Seq ID NO: 70127 | 759-900 | gi\|33140064 | 109-250 | 98% |
| Seq ID NO: 70127 | 20-127 | gi\|33140064 | 1-108 | 98% |
| Seq ID NO: 70140 | 353-392 | gi\|32324842 | 178-217 | 97% |
| Seq ID NO: 70163 | 61-147 | gi\|32324657 | 1-89 | 95% |
| Seq ID NO: 70163 | 59-153 | gi\|32325004 | 1-95 | 92% |
| Seq ID NO: 70163 | 61-153 | gi\|32324353 | 1-93 | 92% |
| Seq ID NO: 70163 | 59-147 | gi\|33140382 | 1-89 | 93% |
| Seq ID NO: 70253 | 17-151 | gi\|33139131 | 116-250 | 88% |
| Seq ID NO: 70253 | 6-145 | gi\|32324211 | 1-140 | 88% |
| Seq ID NO: 70253 | 464-572 | gi\|32324211 | 394-502 | 87% |
| Seq ID NO: 70253 | 13-231 | gi\|33139639 | 256-471 | 81% |
| Seq ID NO: 70253 | 1-145 | gi\|33140673 | 193-49 | 83% |
| Seq ID NO: 70344 | 15-54 | gi\|28916076 | 1-40 | 97% |
| Seq ID NO: 70344 | 8-35 | gi\|159473 | 34-61 | 100% |
| Seq ID NO: 70344 | 8-35 | gi\|2454547 | 227-200 | 100% |
| Seq ID NO: 70344 | 8-35 | gi\|551594 | 194-221 | 100% |
| Seq ID NO: 70344 | 8-35 | gi\|551595 | 669-696 | 100% |
| Seq ID NO: 70344 | 8-35 | gi\|18032254 | 34-61 | 100% |
| Seq ID NO: 70344 | 12-35 | gi\|18477256 | 279-256 | 100% |
| Seq ID NO: 70344 | 12-35 | gi\|18477260 | 325-302 | 100% |
| Seq ID NO: 70344 | 12-35 | gi\|18477262 | 634-611 | 100% |
| Seq ID NO: 70344 | 8-29 | gi\|18477259 | 22-1 | 100% |
| Seq ID NO: 70344 | 8-29 | gi\|18477261 | 22-1 | 100% |
| Seq ID NO: 70344 | 8-29 | gi\|37780968 | 22-1 | 100% |
| Seq ID NO: 70357 | 1-28 | gi\|33139488 | 28-1 | 100% |
| Seq ID NO: 70376 | 160-259 | gi\|18090001 | 348-447 | 89% |
| Seq ID NO: 46707 | 552-763 | gi\|18089681 | 57-268 | 85% |
| Seq ID NO: 46707 | 463-495 | gi\|18089681 | 21-53 | 96% |
| Seq ID NO: 70457 | 14-41 | gi\|159473 | 34-61 | 100% |
| Seq ID NO: 70457 | 14-41 | gi\|2454547 | 227-200 | 100% |
| Seq ID NO: 70457 | 14-41 | gi\|551594 | 194-221 | 100% |
| Seq ID NO: 70457 | 14-41 | gi\|551595 | 669-696 | 100% |
| Seq ID NO: 70457 | 14-41 | gi\|18032254 | 34-61 | 100% |
| Seq ID NO: 70457 | 18-41 | gi\|18477256 | 279-256 | 100% |
| Seq ID NO: 70457 | 18-41 | gi\|18477260 | 325-302 | 100% |
| Seq ID NO: 70457 | 18-41 | gi\|18477262 | 634-611 | 100% |
| Seq ID NO: 70457 | 14-35 | gi\|18477259 | 22-1 | 100% |
| Seq ID NO: 70457 | 14-35 | gi\|18477261 | 22-1 | 100% |
| Seq ID NO: 70457 | 14-35 | gi\|37780968 | 22-1 | 100% |
| Seq ID NO: 70484 | 210-232 | gi\|18382755 | 877-899 | 100% |
| Seq ID NO: 70513 | 141-344 | gi\|33139742 | 77-280 | 98% |
| Seq ID NO: 70513 | 515-654 | gi\|33139742 | 368-507 | 95% |
| Seq ID NO: 70513 | 384-471 | gi\|33139742 | 280-367 | 95% |
| Seq ID NO: 70513 | 701-771 | gi\|33139742 | 510-579 | 97% |
| Seq ID NO: 70513 | 25-97 | gi\|33139742 | 5-77 | 94% |
| Seq ID NO: 70575 | 36-174 | gi\|28916076 | 140-1 | 91% |
| Seq ID NO: 70575 | 156-181 | gi\|159473 | 59-34 | 100% |
| Seq ID NO: 70575 | 156-181 | gi\|2454547 | 202-227 | 100% |
| Seq ID NO: 70575 | 156-181 | gi\|551594 | 219-194 | 100% |
| Seq ID NO: 70575 | 156-181 | gi\|551595 | 694-669 | 100% |
| Seq ID NO: 70575 | 156-181 | gi\|18032254 | 59-34 | 100% |
| Seq ID NO: 70575 | 160-181 | gi\|18477259 | 1-22 | 100% |
| Seq ID NO: 70575 | 156-177 | gi\|18477257 | 260-281 | 100% |
| Seq ID NO: 70575 | 156-177 | gi\|18477260 | 304-325 | 100% |
| Seq ID NO: 70575 | 160-181 | gi\|18477261 | 1-22 | 100% |
| Seq ID NO: 70575 | 156-177 | gi\|18477262 | 613-634 | 100% |
| Seq ID NO: 70575 | 160-181 | gi\|37780968 | 1-22 | 100% |
| Seq ID NO: 70581 | 1-143 | gi\|16797830 | 62-204 | 98% |
| Seq ID NO: 70581 | 1-143 | gi\|16797831 | 62-202 | 97% |
| Seq ID NO: 70581 | 1-143 | gi\|16797832 | 63-203 | 97% |
| Seq ID NO: 70581 | 1-143 | gi\|26000759 | 62-202 | 96% |
| Seq ID NO: 70581 | 1-142 | gi\|26000762 | 62-201 | 95% |
| Seq ID NO: 70581 | 1-143 | gi\|31442322 | 62-202 | 95% |
| Seq ID NO: 70581 | 1-143 | gi\|38096133 | 62-202 | 93% |
| Seq ID NO: 70595 | 116-138 | gi\|27925886 | 275-297 | 100% |
| Seq ID NO: 70736 | 24-50 | gi\|32324959 | 70-44 | 100% |
| Seq ID NO: 70765 | 327-392 | gi\|18082500 | 283-348 | 90% |
| Seq ID NO: 70765 | 4-65 | gi\|18082500 | 9-69 | 87% |
| Seq ID NO: 70808 | 1-78 | gi\|33140673 | 126-49 | 91% |
| Seq ID NO: 70808 | 1-110 | gi\|33139639 | 311-420 | 84% |
| Seq ID NO: 70808 | 19-78 | gi\|33139131 | 185-244 | 86% |
| Seq ID NO: 70815 | 1-122 | gi\|28916076 | 122-1 | 85% |
| Seq ID NO: 70815 | 106-129 | gi\|159473 | 57-34 | 100% |
| Seq ID NO: 70815 | 106-129 | gi\|2454547 | 204-227 | 100% |
| Seq ID NO: 70815 | 106-129 | gi\|551594 | 217-194 | 100% |
| Seq ID NO: 70815 | 106-129 | gi\|551595 | 692-669 | 100% |
| Seq ID NO: 70815 | 106-129 | gi\|18032254 | 57-34 | 100% |
| Seq ID NO: 70815 | 108-129 | gi\|18477259 | 1-22 | 100% |
| Seq ID NO: 70815 | 108-129 | gi\|18477261 | 1-22 | 100% |
| Seq ID NO: 70815 | 108-129 | gi\|37780968 | 1-22 | 100% |
| Seq ID NO: 70833 | 21-138 | gi\|28916076 | 1-119 | 91% |
| Seq ID NO: 70833 | 14-41 | gi\|159473 | 34-61 | 100% |
| Seq ID NO: 70833 | 14-41 | gi\|2454547 | 227-200 | 100% |
| Seq ID NO: 70833 | 14-41 | gi\|551594 | 194-221 | 100% |
| Seq ID NO: 70833 | 14-41 | gi\|551595 | 669-696 | 100% |
| Seq ID NO: 70833 | 14-41 | gi\|18032254 | 34-61 | 100% |
| Seq ID NO: 70833 | 18-41 | gi\|18477256 | 279-256 | 100% |
| Seq ID NO: 70833 | 18-41 | gi\|18477260 | 325-302 | 100% |
| Seq ID NO: 70833 | 18-41 | gi\|18477262 | 634-611 | 100% |
| Seq ID NO: 70833 | 14-35 | gi\|18477259 | 22-1 | 100% |
| Seq ID NO: 70833 | 14-35 | gi\|18477261 | 22-1 | 100% |
| Seq ID NO: 70833 | 14-35 | gi\|37780968 | 22-1 | 100% |
| Seq ID NO: 70838 | 1-119 | gi\|30169344 | 49-167 | 99% |
| Seq ID NO: 70968 | 1-78 | gi\|33140331 | 512-592 | 90% |
| Seq ID NO: 70972 | 21-138 | gi\|28916076 | 1-119 | 91% |
| Seq ID NO: 70972 | 14-41 | gi\|159473 | 34-61 | 100% |
| Seq ID NO: 70972 | 14-41 | gi\|2454547 | 227-200 | 100% |
| Seq ID NO: 70972 | 14-41 | gi\|551594 | 194-221 | 100% |
| Seq ID NO: 70972 | 14-41 | gi\|551595 | 669-696 | 100% |
| Seq ID NO: 70972 | 14-41 | gi\|18032254 | 34-61 | 100% |
| Seq ID NO: 70972 | 18-41 | gi\|18477256 | 279-256 | 100% |
| Seq ID NO: 70972 | 18-41 | gi\|18477260 | 325-302 | 100% |
| Seq ID NO: 70972 | 18-41 | gi\|18477262 | 634-611 | 100% |
| Seq ID NO: 70972 | 14-35 | gi\|18477259 | 22-1 | 100% |
| Seq ID NO: 70972 | 14-35 | gi\|18477261 | 22-1 | 100% |
| Seq ID NO: 70972 | 14-35 | gi\|37780968 | 22-1 | 100% |
| Seq ID NO: 70987 | 1-88 | gi\|32324011 | 417-505 | 94% |
| Seq ID NO: 70987 | 137-175 | gi\|32324011 | 506-544 | 100% |
| Seq ID NO: 46732 | 61-204 | gi\|18081136 | 58-201 | 82% |
| Seq ID NO: 71126 | 363-383 | gi\|19103835 | 404-424 | 100% |
| Seq ID NO: 71130 | 1-173 | gi\|33140136 | 324-496 | 88% |
| Seq ID NO: 71131 | 1-173 | gi\|33140136 | 324-496 | 88% |
| Seq ID NO: 71227 | 2-327 | gi\|16797830 | 368-43 | 98% |
| Seq ID NO: 71227 | 2-327 | gi\|47118285 | 378-55 | 96% |
| Seq ID NO: 71227 | 2-327 | gi\|47118286 | 390-67 | 96% |
| Seq ID NO: 71227 | 2-326 | gi\|31442320 | 365-44 | 96% |
| Seq ID NO: 71227 | 2-326 | gi\|16797832 | 367-45 | 95% |
| Seq ID NO: 71227 | 2-327 | gi\|21885260 | 388-67 | 95% |
| Seq ID NO: 71227 | 2-327 | gi\|31442322 | 366-43 | 95% |
| Seq ID NO: 71227 | 2-327 | gi\|38096133 | 366-43 | 92% |
| Seq ID NO: 71227 | 18-165 | gi\|31442314 | 354-207 | 86% |
| Seq ID NO: 71227 | 18-127 | gi\|38096139 | 352-244 | 88% |
| Seq ID NO: 71227 | 18-116 | gi\|31442318 | 356-259 | 89% |
| Seq ID NO: 71227 | 18-80 | gi\|16797825 | 322-260 | 95% |
| Seq ID NO: 71227 | 18-80 | gi\|31442305 | 344-282 | 95% |
| Seq ID NO: 71227 | 18-77 | gi\|16797844 | 348-289 | 95% |
| Seq ID NO: 71227 | 20-100 | gi\|28627583 | 300-220 | 89% |
| Seq ID NO: 71227 | 18-127 | gi\|31442313 | 354-246 | 85% |
| Seq ID NO: 71249 | 1-138 | gi\|33140698 | 375-512 | 97% |
| Seq ID NO: 71249 | 147-190 | gi\|33140698 | 521-564 | 97% |
| Seq ID NO: 71288 | 1-134 | gi\|16797830 | 935-802 | 97% |
| Seq ID NO: 71288 | 1-134 | gi\|26000759 | 931-798 | 97% |
| Seq ID NO: 71288 | 1-134 | gi\|31442322 | 932-799 | 97% |
| Seq ID NO: 71288 | 1-134 | gi\|16797832 | 933-800 | 96% |
| Seq ID NO: 71288 | 1-134 | gi\|47118286 | 957-824 | 96% |
| Seq ID NO: 71288 | 1-122 | gi\|26000763 | 930-809 | 97% |
| Seq ID NO: 71288 | 1-133 | gi\|16797831 | 933-801 | 95% |
| Seq ID NO: 71288 | 1-134 | gi\|38096133 | 934-801 | 94% |
| Seq ID NO: 71288 | 51-75 | gi\|16797844 | 886-862 | 100% |
| Seq ID NO: 71288 | 51-72 | gi\|16797845 | 888-867 | 100% |
| Seq ID NO: 46750 | 397-420 | gi\|52127553 | 72-95 | 100% |
| Seq ID NO: 46750 | 12-32 | gi\|403087 | 324-344 | 100% |
| Seq ID NO: 46750 | 12-32 | gi\|37517247 | 324-344 | 100% |
| Seq ID NO: 46750 | 12-32 | gi\|54548553 | 9-29 | 100% |
| Seq ID NO: 71318 | 153-177 | gi\|54547857 | 370-345 | 96% |
| Seq ID NO: 71359 | 1-93 | gi\|32324127 | 486-578 | 98% |
| Seq ID NO: 71359 | 140-211 | gi\|18089994 | 172-243 | 88% |
| Seq ID NO: 71371 | 21-138 | gi\|28916076 | 1-119 | 91% |
| Seq ID NO: 71371 | 14-41 | gi\|159473 | 34-61 | 100% |
| Seq ID NO: 71371 | 14-41 | gi\|2454547 | 227-200 | 100% |
| Seq ID NO: 71371 | 14-41 | gi\|551594 | 194-221 | 100% |
| Seq ID NO: 71371 | 14-41 | gi\|551595 | 669-696 | 100% |
| Seq ID NO: 71371 | 14-41 | gi\|18032254 | 34-61 | 100% |
| Seq ID NO: 71371 | 18-41 | gi\|18477256 | 279-256 | 100% |
| Seq ID NO: 71371 | 18-41 | gi\|18477260 | 325-302 | 100% |
| Seq ID NO: 71371 | 18-41 | gi\|18477262 | 634-611 | 100% |
| Seq ID NO: 71371 | 14-35 | gi\|18477259 | 22-1 | 100% |
| Seq ID NO: 71371 | 14-35 | gi\|18477261 | 22-1 | 100% |
| Seq ID NO: 71371 | 14-35 | gi\|37780968 | 22-1 | 100% |
| Seq ID NO: 71428 | 4-75 | gi\|33139530 | 421-350 | 100% |
| Seq ID NO: 71428 | 4-75 | gi\|18080188 | 489-418 | 98% |
| Seq ID NO: 71428 | 4-71 | gi\|54545749 | 478-411 | 97% |
| Seq ID NO: 71428 | 25-75 | gi\|54545112 | 474-423 | 96% |
| Seq ID NO: 71446 | 15-54 | gi\|28916076 | 1-40 | 97% |
| Seq ID NO: 71446 | 8-35 | gi\|159473 | 34-61 | 100% |
| Seq ID NO: 71446 | 8-35 | gi\|2454547 | 227-200 | 100% |
| Seq ID NO: 71446 | 8-35 | gi\|551594 | 194-221 | 100% |
| Seq ID NO: 71446 | 8-35 | gi\|551595 | 669-696 | 100% |
| Seq ID NO: 71446 | 8-35 | gi\|18032254 | 34-61 | 100% |
| Seq ID NO: 71446 | 12-35 | gi\|18477256 | 279-256 | 100% |
| Seq ID NO: 71446 | 12-35 | gi\|18477260 | 325-302 | 100% |
| Seq ID NO: 71446 | 12-35 | gi\|18477262 | 634-611 | 100% |
| Seq ID NO: 71446 | 8-29 | gi\|18477259 | 22-1 | 100% |
| Seq ID NO: 71446 | 8-29 | gi\|18477261 | 22-1 | 100% |
| Seq ID NO: 71446 | 8-29 | gi\|37780968 | 22-1 | 100% |
| Seq ID NO: 71587 | 297-344 | gi\|33139758 | 490-537 | 93% |
| Seq ID NO: 71587 | 300-344 | gi\|33140062 | 109-61 | 89% |
| Seq ID NO: 71599 | 1-184 | gi\|33139461 | 183-366 | 99% |
| Seq ID NO: 71682 | 1-47 | gi\|33139445 | 16-62 | 91% |
| Seq ID NO: 71689 | 86-112 | gi\|32324223 | 1-27 | 100% |
| Seq ID NO: 71734 | 1-156 | gi\|7144157 | 23-179 | 93% |
| Seq ID NO: 71734 | 1-156 | gi\|54549688 | 10-166 | 92% |
| Seq ID NO: 71734 | 38-156 | gi\|18083086 | 614-495 | 91% |
| Seq ID NO: 71734 | 41-156 | gi\|18090403 | 1-117 | 91% |
| Seq ID NO: 71734 | 1-91 | gi\|52129301 | 409-319 | 85% |
| Seq ID NO: 71797 | 19-95 | gi\|18081000 | 336-260 | 92% |
| Seq ID NO: 71818 | 1-136 | gi\|16797830 | 686-821 | 99% |
| Seq ID NO: 71818 | 1-136 | gi\|16797832 | 684-819 | 99% |
| Seq ID NO: 71818 | 1-136 | gi\|31442320 | 683-818 | 99% |
| Seq ID NO: 71818 | 1-136 | gi\|26000759 | 682-817 | 98% |
| Seq ID NO: 71818 | 1-136 | gi\|31442322 | 683-818 | 98% |
| Seq ID NO: 71818 | 1-136 | gi\|38096133 | 685-820 | 97% |
| Seq ID NO: 71818 | 1-80 | gi\|16797841 | 691-769 | 97% |
| Seq ID NO: 71818 | 1-80 | gi\|16797843 | 725-803 | 97% |
| Seq ID NO: 71818 | 1-98 | gi\|16797846 | 702-801 | 93% |
| Seq ID NO: 71818 | 1-98 | gi\|16797847 | 692-791 | 93% |
| Seq ID NO: 71818 | 1-98 | gi\|16797848 | 691-790 | 93% |
| Seq ID NO: 71818 | 1-80 | gi\|16797849 | 692-770 | 97% |
| Seq ID NO: 71818 | 1-98 | gi\|14600264 | 704-803 | 93% |
| Seq ID NO: 71848 | 46-108 | gi\|28916076 | 140-79 | 92% |
| Seq ID NO: 71985 | 33-55 | gi\|32325183 | 375-397 | 100% |
| Seq ID NO: 71996 | 1-141 | gi\|16797830 | 62-202 | 98% |
| Seq ID NO: 71996 | 1-141 | gi\|16797831 | 62-200 | 97% |
| Seq ID NO: 71996 | 1-141 | gi\|16797832 | 63-201 | 97% |
| Seq ID NO: 71996 | 1-141 | gi\|26000759 | 62-200 | 96% |
| Seq ID NO: 71996 | 1-141 | gi\|31442322 | 62-200 | 95% |
| Seq ID NO: 71996 | 1-141 | gi\|38096133 | 62-200 | 93% |
| Seq ID NO: 72109 | 318-338 | gi\|24467850 | 41-21 | 100% |
| Seq ID NO: 72212 | 1-47 | gi\|51093880 | 468-514 | 95% |
| Seq ID NO: 72212 | 1-39 | gi\|51093879 | 469-507 | 97% |
| Seq ID NO: 72212 | 1-38 | gi\|51093883 | 469-506 | 97% |
| Seq ID NO: 72222 | 1-181 | gi\|51093884 | 193-12 | 95% |
| Seq ID NO: 72222 | 1-181 | gi\|18080808 | 236-55 | 93% |
| Seq ID NO: 72222 | 129-180 | gi\|18032252 | 2942-2891 | 92% |
| Seq ID NO: 72222 | 130-180 | gi\|30049837 | 79-29 | 90% |
| Seq ID NO: 72222 | 147-180 | gi\|31326537 | 104-71 | 97% |
| Seq ID NO: 72222 | 130-180 | gi\|20064115 | 417-367 | 88% |
| Seq ID NO: 72222 | 130-179 | gi\|19267510 | 50-1 | 88% |
| Seq ID NO: 72222 | 130-169 | gi\|19268366 | 44-5 | 90% |
| Seq ID NO: 72288 | 5-86 | gi\|54546009 | 456-374 | 87% |
| Seq ID NO: 72350 | 1-57 | gi\|35505078 | 6-62 | 96% |
| Seq ID NO: 72350 | 21-57 | gi\|35504499 | 1-37 | 100% |
| Seq ID NO: 72377 | 36-174 | gi\|28916076 | 140-1 | 92% |
| Seq ID NO: 72377 | 154-181 | gi\|159473 | 61-34 | 100% |
| Seq ID NO: 72377 | 154-181 | gi\|2454547 | 200-227 | 100% |
| Seq ID NO: 72377 | 154-181 | gi\|551594 | 221-194 | 100% |
| Seq ID NO: 72377 | 154-181 | gi\|551595 | 696-669 | 100% |
| Seq ID NO: 72377 | 154-181 | gi\|18032254 | 61-34 | 100% |
| Seq ID NO: 72377 | 154-177 | gi\|18477256 | 256-279 | 100% |
| Seq ID NO: 72377 | 154-177 | gi\|18477260 | 302-325 | 100% |
| Seq ID NO: 72377 | 154-177 | gi\|18477262 | 611-634 | 100% |
| Seq ID NO: 72377 | 160-181 | gi\|18477259 | 1-22 | 100% |
| Seq ID NO: 72377 | 160-181 | gi\|18477261 | 1-22 | 100% |
| Seq ID NO: 72377 | 160-181 | gi\|37780968 | 1-22 | 100% |
| Seq ID NO: 72416 | 345-500 | gi\|18089572 | 129-284 | 82% |
| Seq ID NO: 72426 | 15-54 | gi\|28916076 | 1-40 | 97% |
| Seq ID NO: 72426 | 8-35 | gi\|159473 | 34-61 | 100% |
| Seq ID NO: 72426 | 8-35 | gi\|2454547 | 227-200 | 100% |
| Seq ID NO: 72426 | 8-35 | gi\|551594 | 194-221 | 100% |
| Seq ID NO: 72426 | 8-35 | gi\|551595 | 669-696 | 100% |
| Seq ID NO: 72426 | 8-35 | gi\|18032254 | 34-61 | 100% |
| Seq ID NO: 72426 | 12-35 | gi\|18477256 | 279-256 | 100% |
| Seq ID NO: 72426 | 12-35 | gi\|18477260 | 325-302 | 100% |
| Seq ID NO: 72426 | 12-35 | gi\|18477262 | 634-611 | 100% |
| Seq ID NO: 72426 | 8-29 | gi\|18477259 | 22-1 | 100% |
| Seq ID NO: 72426 | 8-29 | gi\|18477261 | 22-1 | 100% |
| Seq ID NO: 72426 | 8-29 | gi\|37780968 | 22-1 | 100% |
| Seq ID NO: 72433 | 106-352 | gi\|33139639 | 245-488 | 87% |
| Seq ID NO: 72433 | 99-257 | gi\|33140673 | 199-44 | 85% |
| Seq ID NO: 72529 | 625-646 | gi\|27926103 | 451-472 | 100% |
| Seq ID NO: 72544 | 77-272 | gi\|33139337 | 247-441 | 97% |
| Seq ID NO: 72544 | 77-245 | gi\|33139239 | 401-569 | 98% |
| Seq ID NO: 72579 | 564-667 | gi\|18082454 | 313-416 | 89% |
| Seq ID NO: 46809 | 356-378 | gi\|17991863 | 197-219 | 100% |
| Seq ID NO: 72621 | 15-54 | gi\|28916076 | 1-40 | 97% |
| Seq ID NO: 72621 | 8-35 | gi\|159473 | 34-61 | 100% |
| Seq ID NO: 72621 | 8-35 | gi\|2454547 | 227-200 | 100% |
| Seq ID NO: 72621 | 8-35 | gi\|551594 | 194-221 | 100% |
| Seq ID NO: 72621 | 8-35 | gi\|551595 | 669-696 | 100% |
| Seq ID NO: 72621 | 8-35 | gi\|18032254 | 34-61 | 100% |
| Seq ID NO: 72621 | 12-35 | gi\|18477256 | 279-256 | 100% |
| Seq ID NO: 72621 | 12-35 | gi\|18477260 | 325-302 | 100% |
| Seq ID NO: 72621 | 12-35 | gi\|18477262 | 634-611 | 100% |
| Seq ID NO: 72621 | 8-29 | gi\|18477259 | 22-1 | 100% |
| Seq ID NO: 72621 | 8-29 | gi\|18477261 | 22-1 | 100% |
| Seq ID NO: 72621 | 8-29 | gi\|37780968 | 22-1 | 100% |
| Seq ID NO: 72635 | 1-96 | gi\|33140348 | 160-255 | 96% |
| Seq ID NO: 72667 | 361-457 | gi\|54547761 | 394-490 | 86% |
| Seq ID NO: 72706 | 1-121 | gi\|28916076 | 122-1 | 91% |
| Seq ID NO: 72706 | 101-128 | gi\|159473 | 61-34 | 100% |
| Seq ID NO: 72706 | 101-128 | gi\|2454547 | 200-227 | 100% |
| Seq ID NO: 72706 | 101-128 | gi\|551594 | 221-194 | 100% |
| Seq ID NO: 72706 | 101-128 | gi\|551595 | 696-669 | 100% |
| Seq ID NO: 72706 | 101-128 | gi\|18032254 | 61-34 | 100% |
| Seq ID NO: 72706 | 101-124 | gi\|18477256 | 256-279 | 100% |
| Seq ID NO: 72706 | 101-124 | gi\|18477260 | 302-325 | 100% |
| Seq ID NO: 72706 | 101-124 | gi\|18477262 | 611-634 | 100% |
| Seq ID NO: 72706 | 107-128 | gi\|18477259 | 1-22 | 100% |
| Seq ID NO: 72706 | 107-128 | gi\|18477261 | 1-22 | 100% |
| Seq ID NO: 72706 | 107-128 | gi\|37780968 | 1-22 | 100% |
| Seq ID NO: 72808 | 21-138 | gi\|28916076 | 1-119 | 91% |
| Seq ID NO: 72808 | 14-41 | gi\|159473 | 34-61 | 100% |
| Seq ID NO: 72808 | 14-41 | gi\|2454547 | 227-200 | 100% |
| Seq ID NO: 72808 | 14-41 | gi\|551594 | 194-221 | 100% |
| Seq ID NO: 72808 | 14-41 | gi\|551595 | 669-696 | 100% |
| Seq ID NO: 72808 | 14-41 | gi\|18032254 | 34-61 | 100% |
| Seq ID NO: 72808 | 18-41 | gi\|18477256 | 279-256 | 100% |
| Seq ID NO: 72808 | 18-41 | gi\|18477260 | 325-302 | 100% |
| Seq ID NO: 72808 | 18-41 | gi\|18477262 | 634-611 | 100% |
| Seq ID NO: 72808 | 14-35 | gi\|18477259 | 22-1 | 100% |
| Seq ID NO: 72808 | 14-35 | gi\|18477261 | 22-1 | 100% |
| Seq ID NO: 72808 | 14-35 | gi\|37780968 | 22-1 | 100% |
| Seq ID NO: 72820 | 5-100 | gi\|33139131 | 115-213 | 86% |
| Seq ID NO: 72859 | 169-270 | gi\|18090422 | 452-553 | 89% |
| Seq ID NO: 73039 | 1-111 | gi\|33139007 | 235-125 | 98% |
| Seq ID NO: 73039 | 119-235 | gi\|33139007 | 117-1 | 94% |
| Seq ID NO: 73039 | 132-235 | gi\|33140543 | 104-1 | 98% |
| Seq ID NO: 73156 | 73-218 | gi\|32324285 | 154-299 | 97% |
| Seq ID NO: 73156 | 266-408 | gi\|32324285 | 298-440 | 96% |
| Seq ID NO: 73156 | 454-534 | gi\|32324285 | 439-519 | 100% |
| Seq ID NO: 73156 | 454-516 | gi\|33139772 | 439-501 | 100% |
| Seq ID NO: 73170 | 167-212 | gi\|32324562 | 537-492 | 91% |
| Seq ID NO: 73219 | 223-246 | gi\|32325459 | 267-290 | 100% |
| Seq ID NO: 73233 | 75-95 | gi\|19267575 | 145-125 | 100% |
| Seq ID NO: 73426 | 36-174 | gi\|28916076 | 140-1 | 92% |
| Seq ID NO: 73426 | 154-181 | gi\|159473 | 61-34 | 100% |
| Seq ID NO: 73426 | 154-181 | gi\|2454547 | 200-227 | 100% |
| Seq ID NO: 73426 | 154-181 | gi\|551594 | 221-194 | 100% |
| Seq ID NO: 73426 | 154-181 | gi\|551595 | 696-669 | 100% |
| Seq ID NO: 73426 | 154-181 | gi\|18032254 | 61-34 | 100% |
| Seq ID NO: 73426 | 154-177 | gi\|18477256 | 256-279 | 100% |
| Seq ID NO: 73426 | 154-177 | gi\|18477260 | 302-325 | 100% |
| Seq ID NO: 73426 | 154-177 | gi\|18477262 | 611-634 | 100% |
| Seq ID NO: 73426 | 160-181 | gi\|18477259 | 1-22 | 100% |
| Seq ID NO: 73426 | 160-181 | gi\|18477261 | 1-22 | 100% |
| Seq ID NO: 73426 | 160-181 | gi\|37780968 | 1-22 | 100% |
| Seq ID NO: 73454 | 1-50 | gi\|33140348 | 252-203 | 98% |
| Seq ID NO: 46864 | 225-248 | gi\|52127553 | 72-95 | 100% |
| Seq ID NO: 73594 | 79-252 | gi\|32324211 | 1-171 | 84% |
| Seq ID NO: 73594 | 73-224 | gi\|33139131 | 99-250 | 85% |
| Seq ID NO: 73594 | 294-331 | gi\|33139131 | 293-330 | 94% |
| Seq ID NO: 73616 | 1-285 | gi\|32324082 | 243-527 | 97% |
| Seq ID NO: 73616 | 331-370 | gi\|32324082 | 527-566 | 100% |
| Seq ID NO: 46871 | 1109-1129 | gi\|15766531 | 77-57 | 100% |
| Seq ID NO: 46896 | 1-152 | gi\|32325576 | 17-168 | 99% |
| Seq ID NO: 46896 | 1-150 | gi\|54547472 | 44-193 | 90% |
| Seq ID NO: 46896 | 1-150 | gi\|18083068 | 22-171 | 88% |
| Seq ID NO: 73960 | 36-174 | gi\|28916076 | 140-1 | 92% |
| Seq ID NO: 73960 | 154-181 | gi\|159473 | 61-34 | 100% |
| Seq ID NO: 73960 | 154-181 | gi\|2454547 | 200-227 | 100% |
| Seq ID NO: 73960 | 154-181 | gi\|551594 | 221-194 | 100% |
| Seq ID NO: 73960 | 154-181 | gi\|551595 | 696-669 | 100% |
| Seq ID NO: 73960 | 154-181 | gi\|18032254 | 61-34 | 100% |
| Seq ID NO: 73960 | 154-177 | gi\|18477256 | 256-279 | 100% |
| Seq ID NO: 73960 | 154-177 | gi\|18477260 | 302-325 | 100% |
| Seq ID NO: 73960 | 154-177 | gi\|18477262 | 611-634 | 100% |
| Seq ID NO: 73960 | 160-181 | gi\|18477259 | 1-22 | 100% |
| Seq ID NO: 73960 | 160-181 | gi\|18477261 | 1-22 | 100% |
| Seq ID NO: 73960 | 160-181 | gi\|37780968 | 1-22 | 100% |
| Seq ID NO: 73986 | 1-101 | gi\|33139929 | 341-441 | 99% |
| Seq ID NO: 73986 | 151-236 | gi\|33139929 | 439-524 | 100% |
| Seq ID NO: 73986 | 16-101 | gi\|32324461 | 1-86 | 98% |
| Seq ID NO: 73987 | 4-146 | gi\|7144133 | 498-641 | 91% |
| Seq ID NO: 73987 | 52-152 | gi\|18382414 | 1346-1446 | 93% |
| Seq ID NO: 74514 | 17-120 | gi\|7143618 | 355-252 | 86% |
| Seq ID NO: 74514 | 155-180 | gi\|18080329 | 30-5 | 96% |
| Seq ID NO: 74514 | 154-187 | gi\|18080516 | 211-178 | 94% |
| Seq ID NO: 74514 | 155-187 | gi\|7143678 | 478-446 | 93% |
| Seq ID NO: 74633 | 161-181 | gi\|38512984 | 421-441 | 100% |
| Seq ID NO: 74832 | 1-56 | gi\|7641359 | 475-420 | 92% |
| Seq ID NO: 74832 | 10-53 | gi\|15003596 | 5-48 | 97% |
| Seq ID NO: 74832 | 1-57 | gi\|14085900 | 55-111 | 91% |
| Seq ID NO: 74832 | 1-53 | gi\|14086110 | 51-103 | 92% |
| Seq ID NO: 74832 | 1-53 | gi\|19265574 | 41-93 | 92% |
| Seq ID NO: 74832 | 1-57 | gi\|39747527 | 43-99 | 91% |
| Seq ID NO: 74832 | 1-56 | gi\|15767660 | 65-120 | 91% |
| Seq ID NO: 74832 | 1-56 | gi\|18495580 | 501-446 | 91% |
| Seq ID NO: 74832 | 16-53 | gi\|15003618 | 64-101 | 97% |
| Seq ID NO: 74832 | 1-53 | gi\|34025909 | 42-94 | 90% |
| Seq ID NO: 74992 | 72-256 | gi\|33139639 | 245-429 | 92% |
| Seq ID NO: 74992 | 63-214 | gi\|33140673 | 201-50 | 89% |
| Seq ID NO: 75035 | 76-97 | gi\|19266802 | 444-465 | 100% |
| Seq ID NO: 75105 | 431-590 | gi\|33139939 | 312-471 | 97% |
| Seq ID NO: 75105 | 240-388 | gi\|33139939 | 165-312 | 96% |
| Seq ID NO: 75105 | 799-910 | gi\|33139939 | 472-583 | 99% |
| Seq ID NO: 75105 | 64-176 | gi\|33139939 | 52-164 | 94% |
| Seq ID NO: 75105 | 829-959 | gi\|18090520 | 33-163 | 87% |
| Seq ID NO: 75106 | 327-348 | gi\|33140085 | 432-453 | 100% |
| Seq ID NO: 75118 | 318-457 | gi\|14280575 | 2710-2849 | 100% |
| Seq ID NO: 75118 | 133-231 | gi\|14280575 | 2614-2712 | 100% |
| Seq ID NO: 75118 | 2-77 | gi\|14280575 | 2538-2613 | 100% |
| Seq ID NO: 75118 | 318-355 | gi\|14280570 | 3427-3465 | 92% |
| Seq ID NO: 75173 | 161-181 | gi\|32324086 | 604-584 | 100% |
| Seq ID NO: 75190 | 67-108 | gi\|7144329 | 64-105 | 100% |
| Seq ID NO: 75203 | 175-233 | gi\|21393342 | 99-157 | 88% |
| Seq ID NO: 75203 | 190-233 | gi\|21393558 | 107-150 | 91% |
| Seq ID NO: 75203 | 175-201 | gi\|7797714 | 281-307 | 96% |
| Seq ID NO: 75289 | 66-470 | gi\|33140136 | 92-496 | 90% |
| Seq ID NO: 75439 | 292-321 | gi\|7922575 | 190-218 | 96% |
| Seq ID NO: 75663 | 438-478 | gi\|18081901 | 558-518 | 92% |
| Seq ID NO: 47026 | 543-822 | gi\|18382431 | 565-486 | 91% |
| Seq ID NO: 75916 | 57-196 | gi\|32323999 | 1-140 | 95% |
| Seq ID NO: 75950 | 6-261 | gi\|32324211 | 1-256 | 84% |
| Seq ID NO: 75950 | 17-145 | gi\|33139131 | 116-244 | 89% |
| Seq ID NO: 75950 | 13-250 | gi\|33139639 | 256-493 | 81% |
| Seq ID NO: 75950 | 1-145 | gi\|33140673 | 193-49 | 84% |
| Seq ID NO: 75960 | 1-75 | gi\|30028941 | 235-309 | 96% |
| Seq ID NO: 75960 | 1-75 | gi\|33140204 | 235-309 | 96% |
| Seq ID NO: 47033 | 313-382 | gi\|32324686 | 13-82 | 98% |
| Seq ID NO: 76094 | 66-470 | gi\|33140136 | 92-496 | 89% |
| Seq ID NO: 76242 | 181-203 | gi\|27001433 | 261-283 | 100% |
| Seq ID NO: 76281 | 16-139 | gi\|54546240 | 15-138 | 90% |
| Seq ID NO: 76281 | 16-139 | gi\|18089390 | 11-134 | 89% |
| Seq ID NO: 76311 | 128-240 | gi\|32324311 | 117-229 | 88% |
| Seq ID NO: 76311 | 1-46 | gi\|32324311 | 55-100 | 93% |
| Seq ID NO: 76311 | 130-241 | gi\|33140078 | 156-267 | 87% |
| Seq ID NO: 76311 | 152-241 | gi\|33139028 | 10-99 | 90% |
| Seq ID NO: 47066 | 255-278 | gi\|7143978 | 211-234 | 100% |
| Seq ID NO: 76358 | 1-57 | gi\|32324009 | 418-474 | 98% |
| Seq ID NO: 76358 | 1-53 | gi\|33139304 | 439-491 | 98% |
| Seq ID NO: 76409 | 5-25 | gi\|19267937 | 180-160 | 100% |
| Seq ID NO: 76432 | 620-750 | gi\|33139974 | 141-11 | 99% |
| Seq ID NO: 76432 | 339-516 | gi\|33139974 | 316-139 | 91% |
| Seq ID NO: 76470 | 296-390 | gi\|33140673 | 141-44 | 85% |
| Seq ID NO: 76471 | 1-87 | gi\|35505085 | 14-100 | 97% |
| Seq ID NO: 76471 | 8-87 | gi\|35504991 | 21-100 | 95% |
| Seq ID NO: 76471 | 49-87 | gi\|35505046 | 1-39 | 100% |
| Seq ID NO: 76556 | 591-615 | gi\|19103651 | 327-352 | 96% |
| Seq ID NO: 76634 | 17-151 | gi\|33139131 | 116-250 | 88% |
| Seq ID NO: 76634 | 6-145 | gi\|32324211 | 1-140 | 88% |
| Seq ID NO: 76634 | 13-279 | gi\|33139639 | 256-516 | 80% |
| Seq ID NO: 76634 | 1-145 | gi\|33140673 | 193-49 | 84% |
| Seq ID NO: 76667 | 3-64 | gi\|32325283 | 20-81 | 96% |
| Seq ID NO: 76718 | 1-84 | gi\|33139696 | 197-280 | 94% |
| Seq ID NO: 76775 | 1-149 | gi\|35505158 | 357-505 | 99% |
| Seq ID NO: 47105 | 82-256 | gi\|18080493 | 64-238 | 87% |
| Seq ID NO: 47105 | 16-36 | gi\|18080493 | 48-68 | 100% |
| Seq ID NO: 47105 | 82-254 | gi\|7144379 | 51-223 | 87% |
| Seq ID NO: 76970 | 61-82 | gi\|18090014 | 19-40 | 100% |
| Seq ID NO: 77032 | 570-679 | gi\|33139969 | 11-120 | 96% |
| Seq ID NO: 77038 | 5-123 | gi\|2707748 | 1563-1445 | 99% |
| Seq ID NO: 77038 | 5-123 | gi\|34105813 | 1562-1444 | 99% |
| Seq ID NO: 77038 | 5-123 | gi\|34105815 | 1562-1444 | 99% |
| Seq ID NO: 77038 | 17-123 | gi\|30844179 | 1550-1444 | 95% |
| Seq ID NO: 77038 | 17-123 | gi\|34105807 | 1434-1328 | 95% |
| Seq ID NO: 77038 | 17-123 | gi\|34105808 | 1545-1439 | 95% |
| Seq ID NO: 77038 | 17-123 | gi\|34105810 | 1561-1455 | 95% |
| Seq ID NO: 77038 | 17-123 | gi\|31376322 | 1492-1386 | 94% |
| Seq ID NO: 77038 | 17-123 | gi\|31376323 | 1488-1382 | 94% |
| Seq ID NO: 77038 | 17-123 | gi\|34105806 | 1558-1452 | 93% |
| Seq ID NO: 77038 | 17-123 | gi\|51093982 | 386-280 | 93% |
| Seq ID NO: 77038 | 17-123 | gi\|6983959 | 1511-1405 | 92% |
| Seq ID NO: 77038 | 17-123 | gi\|22544385 | 274-168 | 92% |
| Seq ID NO: 77038 | 17-123 | gi\|30169951 | 41-147 | 92% |
| Seq ID NO: 77038 | 17-123 | gi\|31376325 | 1503-1397 | 92% |
| Seq ID NO: 77198 | 308-501 | gi\|33140188 | 263-70 | 96% |
| Seq ID NO: 77198 | 302-469 | gi\|33140188 | 464-297 | 87% |
| Seq ID NO: 77198 | 4-91 | gi\|33140188 | 353-266 | 97% |
| Seq ID NO: 77198 | 1-88 | gi\|33140188 | 551-464 | 90% |
| Seq ID NO: 77198 | 389-469 | gi\|33140188 | 572-492 | 91% |
| Seq ID NO: 77198 | 1-60 | gi\|33140188 | 161-102 | 90% |
| Seq ID NO: 77199 | 5-155 | gi\|33140188 | 113-263 | 96% |
| Seq ID NO: 77199 | 372-521 | gi\|33140188 | 266-415 | 96% |
| Seq ID NO: 77199 | 403-519 | gi\|33140188 | 102-218 | 94% |
| Seq ID NO: 77199 | 5-161 | gi\|33140188 | 308-464 | 88% |
| Seq ID NO: 77199 | 375-483 | gi\|33140188 | 464-572 | 91% |
| Seq ID NO: 77199 | 5-74 | gi\|33140188 | 503-572 | 91% |
| Seq ID NO: 77213 | 199-266 | gi\|18090001 | 163-230 | 85% |
| Seq ID NO: 77253 | 1-146 | gi\|33139770 | 381-526 | 98% |
| Seq ID NO: 77260 | 4-60 | gi\|33140397 | 536-592 | 98% |
| Seq ID NO: 77260 | 4-58 | gi\|33139624 | 522-576 | 98% |
| Seq ID NO: 77342 | 1-101 | gi\|7144157 | 39-139 | 97% |
| Seq ID NO: 77342 | 1-101 | gi\|54549688 | 26-126 | 96% |
| Seq ID NO: 77342 | 22-101 | gi\|18083086 | 614-535 | 96% |
| Seq ID NO: 77342 | 25-101 | gi\|18090403 | 1-77 | 96% |
| Seq ID NO: 77342 | 54-75 | gi\|52129301 | 340-319 | 100% |
| Seq ID NO: 77382 | 7-92 | gi\|54546009 | 456-370 | 88% |
| Seq ID NO: 77397 | 2-222 | gi\|7144372 | 296-516 | 90% |
| Seq ID NO: 77397 | 2-214 | gi\|18081853 | 341-552 | 90% |
| Seq ID NO: 77478 | 1-43 | gi\|7144081 | 50-92 | 90% |
| Seq ID NO: 77496 | 474-494 | gi\|39747177 | 32-12 | 100% |
| Seq ID NO: 77564 | 203-337 | gi\|33140348 | 119-253 | 86% |
| Seq ID NO: 77649 | 1-160 | gi\|18081259 | 449-291 | 93% |
| Seq ID NO: 77725 | 1-24 | gi\|33139696 | 554-577 | 100% |
| Seq ID NO: 78000 | 1-163 | gi\|32324951 | 29-197 | 94% |
| Seq ID NO: 47181 | 709-827 | gi\|18080339 | 13-131 | 88% |
| Seq ID NO: 78139 | 149-236 | gi\|32324369 | 16-103 | 97% |
| Seq ID NO: 78157 | 789-809 | gi\|34025242 | 232-212 | 100% |
| Seq ID NO: 78157 | 789-809 | gi\|32322566 | 529-509 | 100% |
| Seq ID NO: 47188 | 202-341 | gi\|32324409 | 329-468 | 95% |
| Seq ID NO: 47188 | 1-90 | gi\|33139667 | 502-591 | 98% |
| Seq ID NO: 78415 | 107-386 | gi\|33140127 | 75-354 | 96% |
| Seq ID NO: 78415 | 1-44 | gi\|33140127 | 33-76 | 95% |
| Seq ID NO: 78436 | 8-67 | gi\|28916076 | 60-1 | 90% |
| Seq ID NO: 78818 | 18-77 | gi\|30028941 | 53-112 | 95% |
| Seq ID NO: 78818 | 18-77 | gi\|33140204 | 53-112 | 95% |
| Seq ID NO: 78927 | 1-110 | gi\|32325405 | 74-183 | 95% |
| Seq ID NO: 78955 | 118-142 | gi\|18089765 | 337-361 | 100% |
| Seq ID NO: 79093 | 105-368 | gi\|33139802 | 311-574 | 98% |
| Seq ID NO: 79093 | 1-63 | gi\|33139802 | 249-311 | 100% |
| Seq ID NO: 79093 | 105-344 | gi\|33140772 | 311-550 | 98% |
| Seq ID NO: 79160 | 206-305 | gi\|33139131 | 107-206 | 87% |
| Seq ID NO: 79160 | 429-458 | gi\|33139131 | 300-328 | 93% |
| Seq ID NO: 79160 | 291-313 | gi\|7143644 | 362-384 | 100% |
| Seq ID NO: 79239 | 183-270 | gi\|18083061 | 2-89 | 87% |
| Seq ID NO: 79275 | 94-131 | gi\|15767717 | 372-409 | 92% |
| Seq ID NO: 79292 | 768-882 | gi\|18082714 | 142-256 | 88% |
| Seq ID NO: 79369 | 124-211 | gi\|32325459 | 290-208 | 84% |
| Seq ID NO: 79371 | 10-86 | gi\|54547347 | 34-110 | 88% |
| Seq ID NO: 79419 | 1-110 | gi\|33139485 | 331-440 | 95% |
| Seq ID NO: 79419 | 161-248 | gi\|33139485 | 438-525 | 98% |
| Seq ID NO: 79533 | 1-179 | gi\|33140348 | 253-75 | 89% |
| Seq ID NO: 79533 | 122-160 | gi\|32324498 | 44-5 | 92% |
| Seq ID NO: 79545 | 1-68 | gi\|7143918 | 49-116 | 91% |
| Seq ID NO: 79545 | 1-42 | gi\|18382970 | 1050-1009 | 95% |
| Seq ID NO: 47286 | 317-516 | gi\|18088906 | 218-417 | 88% |
| Seq ID NO: 47286 | 106-178 | gi\|18088906 | 140-212 | 91% |
| Seq ID NO: 79576 | 77-189 | gi\|32324732 | 377-489 | 98% |
| Seq ID NO: 79576 | 1-69 | gi\|32324732 | 301-369 | 100% |
| Seq ID NO: 79602 | 60-139 | gi\|7143654 | 84-5 | 90% |
| Seq ID NO: 79614 | 287-458 | gi\|30169344 | 167-338 | 97% |
| Seq ID NO: 79614 | 1-119 | gi\|30169344 | 49-167 | 100% |
| Seq ID NO: 79729 | 1-28 | gi\|33140324 | 288-315 | 100% |
| Seq ID NO: 79741 | 94-257 | gi\|33140312 | 390-553 | 96% |
| Seq ID NO: 79741 | 94-145 | gi\|33140619 | 501-552 | 94% |
| Seq ID NO: 79818 | 1-75 | gi\|32325315 | 37-111 | 100% |
| Seq ID NO: 79818 | 18-75 | gi\|35504416 | 1-58 | 98% |
| Seq ID NO: 79818 | 32-75 | gi\|35504544 | 15-58 | 100% |
| Seq ID NO: 79818 | 36-75 | gi\|35504483 | 4-43 | 100% |
| Seq ID NO: 79885 | 1-141 | gi\|33139639 | 311-451 | 90% |
| Seq ID NO: 79885 | 1-78 | gi\|33140673 | 126-49 | 92% |
| Seq ID NO: 79885 | 32-78 | gi\|32324211 | 94-140 | 95% |
| Seq ID NO: 79893 | 1-62 | gi\|32324007 | 469-408 | 95% |
| Seq ID NO: 80017 | 17-50 | gi\|7144038 | 422-455 | 100% |
| Seq ID NO: 80102 | 5-88 | gi\|33139645 | 485-570 | 91% |
| Seq ID NO: 80192 | 397-417 | gi\|17991359 | 548-528 | 100% |
| Seq ID NO: 47324 | 1-98 | gi\|35504434 | 329-426 | 91% |
| Seq ID NO: 47325 | 416-525 | gi\|7143492 | 304-195 | 90% |
| Seq ID NO: 80394 | 1-240 | gi\|33139962 | 21-260 | 96% |
| Seq ID NO: 80394 | 295-405 | gi\|33139962 | 264-374 | 97% |
| Seq ID NO: 80394 | 199-239 | gi\|18089348 | 186-227 | 92% |
| Seq ID NO: 80422 | 39-59 | gi\|27926823 | 344-364 | 100% |
| Seq ID NO: 80601 | 50-200 | gi\|33140348 | 105-255 | 94% |
| Seq ID NO: 80601 | 8-63 | gi\|33140348 | 53-107 | 96% |
| Seq ID NO: 80601 | 50-77 | gi\|32324498 | 17-44 | 96% |
| Seq ID NO: 80750 | 67-235 | gi\|54546057 | 58-226 | 88% |
| Seq ID NO: 80750 | 12-33 | gi\|33952487 | 540-561 | 100% |
| Seq ID NO: 80750 | 12-33 | gi\|34025939 | 541-562 | 100% |
| Seq ID NO: 80750 | 205-226 | gi\|453579 | 1960-1939 | 100% |
| Seq ID NO: 80985 | 458-478 | gi\|8005746 | 172-192 | 100% |
| Seq ID NO: 81077 | 19-132 | gi\|18080124 | 72-186 | 84% |
| Seq ID NO: 81077 | 35-63 | gi\|18082691 | 129-157 | 96% |
| Seq ID NO: 81120 | 854-916 | gi\|32324217 | 4-66 | 100% |
| Seq ID NO: 81120 | 862-883 | gi\|7797944 | 63-84 | 100% |
| Seq ID NO: 47400 | 1-136 | gi\|33140804 | 236-371 | 100% |
| Seq ID NO: 47400 | 194-337 | gi\|33140804 | 372-515 | 95% |
| Seq ID NO: 81337 | 1-154 | gi\|32324094 | 298-451 | 97% |
| Seq ID NO: 81337 | 2-135 | gi\|18381585 | 1162-1029 | 87% |
| Seq ID NO: 81377 | 309-329 | gi\|30165848 | 173-193 | 100% |
| Seq ID NO: 81381 | 1-110 | gi\|33139131 | 114-225 | 87% |
| Seq ID NO: 81412 | 136-188 | gi\|32324211 | 450-502 | 90% |
| Seq ID NO: 81471 | 50-242 | gi\|18088614 | 91-283 | 87% |
| Seq ID NO: 81471 | 589-666 | gi\|18088614 | 289-366 | 93% |
| Seq ID NO: 81471 | 606-666 | gi\|32183705 | 270-330 | 88% |
| Seq ID NO: 81477 | 17-237 | gi\|18082509 | 367-587 | 90% |
| Seq ID NO: 81477 | 17-237 | gi\|54548304 | 360-580 | 90% |
| Seq ID NO: 81477 | 17-231 | gi\|54548230 | 373-587 | 88% |
| Seq ID NO: 81624 | 114-264 | gi\|33139681 | 415-565 | 98% |
| Seq ID NO: 81624 | 1-72 | gi\|33139681 | 346-417 | 98% |
| Seq ID NO: 81634 | 1-153 | gi\|7110849 | 31-183 | 91% |
| Seq ID NO: 81634 | 1-162 | gi\|54546003 | 335-496 | 87% |
| Seq ID NO: 81648 | 15-54 | gi\|28916076 | 1-40 | 97% |
| Seq ID NO: 81648 | 8-35 | gi\|159473 | 34-61 | 100% |
| Seq ID NO: 81648 | 8-35 | gi\|2454547 | 227-200 | 100% |
| Seq ID NO: 81648 | 8-35 | gi\|551594 | 194-221 | 100% |
| Seq ID NO: 81648 | 8-35 | gi\|551595 | 669-696 | 100% |
| Seq ID NO: 81648 | 8-35 | gi\|18032254 | 34-61 | 100% |
| Seq ID NO: 81648 | 12-35 | gi\|18477256 | 279-256 | 100% |
| Seq ID NO: 81648 | 12-35 | gi\|18477260 | 325-302 | 100% |
| Seq ID NO: 81648 | 12-35 | gi\|18477262 | 634-611 | 100% |
| Seq ID NO: 81648 | 8-29 | gi\|18477259 | 22-1 | 100% |
| Seq ID NO: 81648 | 8-29 | gi\|18477261 | 22-1 | 100% |
| Seq ID NO: 81648 | 8-29 | gi\|37780968 | 22-1 | 100% |
| Seq ID NO: 81702 | 17-91 | gi\|33139131 | 116-190 | 92% |
| Seq ID NO: 81702 | 6-97 | gi\|32324211 | 1-92 | 87% |
| Seq ID NO: 81703 | 84-347 | gi\|33139639 | 256-516 | 84% |
| Seq ID NO: 81703 | 77-216 | gi\|32324211 | 1-140 | 89% |
| Seq ID NO: 81703 | 71-222 | gi\|33139131 | 99-250 | 87% |
| Seq ID NO: 81703 | 66-216 | gi\|33140673 | 199-49 | 86% |
| Seq ID NO: 81813 | 589-938 | gi\|33139425 | 112-463 | 94% |
| Seq ID NO: 81813 | 429-539 | gi\|33139425 | 1-111 | 97% |
| Seq ID NO: 81813 | 664-822 | gi\|32323963 | 132-290 | 98% |
| Seq ID NO: 81813 | 877-972 | gi\|32323963 | 290-385 | 98% |
| Seq ID NO: 81813 | 877-971 | gi\|32325615 | 290-384 | 98% |
| Seq ID NO: 81813 | 427-539 | gi\|33139274 | 1-113 | 97% |
| Seq ID NO: 81813 | 429-606 | gi\|33140556 | 1-181 | 92% |
| Seq ID NO: 81813 | 666-822 | gi\|32324994 | 135-291 | 98% |
| Seq ID NO: 81813 | 428-539 | gi\|32324994 | 1-112 | 99% |
| Seq ID NO: 81813 | 877-947 | gi\|33139381 | 232-302 | 98% |
| Seq ID NO: 81813 | 487-539 | gi\|33139381 | 1-53 | 100% |
| Seq ID NO: 81813 | 427-523 | gi\|33140583 | 1-97 | 96% |
| Seq ID NO: 81817 | 452-473 | gi\|33952321 | 139-160 | 100% |
| Seq ID NO: 81839 | 16-77 | gi\|7143651 | 36-97 | 90% |
| Seq ID NO: 81895 | 515-875 | gi\|32325036 | 211-571 | 95% |
| Seq ID NO: 81895 | 472-827 | gi\|32325036 | 216-571 | 94% |
| Seq ID NO: 81895 | 563-897 | gi\|32325036 | 211-545 | 94% |
| Seq ID NO: 81895 | 514-693 | gi\|32325036 | 18-197 | 93% |
| Seq ID NO: 81895 | 482-645 | gi\|32325036 | 34-197 | 94% |
| Seq ID NO: 81895 | 610-789 | gi\|32325036 | 18-197 | 92% |
| Seq ID NO: 81895 | 562-741 | gi\|32325036 | 18-197 | 92% |
| Seq ID NO: 81895 | 658-837 | gi\|32325036 | 18-197 | 92% |
| Seq ID NO: 81895 | 706-885 | gi\|32325036 | 18-197 | 92% |
| Seq ID NO: 81895 | 754-897 | gi\|32325036 | 18-161 | 93% |
| Seq ID NO: 81895 | 472-597 | gi\|32325036 | 72-197 | 93% |
| Seq ID NO: 81895 | 48-246 | gi\|32325036 | 231-428 | 86% |
| Seq ID NO: 81895 | 1-246 | gi\|32325036 | 232-476 | 83% |
| Seq ID NO: 81895 | 137-270 | gi\|32325036 | 224-356 | 87% |
| Seq ID NO: 81895 | 48-207 | gi\|32325036 | 39-197 | 83% |
| Seq ID NO: 81895 | 138-253 | gi\|32325036 | 33-147 | 86% |
| Seq ID NO: 81895 | 1-157 | gi\|32325036 | 40-196 | 80% |
| Seq ID NO: 81895 | 470-716 | gi\|33140561 | 167-413 | 96% |
| Seq ID NO: 81895 | 520-764 | gi\|33140561 | 169-413 | 95% |
| Seq ID NO: 81895 | 568-812 | gi\|33140561 | 169-413 | 95% |
| Seq ID NO: 81895 | 616-860 | gi\|33140561 | 169-413 | 95% |
| Seq ID NO: 81895 | 664-897 | gi\|33140561 | 169-402 | 95% |
| Seq ID NO: 81895 | 457-668 | gi\|33140561 | 202-413 | 95% |
| Seq ID NO: 81895 | 1-230 | gi\|33140561 | 185-413 | 83% |
| Seq ID NO: 81895 | 691-712 | gi\|33140561 | 412-433 | 100% |
| Seq ID NO: 81895 | 835-856 | gi\|33140561 | 412-433 | 100% |
| Seq ID NO: 81895 | 547-568 | gi\|33140561 | 412-433 | 100% |
| Seq ID NO: 81895 | 787-808 | gi\|33140561 | 412-433 | 100% |
| Seq ID NO: 81895 | 643-664 | gi\|33140561 | 412-433 | 100% |
| Seq ID NO: 81895 | 739-760 | gi\|33140561 | 412-433 | 100% |
| Seq ID NO: 81895 | 595-616 | gi\|33140561 | 412-433 | 100% |
| Seq ID NO: 81895 | 499-520 | gi\|33140561 | 412-433 | 100% |
| Seq ID NO: 81895 | 534-896 | gi\|7143587 | 175-537 | 83% |
| Seq ID NO: 81895 | 486-848 | gi\|7143587 | 175-537 | 83% |
| Seq ID NO: 81895 | 484-752 | gi\|7143944 | 428-699 | 82% |
| Seq ID NO: 81895 | 724-896 | gi\|7143944 | 332-504 | 84% |
| Seq ID NO: 81895 | 630-728 | gi\|7143944 | 133-231 | 88% |
| Seq ID NO: 81895 | 582-671 | gi\|7143944 | 133-222 | 89% |
| Seq ID NO: 81895 | 534-623 | gi\|7143944 | 133-222 | 89% |
| Seq ID NO: 81895 | 774-863 | gi\|7143944 | 133-222 | 89% |
| Seq ID NO: 81895 | 486-575 | gi\|7143944 | 133-222 | 89% |
| Seq ID NO: 81895 | 822-896 | gi\|7143944 | 133-207 | 90% |
| Seq ID NO: 81895 | 678-767 | gi\|7143944 | 133-222 | 86% |
| Seq ID NO: 81895 | 470-569 | gi\|33139222 | 297-396 | 97% |
| Seq ID NO: 81895 | 520-617 | gi\|33139222 | 299-396 | 95% |
| Seq ID NO: 81895 | 760-857 | gi\|33139222 | 299-396 | 95% |
| Seq ID NO: 81895 | 616-713 | gi\|33139222 | 299-396 | 95% |
| Seq ID NO: 81895 | 568-665 | gi\|33139222 | 299-396 | 95% |
| Seq ID NO: 81895 | 712-809 | gi\|33139222 | 299-396 | 93% |
| Seq ID NO: 81895 | 664-761 | gi\|33139222 | 299-396 | 93% |
| Seq ID NO: 81895 | 808-897 | gi\|33139222 | 299-388 | 95% |
| Seq ID NO: 81895 | 457-521 | gi\|33139222 | 332-396 | 92% |
| Seq ID NO: 82088 | 73-93 | gi\|33140421 | 13-33 | 100% |
| Seq ID NO: 82094 | 18-129 | gi\|33139131 | 139-250 | 90% |
| Seq ID NO: 82094 | 31-123 | gi\|32324211 | 48-140 | 90% |
| Seq ID NO: 82094 | 1-152 | gi\|33139639 | 266-417 | 80% |
| Seq ID NO: 82109 | 19-196 | gi\|18087933 | 464-287 | 90% |
| Seq ID NO: 82109 | 19-184 | gi\|54547517 | 403-568 | 88% |
| Seq ID NO: 82109 | 19-166 | gi\|18081843 | 491-638 | 89% |
| Seq ID NO: 82109 | 19-139 | gi\|18083082 | 505-625 | 90% |
| Seq ID NO: 82109 | 66-191 | gi\|51334233 | 404-529 | 81% |
| Seq ID NO: 82142 | 1-79 | gi\|33140136 | 402-480 | 93% |
| Seq ID NO: 82163 | 122-267 | gi\|33139131 | 99-244 | 87% |
| Seq ID NO: 82163 | 128-267 | gi\|32324211 | 1-140 | 87% |
| Seq ID NO: 82166 | 2-106 | gi\|33139639 | 245-349 | 90% |
| Seq ID NO: 82166 | 1-120 | gi\|33140673 | 193-74 | 84% |
| Seq ID NO: 82199 | 66-470 | gi\|33140136 | 92-496 | 89% |
| Seq ID NO: 82221 | 1-87 | gi\|18090662 | 244-330 | 88% |
| Seq ID NO: 82256 | 59-122 | gi\|14280572 | 6490-6553 | 92% |
| Seq ID NO: 82260 | 698-718 | gi\|37972243 | 197-217 | 100% |
| Seq ID NO: 82260 | 698-718 | gi\|45566049 | 213-233 | 100% |
| Seq ID NO: 47476 | 3-211 | gi\|18089811 | 280-488 | 87% |
| Seq ID NO: 47476 | 3-167 | gi\|18080518 | 317-481 | 88% |
| Seq ID NO: 82506 | 1-174 | gi\|33140348 | 248-75 | 89% |
| Seq ID NO: 82506 | 117-155 | gi\|32324498 | 44-5 | 92% |
| Seq ID NO: 82529 | 1-86 | gi\|32324692 | 54-139 | 97% |
| Seq ID NO: 82529 | 7-86 | gi\|18082298 | 52-131 | 90% |
| Seq ID NO: 82799 | 1-40 | gi\|33140348 | 254-215 | 100% |
| Seq ID NO: 82799 | 78-135 | gi\|33140348 | 181-123 | 90% |
| Seq ID NO: 82849 | 599-663 | gi\|18080145 | 213-277 | 87% |
| Seq ID NO: 82849 | 358-380 | gi\|40670113 | 439-417 | 100% |
| Seq ID NO: 82865 | 1-127 | gi\|33140348 | 255-128 | 93% |
| Seq ID NO: 82865 | 185-227 | gi\|33140348 | 70-27 | 97% |
| Seq ID NO: 82929 | 772-793 | gi\|8930759 | 49-28 | 100% |
| Seq ID NO: 82929 | 772-793 | gi\|34026216 | 41-20 | 100% |
| Seq ID NO: 82965 | 302-322 | gi\|46984484 | 89-109 | 100% |
| Seq ID NO: 83225 | 316-338 | gi\|27540675 | 36-58 | 100% |
| Seq ID NO: 83226 | 299-358 | gi\|32325383 | 584-525 | 98% |
| Seq ID NO: 83249 | 3-237 | gi\|33139581 | 1-235 | 99% |
| Seq ID NO: 83274 | 1-55 | gi\|21393574 | 296-350 | 89% |
| Seq ID NO: 83339 | 1-268 | gi\|51093880 | 722-452 | 86% |
| Seq ID NO: 83339 | 1-252 | gi\|51093883 | 723-469 | 85% |
| Seq ID NO: 83339 | 134-268 | gi\|51093882 | 587-452 | 87% |
| Seq ID NO: 83339 | 134-252 | gi\|54545658 | 621-503 | 87% |
| Seq ID NO: 83379 | 40-139 | gi\|18081804 | 201-300 | 89% |
| Seq ID NO: 83379 | 40-130 | gi\|18088266 | 516-606 | 90% |
| Seq ID NO: 83382 | 42-429 | gi\|32325123 | 663-276 | 87% |
| Seq ID NO: 83382 | 132-519 | gi\|32325123 | 663-276 | 87% |
| Seq ID NO: 83382 | 1-384 | gi\|32325123 | 659-276 | 87% |
| Seq ID NO: 83382 | 90-474 | gi\|32325123 | 660-276 | 86% |
| Seq ID NO: 83382 | 3-294 | gi\|32325123 | 567-276 | 89% |
| Seq ID NO: 83382 | 177-526 | gi\|32325123 | 663-314 | 86% |
| Seq ID NO: 83382 | 1-204 | gi\|32325123 | 479-276 | 90% |
| Seq ID NO: 83382 | 312-530 | gi\|32325123 | 663-445 | 84% |
| Seq ID NO: 83382 | 1-87 | gi\|32325123 | 344-258 | 94% |
| Seq ID NO: 83382 | 17-165 | gi\|32325123 | 236-84 | 83% |
| Seq ID NO: 83382 | 308-435 | gi\|32325123 | 214-84 | 83% |
| Seq ID NO: 83382 | 332-384 | gi\|32325123 | 236-183 | 90% |
| Seq ID NO: 83382 | 377-429 | gi\|32325123 | 236-183 | 90% |
| Seq ID NO: 83382 | 219-345 | gi\|32325123 | 213-84 | 81% |
| Seq ID NO: 83382 | 489-519 | gi\|32325123 | 213-183 | 100% |
| Seq ID NO: 83382 | 129-159 | gi\|32325123 | 213-183 | 100% |
| Seq ID NO: 83382 | 17-75 | gi\|32325123 | 143-84 | 88% |
| Seq ID NO: 83382 | 242-294 | gi\|32325123 | 236-183 | 88% |
| Seq ID NO: 83382 | 197-255 | gi\|32325123 | 143-84 | 87% |
| Seq ID NO: 83382 | 467-525 | gi\|32325123 | 143-84 | 87% |
| Seq ID NO: 83382 | 1-24 | gi\|32325123 | 206-183 | 100% |
| Seq ID NO: 83382 | 9-30 | gi\|32325123 | 105-84 | 100% |
| Seq ID NO: 83382 | 129-519 | gi\|33139983 | 660-271 | 87% |
| Seq ID NO: 83382 | 38-519 | gi\|33139983 | 661-178 | 84% |
| Seq ID NO: 83382 | 78-474 | gi\|33139983 | 666-271 | 86% |
| Seq ID NO: 83382 | 173-526 | gi\|33139983 | 661-309 | 87% |
| Seq ID NO: 83382 | 308-530 | gi\|33139983 | 661-440 | 87% |
| Seq ID NO: 83382 | 351-519 | gi\|33139983 | 663-495 | 88% |
| Seq ID NO: 83382 | 1-337 | gi\|33139983 | 429-87 | 82% |
| Seq ID NO: 83382 | 129-513 | gi\|33139225 | 635-252 | 87% |
| Seq ID NO: 83382 | 1-378 | gi\|33139225 | 628-252 | 87% |
| Seq ID NO: 83382 | 38-423 | gi\|33139225 | 636-252 | 86% |
| Seq ID NO: 83382 | 82-464 | gi\|33139225 | 637-256 | 86% |
| Seq ID NO: 83382 | 352-519 | gi\|33139225 | 637-470 | 88% |
| Seq ID NO: 83382 | 3-159 | gi\|33139225 | 312-153 | 82% |
| Seq ID NO: 83382 | 28-384 | gi\|32324170 | 684-328 | 87% |
| Seq ID NO: 83382 | 129-474 | gi\|32324170 | 673-328 | 87% |
| Seq ID NO: 83382 | 163-519 | gi\|32324170 | 684-328 | 87% |
| Seq ID NO: 83382 | 81-519 | gi\|32324170 | 676-235 | 84% |
| Seq ID NO: 83382 | 219-528 | gi\|32324170 | 673-364 | 88% |
| Seq ID NO: 83382 | 3-439 | gi\|32324170 | 574-132 | 83% |
| Seq ID NO: 83382 | 253-526 | gi\|32324170 | 684-411 | 87% |
| Seq ID NO: 83382 | 1-357 | gi\|32324170 | 486-124 | 82% |
| Seq ID NO: 83382 | 350-530 | gi\|32324170 | 677-497 | 87% |
| Seq ID NO: 83382 | 1-78 | gi\|32324170 | 666-589 | 96% |
| Seq ID NO: 83382 | 433-528 | gi\|32324170 | 684-589 | 90% |
| Seq ID NO: 83382 | 222-519 | gi\|33140346 | 602-302 | 86% |
| Seq ID NO: 83382 | 132-429 | gi\|33140346 | 602-302 | 86% |
| Seq ID NO: 83382 | 42-428 | gi\|33140346 | 602-210 | 83% |
| Seq ID NO: 83382 | 1-338 | gi\|33140346 | 553-210 | 83% |
| Seq ID NO: 83382 | 357-526 | gi\|33140346 | 602-433 | 90% |
| Seq ID NO: 83382 | 17-87 | gi\|33140346 | 168-97 | 91% |
| Seq ID NO: 83382 | 377-439 | gi\|33140346 | 168-105 | 90% |
| Seq ID NO: 83382 | 492-528 | gi\|33140346 | 602-566 | 100% |
| Seq ID NO: 83382 | 467-529 | gi\|33140346 | 168-105 | 89% |
| Seq ID NO: 83382 | 332-394 | gi\|33140346 | 168-105 | 89% |
| Seq ID NO: 83382 | 107-169 | gi\|33140346 | 168-105 | 89% |
| Seq ID NO: 83382 | 197-259 | gi\|33140346 | 168-105 | 89% |
| Seq ID NO: 83382 | 377-434 | gi\|33140346 | 75-17 | 90% |
| Seq ID NO: 83382 | 17-74 | gi\|33140346 | 75-17 | 90% |
| Seq ID NO: 83382 | 1-114 | gi\|33140346 | 418-302 | 82% |
| Seq ID NO: 83382 | 1-34 | gi\|33140346 | 138-105 | 97% |
| Seq ID NO: 83382 | 332-389 | gi\|33140346 | 75-17 | 88% |
| Seq ID NO: 83382 | 107-164 | gi\|33140346 | 75-17 | 88% |
| Seq ID NO: 83382 | 467-524 | gi\|33140346 | 75-17 | 88% |
| Seq ID NO: 83382 | 197-254 | gi\|33140346 | 75-17 | 88% |
| Seq ID NO: 83382 | 1-29 | gi\|33140346 | 45-17 | 96% |
| Seq ID NO: 83382 | 197-384 | gi\|33140426 | 442-254 | 88% |
| Seq ID NO: 83382 | 332-519 | gi\|33140426 | 442-254 | 88% |
| Seq ID NO: 83382 | 287-474 | gi\|33140426 | 442-254 | 87% |
| Seq ID NO: 83382 | 242-429 | gi\|33140426 | 442-254 | 88% |
| Seq ID NO: 83382 | 107-294 | gi\|33140426 | 442-254 | 87% |
| Seq ID NO: 83382 | 1-159 | gi\|33140426 | 412-254 | 89% |
| Seq ID NO: 83382 | 17-204 | gi\|33140426 | 442-254 | 86% |
| Seq ID NO: 83382 | 377-528 | gi\|33140426 | 442-290 | 88% |
| Seq ID NO: 83382 | 62-249 | gi\|33140426 | 442-254 | 86% |
| Seq ID NO: 83382 | 3-87 | gi\|33140426 | 320-236 | 91% |
| Seq ID NO: 83382 | 28-169 | gi\|32325556 | 222-78 | 83% |
| Seq ID NO: 83382 | 298-439 | gi\|32325556 | 222-78 | 82% |
| Seq ID NO: 83382 | 208-357 | gi\|32325556 | 222-70 | 80% |
| Seq ID NO: 83382 | 478-519 | gi\|32325556 | 222-181 | 92% |
| Seq ID NO: 83382 | 17-153 | gi\|32324836 | 149-10 | 83% |
| Seq ID NO: 83382 | 377-513 | gi\|32324836 | 149-10 | 82% |
| Seq ID NO: 83382 | 197-329 | gi\|32324836 | 149-14 | 81% |
| Seq ID NO: 83382 | 107-243 | gi\|32324836 | 149-10 | 81% |
| Seq ID NO: 83382 | 467-519 | gi\|32324836 | 149-97 | 90% |
| Seq ID NO: 83382 | 1-104 | gi\|32324836 | 120-14 | 81% |
| Seq ID NO: 83382 | 38-161 | gi\|33139487 | 219-93 | 83% |
| Seq ID NO: 83382 | 350-384 | gi\|33139487 | 222-188 | 97% |
| Seq ID NO: 83382 | 219-339 | gi\|33139487 | 218-95 | 81% |
| Seq ID NO: 83382 | 398-429 | gi\|33139487 | 219-188 | 96% |
| Seq ID NO: 83382 | 43-153 | gi\|33139115 | 124-11 | 83% |
| Seq ID NO: 83382 | 133-243 | gi\|33139115 | 124-11 | 82% |
| Seq ID NO: 83382 | 403-513 | gi\|33139115 | 124-11 | 82% |
| Seq ID NO: 83382 | 223-329 | gi\|33139115 | 124-15 | 82% |
| Seq ID NO: 83382 | 493-519 | gi\|33139115 | 124-98 | 100% |
| Seq ID NO: 83382 | 358-384 | gi\|33139115 | 124-98 | 100% |
| Seq ID NO: 83407 | 61-104 | gi\|54546446 | 55-98 | 90% |
| Seq ID NO: 83502 | 3-97 | gi\|18090256 | 296-390 | 90% |
| Seq ID NO: 83531 | 1-55 | gi\|33140348 | 201-255 | 98% |
| Seq ID NO: 83556 | 31-110 | gi\|54547037 | 1-80 | 86% |
| Seq ID NO: 83556 | 32-110 | gi\|54547033 | 1-79 | 86% |
| Seq ID NO: 83658 | 281-303 | gi\|33138709 | 165-143 | 100% |
| Seq ID NO: 83658 | 337-357 | gi\|28916076 | 280-260 | 100% |
| Seq ID NO: 83678 | 289-309 | gi\|37853736 | 373-393 | 100% |
| Seq ID NO: 83731 | 1-134 | gi\|32324631 | 49-182 | 94% |
| Seq ID NO: 83731 | 1-107 | gi\|33139363 | 49-152 | 92% |
| Seq ID NO: 83737 | 18-39 | gi\|31326189 | 232-211 | 100% |
| Seq ID NO: 83765 | 226-357 | gi\|7144169 | 364-495 | 87% |
| Seq ID NO: 83765 | 274-335 | gi\|18081294 | 455-516 | 91% |
| Seq ID NO: 83765 | 274-358 | gi\|18089822 | 443-527 | 91% |
| Seq ID NO: 83781 | 408-429 | gi\|17971089 | 242-221 | 100% |
| Seq ID NO: 83828 | 539-605 | gi\|33139668 | 557-491 | 92% |
| Seq ID NO: 83828 | 386-419 | gi\|33139668 | 530-497 | 94% |
| Seq ID NO: 83828 | 347-368 | gi\|33139668 | 530-509 | 100% |
| Seq ID NO: 83828 | 35-56 | gi\|33139668 | 530-509 | 100% |
| Seq ID NO: 83828 | 230-251 | gi\|33139668 | 530-509 | 100% |
| Seq ID NO: 83828 | 566-605 | gi\|33139848 | 530-491 | 97% |
| Seq ID NO: 83855 | 27-51 | gi\|33140021 | 1-25 | 100% |
| Seq ID NO: 47578 | 1-101 | gi\|18382566 | 65-165 | 88% |
| Seq ID NO: 47578 | 7-101 | gi\|18089815 | 2-96 | 88% |
| Seq ID NO: 47578 | 64-98 | gi\|21493534 | 40-74 | 91% |
| Seq ID NO: 84076 | 75-164 | gi\|18081616 | 391-302 | 87% |
| Seq ID NO: 84205 | 295-402 | gi\|18079959 | 358-465 | 82% |
| Seq ID NO: 84241 | 159-179 | gi\|52127565 | 269-249 | 100% |
| Seq ID NO: 84390 | 75-97 | gi\|34028088 | 28-50 | 100% |
| Seq ID NO: 84419 | 109-281 | gi\|33139639 | 255-428 | 88% |
| Seq ID NO: 84419 | 96-242 | gi\|33140673 | 195-49 | 89% |
| Seq ID NO: 84522 | 1-73 | gi\|33140257 | 196-268 | 98% |
| Seq ID NO: 84522 | 44-73 | gi\|32324393 | 1-30 | 100% |
| Seq ID NO: 84576 | 73-112 | gi\|21393592 | 395-434 | 90% |
| Seq ID NO: 84645 | 275-323 | gi\|7143520 | 433-385 | 91% |
| Seq ID NO: 84648 | 6-28 | gi\|35504845 | 119-97 | 100% |
| Seq ID NO: 84664 | 125-168 | gi\|33139131 | 293-336 | 93% |
| Seq ID NO: 84696 | 527-650 | gi\|35504896 | 483-606 | 96% |
| Seq ID NO: 84696 | 1-127 | gi\|35504896 | 213-339 | 96% |
| Seq ID NO: 84696 | 189-267 | gi\|35504896 | 337-415 | 97% |
| Seq ID NO: 84696 | 473-526 | gi\|35504896 | 413-466 | 98% |
| Seq ID NO: 84696 | 40-98 | gi\|7143674 | 296-354 | 93% |
| Seq ID NO: 84696 | 42-98 | gi\|7144456 | 296-352 | 92% |
| Seq ID NO: 84696 | 40-92 | gi\|18382222 | 454-506 | 94% |
| Seq ID NO: 84696 | 40-89 | gi\|18090122 | 491-540 | 94% |
| Seq ID NO: 84696 | 55-92 | gi\|18381283 | 389-426 | 94% |
| Seq ID NO: 84779 | 145-167 | gi\|46985397 | 123-101 | 100% |
| Seq ID NO: 84814 | 20-58 | gi\|28916076 | 1-41 | 92% |
| Seq ID NO: 47631 | 473-497 | gi\|54549558 | 143-167 | 100% |
| Seq ID NO: 84950 | 15-54 | gi\|28916076 | 1-40 | 97% |
| Seq ID NO: 84950 | 8-35 | gi\|159473 | 34-61 | 100% |
| Seq ID NO: 84950 | 8-35 | gi\|2454547 | 227-200 | 100% |
| Seq ID NO: 84950 | 8-35 | gi\|551594 | 194-221 | 100% |
| Seq ID NO: 84950 | 8-35 | gi\|551595 | 669-696 | 100% |
| Seq ID NO: 84950 | 8-35 | gi\|18032254 | 34-61 | 100% |
| Seq ID NO: 84950 | 12-35 | gi\|18477256 | 279-256 | 100% |
| Seq ID NO: 84950 | 12-35 | gi\|18477260 | 325-302 | 100% |
| Seq ID NO: 84950 | 12-35 | gi\|18477262 | 634-611 | 100% |
| Seq ID NO: 84950 | 8-29 | gi\|18477259 | 22-1 | 100% |
| Seq ID NO: 84950 | 8-29 | gi\|18477261 | 22-1 | 100% |
| Seq ID NO: 84950 | 8-29 | gi\|37780968 | 22-1 | 100% |
| Seq ID NO: 84996 | 246-365 | gi\|32324211 | 375-494 | 84% |

Table 2 Legend:
¹H. glycines Clone ID No as set forth in Sequence Listing feature fields; searching the H. glycines sequence identifier in column 1 identifies the corresponding SEQ ID NO for that sequence
²nucleotide position in SEQ ID NO corresponding to Clone ID No in column 1 that matches with position of sequence of GeneID in adjacent cell on same row of table 2
³GeneID number of corresponding matching sequence hit from public database that matches with position of Clone ID No from column 1; derivative organism information is associated with the GeneID No.
⁴nucleotide position in GeneID that matches with nucleotides specified on same row corresponding to sequence of Clone ID SEQ ID NO
⁵per cent identity between the two sequences in Clone ID and GeneID

[0115] Surprisingly the inventors have also discovered that some polynucleotides of the present invention exhibit homology with various insect pests of plants and animals, as illustrated in Table 3. This provides an opportunity to express in plant cells polynucleotides exemplified in Table 3 as double stranded RNA sequences, providing control of many of these insect pests of plants and animals. Mosquitoes, for example, are well known as vectors for spreading malaria, yellow fever, encephalitis, filarial parasites and other serious diseases. Male mosquitoes feed exclusively on plant nectar and on plant cell exudates, and female mosquitoes feed on plants when a blood meal is not available. The present invention therefore provides a means for applying the exemplary sequences as dsRNA molecules expressed in plant cells as a means for controlling nematode and insect pests by expression of sequences identified as representative of common sequences between the two species.

TABLE 3
SCN vcDNA Sequences and Insect Nucleotide Sequence Homologous

| SEQ ID NO¹ | Position² | Gene ID³ | Position⁴ | % identity⁵ | Genus species⁶ |
|---|---|---|---|---|---|
| Seq ID NO: 68821 | 138-159 | CRA\|agCT42044 | 945-966 | 100% | Anopheles gambiae |
| Seq ID NO: 79019 | 537-557 | CRA\|agCT43147 | 1437-1457 | 100% | Anopheles gambiae |
| Seq ID NO: 47443 | 622-642 | CRA\|agCT43876 | 833-853 | 100% | Anopheles gambiae |
| Seq ID NO: 73243 | 46-69 | CRA\|agCT44110 | 215-238 | 100% | Anopheles gambiae |
| Seq ID NO: 54820 | 116-136 | CRA\|agCT44330 | 197-177 | 100% | Anopheles gambiae |
| Seq ID NO: 65924 | 13-33 | CRA\|agCT44378 | 3440-3460 | 100% | Anopheles gambiae |
| Seq ID NO: 53889 | 589-609 | CRA\|agCT44871 | 13437-13457 | 100% | Anopheles gambiae |
| Seq ID NO: 66729 | 38-59 | CRA\|agCT45079 | 733-754 | 100% | Anopheles gambiae |
| Seq ID NO: 60455 | 259-279 | CRA\|agCT45391 | 1624-1644 | 100% | Anopheles gambiae |
| Seq ID NO: 69523 | 121-145 | CRA\|agCT45432 | 192-216 | 96% | Anopheles gambiae |
| Seq ID NO: 80670 | 47-67 | CRA\|agCT46846 | 1180-1160 | 100% | Anopheles gambiae |
| Seq ID NO: 81791 | 47-69 | CRA\|agCT46968 | 1752-1730 | 100% | Anopheles gambiae |
| Seq ID NO: 67053 | 313-339 | CRA\|agCT47874 | 1073-1098 | 96% | Anopheles gambiae |
| Seq ID NO: 59568 | 697-718 | CRA\|agCT48203 | 192-171 | 100% | Anopheles gambiae |
| Seq ID NO: 72334 | 238-258 | CRA\|agCT49436 | 729-749 | 100% | Anopheles gambiae |
| Seq ID NO: 63951 | 103-123 | CRA\|agCT49483 | 652-672 | 100% | Anopheles gambiae |
| Seq ID NO: 62555 | 130-150 | CRA\|agCT51096 | 2549-2569 | 100% | Anopheles gambiae |
| Seq ID NO: 46459 | 342-364 | CRA\|agCT51427 | 215-237 | 100% | Anopheles gambiae |
| Seq ID NO: 66786 | 307-327 | CRA\|agCT52597 | 1900-1920 | 100% | Anopheles gambiae |
| Seq ID NO: 68784 | 4-24 | CRA\|agCT55082 | 20600-20620 | 100% | Anopheles gambiae |
| Seq ID NO: 53634 | 761-804 | CRA\|agCT55207 | 620-577 | 89% | Anopheles gambiae |
| Seq ID NO: 53634 | 754-774 | CRA\|agCT55207 | 597-577 | 100% | Anopheles gambiae |
| Seq ID NO: 53635 | 58-101 | CRA\|agCT55207 | 577-620 | 89% | Anopheles gambiae |
| Seq ID NO: 53635 | 88-108 | CRA\|agCT55207 | 577-597 | 100% | Anopheles gambiae |
| Seq ID NO: 73360 | 270-291 | CRA\|agCT55621 | 744-723 | 100% | Anopheles gambiae |
| Seq ID NO: 82401 | 107-127 | CRA\|agCT55677 | 848-868 | 100% | Anopheles gambiae |
| Seq ID NO: 55012 | 650-670 | EBI\|221 | 281-261 | 100% | Anopheles gambiae |
| Seq ID NO: 78551 | 90-110 | EBI\|2300 | 624-644 | 100% | Anopheles gambiae |
| Seq ID NO: 68299 | 84-105 | EBI\|2307 | 2080-2101 | 100% | Anopheles gambiae |
| Seq ID NO: 47206 | 84-105 | EBI\|2307 | 2080-2101 | 100% | Anopheles gambiae |
| Seq ID NO: 68556 | 241-262 | EBI\|4053 | 3009-3030 | 100% | Anopheles gambiae |
| Seq ID NO: 70190 | 174-194 | EBI\|4283 | 5460-5440 | 100% | Anopheles gambiae |
| Seq ID NO: 53886 | 405-425 | EBI\|5326 | 2105-2085 | 100% | Anopheles gambiae |
| Seq ID NO: 70190 | 243-266 | EBI\|8982 | 1366-1389 | 100% | Anopheles gambiae |
| Seq ID NO: 51267 | 164-184 | EBI\|9090 | 121-141 | 100% | Anopheles gambiae |
| Seq ID NO: 55175 | 12-41 | gi\|11119314 | 36-7 | 100% | Andrya cuniculi |
| Seq ID NO: 66692 | 12-41 | gi\|11119314 | 36-7 | 100% | Andrya cuniculi |
| Seq ID NO: 55175 | 12-41 | gi\|11119315 | 36-7 | 100% | Paranoplocephala sp. |
| Seq ID NO: 66692 | 12-41 | gi\|11119315 | 36-7 | 100% | Paranoplocephala sp. |
| Seq ID NO: 55175 | 12-41 | gi\|11119317 | 36-7 | 100% | Paranoplocephala arctica |
| Seq ID NO: 66692 | 12-41 | gi\|11119317 | 36-7 | 100% | Paranoplocephala arctica |
| Seq ID NO: 55175 | 12-41 | gi\|11119319 | 36-7 | 100% | Paranoplocephala serrata |
| Seq ID NO: 66692 | 12-41 | gi\|11119319 | 36-7 | 100% | Paranoplocephala serrata |
| Seq ID NO: 47304 | 674-696 | gi\|23186984 | 477-499 | 100% | Echinococcus granulosus |
| Seq ID NO: 77038 | 16-43 | gi\|2463301 | 112-85 | 96% | Neogryporhynchus cheilancristrotus |
| Seq ID NO: 59901 | 75-96 | gi\|31365321 | 176-155 | 100% | Toxoptera citricida |
| Seq ID NO: 51042 | 482-505 | gi\|31365444 | 320-297 | 100% | Toxoptera citricida |
| Seq ID NO: 77354 | 97-117 | gi\|31365580 | 644-664 | 100% | Toxoptera citricida |
| Seq ID NO: 82622 | 494-514 | gi\|37804570 | 57-77 | 100% | Rhopalosiphum padi |
| Seq ID NO: 66861 | 73-95 | gi\|46996593 | 400-378 | 100% | Acyrthosiphon pisum |
| Seq ID NO: 64007 | 76-96 | gi\|46996721 | 468-448 | 100% | Acyrthosiphon pisum |
| Seq ID NO: 60081 | 70-96 | gi\|46998065 | 535-562 | 96% | Acyrthosiphon pisum |
| Seq ID NO: 54610 | 316-337 | gi\|46998427 | 300-279 | 100% | Acyrthosiphon pisum |
| Seq ID NO: 47304 | 674-695 | gi\|47163116 | 387-408 | 100% | Echinococcus granulosus |
| Seq ID NO: 62977 | 216-237 | gi\|47514887 | 260-281 | 100% | Acyrthosiphon pisum |
| Seq ID NO: 58768 | 293-314 | gi\|47517134 | 76-55 | 100% | Acyrthosiphon pisum |
| Seq ID NO: 63826 | 72-92 | gi\|47522032 | 581-561 | 100% | Acyrthosiphon pisum |
| Seq ID NO: 82094 | 183-203 | gi\|47533062 | 209-189 | 100% | Acyrthosiphon pisum |
| Seq ID NO: 72433 | 558-578 | gi\|47536611 | 364-384 | 100% | Acyrthosiphon pisum |
| Seq ID NO: 57774 | 203-223 | gi\|47536768 | 381-401 | 100% | Acyrthosiphon pisum |
| Seq ID NO: 55175 | 12-41 | gi\|54306309 | 36-7 | 100% | Anoplocephaloides cf. |
| Seq ID NO: 66692 | 12-41 | gi\|54306309 | 36-7 | 100% | Anoplocephaloides cf. |
| Seq ID NO: 55175 | 12-41 | gi\|54306311 | 36-7 | 100% | Anoplocephaloides kontrimavichusi |
| Seq ID NO: 66692 | 12-41 | gi\|54306311 | 36-7 | 100% | Anoplocephaloides kontrimavichusi |
| Seq ID NO: 55175 | 12-41 | gi\|54306312 | 36-7 | 100% | Anoplocephaloides lemmi |
| Seq ID NO: 66692 | 12-41 | gi\|54306312 | 36-7 | 100% | Anoplocephaloides lemmi |
| Seq ID NO: 55175 | 12-41 | gi\|54306316 | 36-7 | 100% | Andrya rhopalocephala |
| Seq ID NO: 66692 | 12-41 | gi\|54306316 | 36-7 | 100% | Andrya rhopalocephala |
| Seq ID NO: 55175 | 12-41 | gi\|54306318 | 36-7 | 100% | Diandrya composita |
| Seq ID NO: 66692 | 12-41 | gi\|54306318 | 36-7 | 100% | Diandrya composita |
| Seq ID NO: 55175 | 12-41 | gi\|54306319 | 36-7 | 100% | Mosgovoyia pectinata |
| Seq ID NO: 66692 | 12-41 | gi\|54306319 | 36-7 | 100% | Mosgovoyia pectinata |
| Seq ID NO: 55175 | 12-41 | gi\|54306320 | 36-7 | 100% | Moniezia sp. |
| Seq ID NO: 66692 | 12-41 | gi\|54306320 | 36-7 | 100% | Moniezia sp. |
| Seq ID NO: 55175 | 12-41 | gi\|54306321 | 36-7 | 100% | Monoecocestus americanus |
| Seq ID NO: 66692 | 12-41 | gi\|54306321 | 36-7 | 100% | Monoecocestus americanus |
| Seq ID NO: 55175 | 12-41 | gi\|54306322 | 36-7 | 100% | Paranoplocephala blanchardi |
| Seq ID NO: 66692 | 12-41 | gi\|54306322 | 36-7 | 100% | Paranoplocephala blanchardi |
| Seq ID NO: 55175 | 12-41 | gi\|54306323 | 36-7 | 100% | Paranoplocephala etholeni |
| Seq ID NO: 66692 | 12-41 | gi\|54306323 | 36-7 | 100% | Paranoplocephala etholeni |
| Seq ID NO: 55175 | 12-41 | gi\|54306324 | 36-7 | 100% | Paranoplocephala fellmani |
| Seq ID NO: 66692 | 12-41 | gi\|54306324 | 36-7 | 100% | Paranoplocephala fellmani |
| Seq ID NO: 55175 | 12-41 | gi\|54306325 | 36-7 | 100% | Paranoplocephala gracilis |
| Seq ID NO: 66692 | 12-41 | gi\|54306325 | 36-7 | 100% | Paranoplocephala gracilis |
| Seq ID NO: 55175 | 12-41 | gi\|54306326 | 36-7 | 100% | Paranoplocephala longivaginata |
| Seq ID NO: 66692 | 12-41 | gi\|54306326 | 36-7 | 100% | Paranoplocephala longivaginata |
| Seq ID NO: 55175 | 12-41 | gi\|54306327 | 36-7 | 100% | Paranoplocephala macrocephala |
| Seq ID NO: 66692 | 12-41 | gi\|54306327 | 36-7 | 100% | Paranoplocephala macrocephala |
| Seq ID NO: 55175 | 12-41 | gi\|54306328 | 36-7 | 100% | Paranoplocephala cf. |
| Seq ID NO: 66692 | 12-41 | gi\|54306328 | 36-7 | 100% | Paranoplocephala cf. |
| Seq ID NO: 55175 | 12-41 | gi\|54306329 | 36-7 | 100% | Paranoplocephala kalelai |
| Seq ID NO: 66692 | 12-41 | gi\|54306329 | 36-7 | 100% | Paranoplocephala kalelai |
| Seq ID NO: 55175 | 12-41 | gi\|54306331 | 36-7 | 100% | Paranoplocephala primordialis |
| Seq ID NO: 66692 | 12-41 | gi\|54306331 | 36-7 | 100% | Paranoplocephala primordialis |
| Seq ID NO: 55175 | 12-41 | gi\|54306332 | 36-7 | 100% | Schizorchis sp. |
| Seq ID NO: 66692 | 12-41 | gi\|54306332 | 36-7 | 100% | Schizorchis sp. |
| Seq ID NO: 60083 | 406-426 | gi\|55794409 | 449-429 | 100% | Acyrthosiphon pisum |
| Seq ID NO: 62688 | 3-23 | gi\|55802365 | 769-789 | 100% | Acyrthosiphon pisum |
| Seq ID NO: 82614 | 269-290 | gi\|55803329 | 472-493 | 100% | Acyrthosiphon pisum |
| Seq ID NO: 54865 | 19-41 | gi\|55806106 | 709-731 | 100% | Acyrthosiphon pisum |
| Seq ID NO: 65500 | 126-146 | gi\|55810448 | 308-328 | 100% | Acyrthosiphon pisum |
| Seq ID NO: 80198 | 225-245 | gi\|55810583 | 245-265 | 100% | Acyrthosiphon pisum |
| Seq ID NO: 51184 | 74-94 | gi\|55814836 | 337-317 | 100% | Acyrthosiphon pisum |
| Seq ID NO: 52762 | 1-36 | gi\|6467344 | 700-665 | 91% | Duplicibothrium paulum |

Table 3 Legend:
¹H. glycines Clone ID No as set forth in Sequence Listing feature fields; searching the H. glycines sequence identifier in column 1 identifies the corresponding SEQ ID NO for that sequence
²nucleotide position in SEQ ID NO corresponding to Clone ID No in column 1 that matches with position of sequence of GeneID in column 3 on same row
³GeneID number of corresponding matching sequence hit from public database that matches with position of Clone ID No from column 1; information in table is sorted by column 3
⁴GeneID nucleotide position in column 3 that matches with nucleotides specified on same row corresponding to sequence of SCN Clone ID
⁵per cent identity between the two sequences in Clone ID and GeneID (comparison of identity between column 2 and column 4 sequences)
⁶Genus and species of organism corresponding to gene sequence set forth in Column 3

### Example 6

[0116] This example illustrates the suppression of one or more genes in a soybean cyst nematode by providing in the diet of the nematode a double stranded RNA consisting of a nucleotide sequence that is complementary to the messenger RNA sequence expressed from the one or more soybean cyst nematode genes.

[0117] Soybean cyst nematode J2 larvae are treated with a double stranded RNA derived from a nucleotide sequence selected from the group consisting of SEQ ID NO:1-SEQ ID NO:97729 in a soaking assay as described in WO 03052110. Briefly, freshly hatched nematode larvae are treated in a soaking buffer (10 mM octopamine in M9 salts, 1 mg/ml FITC in DMF) with or without 2 microgram/microliter of dsRNA for four hours at room temperature. Larvae ingesting the solution are fluorescent. The fluorescent larvae are separated from non-fluorescent larvae, then inoculated into soil containing a germinated soybean seedling. The number of cysts on each plant are counted about 35 days after inoculation. The tested dsRNA molecules that demonstrate significant reduction in the number of cysts counted are then made into plant expression cassettes contained in DNA constructs designed for plant cell transformation. DNA constructs generally comprise constitutive promoters that cause transcription of a linked DNA that transcribes a dsRNA. Promoters that may exhibit enhanced expression in root tissue may be particularly useful for expressing dsRNA effective against soybean cyst nematodes.

[0118] These DNA constructs are transformed into soybean plant cells and the cells regenerated into plants. The plants are tested either as Ro plants for nematode resistance or seed is collected and the R1 seed is germinated and the R1 plant roots tested for nematode resistance. Resistance is demonstrated if the transgenic plants have a significant reduction in cyst number or cyst development.

### Example 7

[0119] This example describes DNA constructs and the expression of a chimeric RNA molecule of the present invention in a transgenic soybean plant cell. The DNA constructs described herein comprise a promoter that causes transcription of an operably linked DNA into an RNA in a soybean cell, the DNA and the transcribed RNA of one or more segments exhibiting homology or complementarity to a soybean cyst nematode contiguous at least about 21-mer nucleotide sequence (DNA or RNA). Exemplary soybean cyst nematode DNA segments were previously described in Table 1 and are further identified in the Sequence Listing as SEQ ID NO:1-SEQ ID NO:45568. When expressed in a plant cell, the DNA construct provides an RNA transcript molecule comprising a self-complimentary segment, a portion of which folds into a double stranded RNA (dsRNA). Detection of the RNA transcript expressed in a cell or tissue of a transgenic plant is diagnostic for the DNA construct(s) that comprises a region of a soybean cyst nematode DNA molecule, and demonstrates that the DNA segment from which the dsRNA molecule is derived is transcribed/expressed in the transgenic soybean cells. Therefore, the transcribed RNA becomes available in the diet of the nematode as it feeds on a plant root cell. The RNA comprises a region that is double stranded and is complementary to a naturally occurring polynucleic acid molecule contained in a soybean cyst nematode cell, and when ingested by the nematode results in suppression of the normal level of the naturally occurring molecule.

[0120] Exemplary DNA constructs of the present invention have various regulatory elements that provide transcription or enhance expression or stability of an RNA molecule transcribed from a transgene in a plant cell. For example, a promoter element of a DNA construct of the present invention provides expression of an RNA transcript in a plant cell. Promoters, which can cause the transcription of a linked heterologous DNA are generally known in the art, for example, DNA plant virus promoters (P-CaMV35S, U.S. Pat. Nos. 5,352,605 and 5,196,525, comprising a duplicated enhancer region herein referred to as P-e35S; P-FMV35S, U.S. Pat. Nos. 5,378,619 and 5,018,100, herein incorporated by reference in their entirety), and various plant derived promoters, for example, plant actin promoters (P-Os.Act, U.S. Pat. Nos. 5,641,876 and 6,429,357, herein incorporated by reference in their entirety), and chimeric promoters, for example, P-FMV-Elf1α (U.S. Pat. No. 6,660,911 and other chimeric promoters disclosed therein, herein incorporated by reference in their entirety). Additionally, promoters that provide enhanced expression in root cells relative to other plant cells, may be tested and selected to express the RNA molecules of the present invention. The DNA constructs described in this example utilize the P-e35S and P-FMV promoters to drive the transcription of a DNA and expression of a dsRNA that exhibits homology to a portion of a soybean cyst nematode nucleotide sequence. For example, a nucleotide sequence was assembled consisting of two segments, the forward and reverse nucleotide sequence of SEQ ID NO:22219 from nucleotide position 552-699, linked by an amorphous 20-200 nucleotide segment that did not exhibit any known complementarity to the SCN genome sequences. Bioinformatics analysis indicates that the nucleotide sequence of SEQ ID NO:22219 corresponds to an open reading frame encoding an SCN specific proteasome A-type subunit peptide referred to herein as Pas-4. This chimeric sequence was incorporated into plant expression vectors for use in testing dsRNA mediated suppression of the pas-4 target gene. The DNA constructs 5749 (P-FMV/Pas-4-dsRNA/E6 3′ UTR) was thus assembled and comprises the necessary transfer molecules and regulatory molecules to provide integration into the genome of plant cells and expression of the dsRNA molecule therein.

[0121] The DNA constructs comprise a T-DNA region that is transferred into the genome of a plant cell by an Agrobacterium- or Rhizobium-mediated plant cell transformation method, and additional regulatory elements, for example, a 3′ untranslated region (3′ UTR) of the SIE6-3B gene from Gossypium barbadense, herein referred to as E6 3′ UTR (John Plant Mol Biol 30:297-306, 1996, NCBI accession U30508, nucleotide position from about 992-1304). The DNA construct 5749 (P-FMV/Pas-4-dsRNA/E6 3′ UTR) was transferred into Agrobacterium rhizogenes strain.

[0122] A transgenic root culture of soybean has been shown to support soybean cyst nematode infection and is useful for the expression of transgenes (Narayanan, et al., Crop Sci. 39:1680-1686, 1999 and Cho et al., Planta (2000) 210:195-204). Agrobacterium rhizogenes transformed to contain the described DNA construct 5749 was used to transformed soybean cells and create independent transgenic root cultures, referred to herein as events 5749-1, etc. Tissues from the transgenic root cultures were assayed for expression of the chimeric SCN gene suppression RNA molecule. Transgenic root tissues were selected using appropriate selection pressures. Transgenic root tissues from each event were screened for the presence of the fluorescence marker expression that was integrated into and adjacent to the dsRNA expression construct. The transgenic root tissues were also screened for the presence of siRNA segments produced from exposure to the root tissue cells' endogenous DICER molecules. siRNA segments were screened for identity to segments of the corresponding dsRNA coding sequences expressed from the plasmid construct expression cassettes. Methods for detecting the presence of an expressed RNA in a cell are known in the art. For example, in this example, the presence of the 3′ UTR was detected using primers that functioned to amplify the UTR sequence from the expressed RNA sequence. A TAQMAN method was then used along with a 3′ UTR specific fluorescence probe to detect the UTR as well as provide information on the relative level of expression from the construct. The data is shown in Table 4.

TABLE 4
Levels of Pas-4-dsRNA in Transgenic Soybean Root Cells.

| Event | Ave fluorescense | St Dev | siRNA Northern |
|---|---|---|---|
| Vector control | 0.00 | 0.00 | ND |
| 5749-1 | 2.30 | 1.05 | + |
| 5749-3 | 3.83 | 1.39 | + |
| 5749-4 | 5.47 | 2.44 | + |
| 5749-5 | 3.73 | 0.64 | + |
| 5749-8 | 0.45 | 0.14 | ND |
| 5749-10 | 0.16 | 0.02 | ND |
| 5749-11 | 0.24 | 0.04 | + |
| 5749-12 | 0.33 | 0.17 | ND |
| 5749-A | 3.14 | 0.70 | + |
| 5749-B | 2.91 | 0.27 | + |

ND—not detected

[0123] The data in Table 4 indicates that ten events comprising the Pas-4-dsRNA contained detectable levels of the RNA molecule. Northern blot analysis of these events showed detectable levels of siRNA that specifically hybridizes to DNA probes made from a homologous fragment of the Pas-4 coding region. These results demonstrate that soybean cells can be transformed with DNA constructs for expression of dsRNA molecules specific for gene suppression of SCN target genes, and that the transformed plant cells recognize the RNA molecules and dice them into detectable siRNA molecules that may be useful for specific gene suppression of the target gene(s) when provided in the diet of soybean cyst nematodes.

[0124] All patent publications cited in this specification are incorporated herein by reference to the same extent as if each individual publication or patent application was specifically and individually indicated to be incorporated by reference.

[0125] The Sequence Listing is submitted along with this specification on two compact discs. One disc is labeled ‘Sequence Listing’ according to 37 CFR §1.52(e)(4), and the other disc is labeled ‘CRF’ (computer readable form) according to 37 CFR §1.821(e). Each disc contains a single 271,645 kilo-byte text file labeled ‘SCN_seqListing.txt’, created on Feb. 22, 2005, in IBM-PC format and is compatible with IBM-PC, MS-Windows, Macintosh, and UNIX operating systems. The sequence listing information recorded in computer readable form is identical to the written compact disc sequence listing. The Sequence Listing text file is incorporated herein by reference.

The application's sequence listing, which the Patent Office published only in electronic form, follows.

SEQUENCE LISTING (171306 sequences)

SEQ ID NO: 1 - DNA, 1475 bp, Heterodera glycines
tattttatttttattttattttattttggtttattttcttttaatttattttattttaatttattttattttattttattttaatttattttattttatttaaatttaatttattttaatttattttattttatttaaatttaatttattttaattaaatttattttattttattttattttaatttattttaatttattttattttattttattttaatttattttaatttattttattttattttattttattttaatttatttaattttattttattttttattttcagaacaattctgacgttttccagaattttcagaactgttctggtgtgtttcagaattagcagaactattcggacgcttaccagaattttcagaattattctggtctgtaacagaattatcagaattattctgaagcattccggaacaatcagaaaaattctggtgtttaaattgtaaaaattgaatgcaaaaacacaaagtaaaacacaaggcaaaaagttgaaaaaatactcgaaaacacatgctaacatattgaaacacacgtttttgtattgaaaacacacgtgaaatgtttaaaacgcatgcaaacgtgtcgaaaacacacgtaaacctaaagaaaacacgtgaaaaaccggaaccggtttaaagaacgcacgccgaaaacacacgtaaaccggttgaaaacacatgcaaaaacgcaaaatccatccggtcggtcgaaattccggacattccggatgaatttgcaattgtaaacggattgtaaaccggaaggcgaaaacacaaaaaaaatgggcttttttcgacctttgccggggtataactttgttcgaatttgtcgtagagctacgaaatttttttctcacccttcctctcgacgagctctacaaattgttcgcttaccgcaaaagtgtagctcttgcggttcccgagaaataaggtgaaaacacacattttacaacccatttttggccaattgtaaaaagccgggtttttttcgttcgaacgcgattttctcgaaaaaaatgtatcgcgacattttcatccactcggatagatcgctagagaatcgatagctctttcgaatggtaccggtctcggtgctcaactctcgatattcgcttgccgccaaatcgttttatggttagccccccccttatttttatatatagataactaggcgtcccggtagatggctgcgctttatagaaagccgagcctatcccgtcgagttgtagccagtaacggggtagatgcgtcaggttgttagtgcagtagcagctcaggcgcagatgcgtatctggatgttcgtgcagcagcagctaccggaagacagctgagcctagccgttcaccccatgcccgctaagtgacatctaaaagaattgatcaggttcgtattgactcggtacactcgctcgtcgctccgcttcgctcctcgctcgcgcacctctaggggcaggga

SEQ ID NO: 2 - DNA, 19969 bp, Heterodera glycines
aaatattaatatattgtaacagaataaataaatcctgcaaatacaaatattatttgattaataaataaatacacttcttccaaattatatgacattttacaaatattttagtctatttaaataaattgtctataaagtaattttatttatttttattatattatcccagtaaatttgagaagttaaacaaacaaaagaaaaaacgtttgaaattttgcttataataccaaaaaaattataatataaaatatatcaaacgtgaaaaaaggtgtaaagcaaagaataaaaaaataataatttatggatttaaaattaaagctattcaaaagttcataaattagtattaatttttaattacaagaatcacaaaatgaaagaaaaataatgccgaaaatggcaagtaaaaatgatagataataaaagggttcaaaaaatagtttttattattttaaaaaataatgcttagccaatgaatggggaccaacggtgaaagcgaccaagaaaaaatatataaatatactttagaatagaagaaacatttcttttaatgcaaaacttttaattatttataaaagatgcattgcgatcaatttcttattattattttactttaatccttttacccatttattatacaactgtttttaattaaatgatattaaatttgagataatttaaataaattataagacaaaacaaattgaacatgaaaacagtgtagtcataaaccaagactaaaacaaactacgttattttactaattactttctttaaaatttaattgaaaagcacaagctatcatggataaagataaataaaatccattgataaaatgatcattaaaaaagtaatatccaagatataaaaaatgcttttactaataagaacggttaagccttcaatttcaacataatatactcataaataaggaacagtaattttgcaaataacacttctaaaatttaaaattaattacttaattatatgctctgatcagttgtctaaattaatcaattatagaagcaaataacaataattttattaaaaaatcgtatatacatcttcccgcatcgatgcgttggacatcgctagggataagctgataagtgcgagaaaaacgcgataaaaatgattatattcatagcaaaaaacatttctaattttgttgattagataaaattttaacaaaaaacaataatataatttattttttagttaaaataaagaaacattttatttaacagataagaaaagtattgacagaatgattaaaaaaggaactaaaaaaattatatttattaaattttaaatgaacttatttgctaatgtatagcgacagccgaaatgttgccggaacatttcgttcacagcgtttaattaataaaaaattaaattcaaattatctctatcttattaaaaataatatatggcgatgataaaaaaaaggttaaaatagtaaagtaaacatctacgaataaacgccaattaattaaaaaataaatcattaaataaatttataaataaaatcaaatcaaaaaagcataaaaagttgaatctaacaaagcaatatgatattattaattgtattaatatttatactaatacttttttgaaaagtttatttcttttaaatgaatatcaaatgcagatttttaatatttgtaataagtaaattaattttaatattttgataatttgatgaagcagacaatgtttatcgaataatattattatatatataaatcgaaaataatttttaaaaaatcataccgcccctttgtcatgagcagcacgaggggtagaagtgtgaggtgtgcacagtcgcggttgttagtgcagtagcagctcaggcgcagatgcgtggctggatgttcgtgcagcagcagctgccgatagatgtgatacatatttaggatgccgagcctagccgtttattatttttgttccaccaatctttgtagagctcgatttgctacgaagcgagtcccactatataaaaaacacaaaaagttattaaggaaaaagaaaaaatgtatttttaaaattagtggttctttaaaaaaaccgggaatttcaaaaaatttttgctggtacgaattttttccacacgtgccattttgtagagaattgggtctatttttatttactttaattaatataattgttttttaaattatttattttttggccaattttgccatttaattatttttattcagcttttataacacaaatcacaaaaattctgattattcggatcagaactgaataattagaaatattgctggtagtttccgcaacgtttcaggattgttccttaaccggatttattcatgtgcaaaacagtaccggaagcacaactggagttgaaatttaagaattagtcaaaaaccgaattagccgcgtgaaaaaattgcaaaaacttgaaattgttaaaaactttaaggttcggaaaggggtttaaatttgtcgaaatggaactttttttaatttgccttatggggggtcccaaaaaatatatttattttccaattgctttagaatatttttttcaatacttttggctaatttttattgatttaatttatttaaatatttttaaaaatttttaaggttgtaaaatgttgctcatgtggatggaattagttcaaaagtaataaaattatttttagttaatatttgtccggtgcttatgagcagtgtttacattcattcataaaaattttttatattaagatttggaaattaaattcttgtatatgattaagtttttagtttctttttttacaaaattaaaaaaatcgtcaacctggtccacaattattcattgaattctaaaaatttggctatgctttttaataaagcttttcattttaattaagtgatattgaatgtaataaacagataaaaaacaatgaataattaataaaatggaaggaaacagtccgaaaaaatagtgccaattctgagtttctaccaaactgttttgcgaaaaagacgcattccatgacatcgaaaacatggcttgtggcagaatgcaggagccacaataacatccaatttacggagaattattggagctcctgataaaaaaaatagtaaaattaaattttaaaaggttaagattgataaatgtttttagtataaatattgatcaggttaaacaaagtgccatttttgagacctgcaattagcaaacgatgaagtaaaattgttgcgcgtaagttaaactgacgtttggcaaatgtagcagatcaccgctagagtacacttggtcaccgatcgattgagaatatttgaaggtgctaaaaacggatagaaaagtcataaaaacggatgtgcgactgcttttaaaaccgctatattgatagaattttgttaaaaatttattaaatcttttagcttgtaatataatgtcttaagttcgtttaggtaggttaaaaatcttggccttgcatatattttaagatacaattgcttttgttttattatgcatgttctacccatgcatttttaaattcctaaatttaatgattttctccttcttttatcaagcagacaacaatttttaatcctttattttcataatcatgtccttgaatttgaaaattaatgacaaattctgtattgtttcttctgcagcagactcaaaacccaacgtcttattggcgcaactgcagaacgttttgcttatgaattcattgagtagttaattaattaattgagtggcggtggtaaaatgtggacaaactcatattggatattgatcatttttaaattattgtaacaaaaattgctaaagaaattttaaaaggaaaaaatttgctctcaatagaaacattttaaaaaaatcggatactccagacgcacgaataactgaaaaatcatttttcggtgtacatttataaaatgccaagacatatttctcacgttccaagctcggcataactccaaattccaatcgatatgagacggcggttgtgccaacgaataagtacaaattttgccaaagcattggcacactgtgcattcaaagggaaaacaatctgaaggggagggttaaataagtttgctttaatattagaaatgcaaatatttatttgcaagttaaagttaaatttaaatgcaatcctttaggaaattgaatattaacataaattaaaaaagcaaaaaatttatttggaaagtcagttttgttgcacagaaaagaatgataagaataaggattcataaaaatatataaaatatcatttaacagataaaagtgaaaacagaactaatggaaaaattaataaattaaaagatacattaaccggttattttttttaaaaaaggtttaagtaaactaattatttgccaaaaaaaatgtttcacgagactcgagaatttgtacagaaattgagattaagtaccattaaccgaggaattttttgaatttagaccgggaatcttggaaatagcactctctattttgtgtgccaagccgttaaattttatatatgtgttgagcgaacacgaagagaaagcctgtaacagcaacaaaatgtaatatttgagaaacttaattttaaaaaatcaaatttttaaataataaaagtaagtcttcacccgttgaaaataaatataaaaaaaatttttagcaaatttaaaaacatttgaaaaatggaaaaaaggaggaaaattataatcatctaaaaaatcgatttaattggccgaaaatcttcatcaaataaatttttttaaaattacgaattcatctcaattttaaactcaaattgttgccgtttatcacttcaggcaatttcttagtcacttgaagcatatgatgcagtaattatttgaacaatattaaaattttttagttatttcaatgtgagtaaattatgtaaatttaaaaataaaaattatataaaaaatgaatgaccattgctggtgtcgccgttgttgaacactttctcccgtcaaattgtggatggaattcgtccgcaatttgtgtttaatgccgagttggtgccctcagaaaattttacaaaagttgcgccaacatcaaccgtcaaaatgttgagcaaaatgtctgtaaaatgaaaaagtagtccaacggagcatgttattaattttaaaaaatgtaaagaagacgaattttttacaaaaccgtaaacaatacttataggataagttaagaaataacttaaaggaagtgaaagtcttttaaaatgctcctttttatattttgtttgaaattgatgtttgaaacaaattctaaaccccttaaagcatcgcgtcaaaatgggaaaatttaaatcccattttagggtttaacaaatgccaaatatgacaaaatgggattaaataaaggaaaaaacaaaatttagtggggtagcgcaacaaatggtcacaaatttacaacgtttattaaaaatgtgcattcgaaaaataaaacagagcaataaaaaaaagttgcctaccattgcgcaacaccaattttttgcttcttctacaaagtgacggcgtactgaaaaacagggaaaaatttgcaattaaaataaaataggaaaatgcatttgctttctgttttagttaatttaaaatcaaaatgtcagaatcaccgtacttatttaagagaattttgatttatcagccagtaaaatttgcataaaatattagttttaattgataaatttacagtcattcctcattgcactaccttgaatgaccaagcgtatgaaagaattggccaatttaaagctgggaaatggtcacagatatggctgaggcattttgatcaatttggcgccaaaatgatcatttgctcttggataaattagtcagtgtaggcgtttgcatttgacgcctttttttttgttgtggttcagcggcataggcaacggcggaatgtccgagtaatcgcgcacaccgaacggtctcggcaaaatttgagaaatttcctaaaaattaaaaaaaaataaaggctaaaaaaatatttattttatgatatttaaatatatgtaatttaattaaaaagcattaaattttggtgaacaaaaaaagtattcggatttcccttactatattttccggttgtgttttgcaaatataatttattaaccggaaagcacttttttaaatttagtaataacagggaacacattccatttagttgttttccggatagtttaaacggtttaagtaaaacccggaagctgtttaagtacaaaacctaaaaaaatacataaaaaatacaaaacatgtcgtctgttttaaaaataacgcggaaaactccggttaattctaaaataaataaaaaatgctgtaaggaaaattttaaaaaaatcattaattaattattcctgtttttccatcaacaccaatttttcaattttttgattttaatagctgagttgctaaagttaagtggcattgagcgtctgctgttgtaccgtcgattcgccgcctatttttttgaaaaaaaacaaaggggtttaggagtcataatctcgaatatgacatccaatctgagttaattggtttaaagtgtgttggaggctttgacgcattgacctcatgattaggaattttatcaagcataaagacatttgtaattaataaatattttttttttttctttaaattttgatccaaaaagttcaatttaaatgagttcatgttaatagtttgttgctgtagaaaagctataaaagtcacaaattaatgttctcagttttacccaacaatttgggcaatcaattggattaactttgcagcatttgcagcagttttcaaaatcatagtgaaatgttattttagccatttttatagagatttatattgaattccgatgcaaaatttctattgcttaataattagaaaaattttgagtaaaaactaaaaggagaatttcgattaaacaatgaacactttcccaacttcatttgaagacccatccaaggtgggaacagttccaaaatttggtgctatatttatagtgcccaatttataaaaaataattatttgtaggtattcaataaactttttattggactctcaaaacacttttttataaagaaacatttcaaagttttccgtcttcagaatttattcaaaaaagaaataatgcataattaagttagcattgttaagcatttgttaaatttcaaagttgattaaaaaattataaagatgcaaaaaataataagaaattaattaaaggtcagattttaagacggaatacgtatgaagagtaaagaattaattgaaatatgagttaaaataaggcatgcaaaccaacaacaaatgtcaaacaaatgatggatattaacttggttaattaaaagtttaaaaaaatgctgatcgagttaaaaattgattaaatatgaaagaagaaccaacaatcgagtatgaatttgattaattataaaagtataaaaataaagaccgaaaaaagtgattgcgctgaaatgaattaaatataaaaagcaaaaatgatcgatttaatgaaatataaggctgaaaaacaataaaatgtaaaaaaaagcaattttaatttaaaatttttttattttttaataataaaataaccattatatgattaatttattatgctttcatttttttaattttttaagataacaaaaaacattgtttagtccgaaaattttaaattaaataatttttggaggtgtgcgacgagacaaaacaataggacaagctaggccatagccattatgccaaatcaaaataggattttggaccgtgtaggtcgttttttgaatgttcatttgaaaagtccaaaacagctcttcaattgctcgctgtggctttttattttttgggtgatgcaacgtggattccttaaaatttgaaaaaataattaaaatttatttggaacttttagtattaaggcagcaacttttacttatgaaaatctcgaaataattaactaaaatagtgaaaaaacagtgccaaaaatagtgaaaaaaatgcgataaattatatatgctggcataattttcagtcaattaagcaaaaaaaattttcaatctcttaactcaaatttagggtgtaaaaatgacaaaatctgtgcaattaaataacaaaattaagccaaatctgtattgtgattaaattatttttaaaaccaaaaatgtcaacagaataaaatgataaatttttgaaatgaatttttgagaaagtttttcatttttaaagggtgtattttgtaaaatttgtaagtgacagatagtgacactgaaatttaaaaatttaagcgcggaaatacttttttgtgctcatttcttaaattaattttgacaaaattgtttaatcaataaagctccccatatttactattaatccataaaggaaaatttatgaaaagattaatatattcatatattaccattattttcccatttggcaaataataggacactgtttttggccggctctgatcatcccattgaggaagaagtcttttggcatcctcgcgcgacattctgacaatgcttcctggttttgctgatggctcaatccaaatgattgggcgtttgaatgcaatggccaaaataagtgcgcaaaatttgttggagtaatttgattgaaccatttttgtggcatggtcaaaaagagtttctggggctttcacgcaaaggccaaactcaattttctccaaaaacttttctttagattcgcacagttccaaattgacgcctgcagaagcgggatcggagcataagatgtgaatggtttcggcgtaaacggtacgcaaattggcgcaatgcttttcagaacatgcattgtaaaaaaccaaactgagtgaactaaaatgtaatggcttttaatcataaaattcgccaaaaattgtatataaaatcagaaaaaagctcaaacttttaaattcccaaaaaattcatccttaggggggggggggggtgtgtttttaacgttttcatttttctatgaaaatttacaaaaatggccgaaattttttctaaaaatgcaaaatatgaattaattcttaaaactcccaaaatatgcttttatgcactaagaccttcaccaaactgaaaccggtaaaaattttcgtcaaaaatacttccttttttaatttatgctttactctaaattgtaccggtaccggtcttattttagtcaaaattattcatttaattatttaaatggttttcttaatttttaaaatatttcatacagacctgaacaatggatcgtttccgataacatcggtcaataaattggcaaagacaggtttaaaatgttggccatttctttcacaatatttccgctcggcctcaatgagtttcggactcaatggagctgacacacagcaagattggctaaataataataattttttatttctttattttaccaatttaaataaaaacccaattaaatttcattatatttactcggaatggatagaattcggctttgttaatcatgaatcaaattgaatttttaaaacttttgtttttcctctaatttatattttatttaatatgacatcgttattgacaaaatctcttttttctatgtgtttttgaaaaaaaagccgctctaacaaatcaatgcataacaaatcattgaaaagtatatttcataagtataaaaaatttattttttaataattgaatttcattttttatatttttgtcataaaatgtttacattttcaatttacaatttctaaaataaaaaaaaaaattctgtgagaatgttaaaaactcttttctggacggaaaacccattctatattttaaaaattcaattaaattccgtcccgaatttttgctttcaatatttaatattttaattaaatatattttacttatccagcaatacatcatatccttcccaaggattttcgcaatcgaatggacaacaatcttttggttcgggcgtaaacctaaatatttgtccattaagggaattatttttaaatcttattgaaattataaaaccaatacaaaatttataaactatttttaaaaaatcataaaagatagtaaaatgagcttttattttatgcttattcaattttgttttttgaaatttattttttgttgtaaattataactaaacatagaccaaatcattataaaaataaactttaaacttttttaaataaataactgaccagcaagaatagtggaaacgtgttgcgcaacaatatagataaaccgtctttggcattgaaccggtattgtgatcaaatgaaaaaaaattgttgcaaattttgcaataatctgagtagggcttgttgcaaaattggcatcttccatttgtttcccacaatctgtaatcattttctacattaatttccatttaaacccattattttttgcaataaaaattcaaatgtactattgcatattaagcattattatttacattcgatgttgatcagatgtgcataatagagtagcagcagattccttgcaatcacagcgcacatgaagtgttgtgccatttcccaaacccgttctgcatttaacgcactttttgtatgcagcttttcggcaagtcgattttgggcatcgcttaaaccctccatcggcgacccttaaatgttaaaaatataatttacatagcaatagttgatcagggatgagtcttaatgtcgattgttgactttcgattgtcaaactttttgatgaaaatacaattttttggcaatttgttggaaattgacattttcccaaatgatttattttacacaaaaagccactggcccttctttaggacaaaatctgttaacaaattaataaaaattcctcaaatttgccggcagcagtcgcttacagacaaattaacttttttatttgatttaacaaatttaaaatgcctcatttaggactaaatctaatggcaaccaaaaaatctcgaatggtaagtttattgtaaagtgaaaaatattttaataatattttttttgttcaataaaaaaattctctgaaatactgaaatttaaatttctttaaaagaactgatttaattgaataaatttaccaatcataatatggcttttgtgcatgaaaatagtgcccacagtccaatacgccacgttcgtcatttactttcaattgttgagcacaaaaaacgcaaattttttttgcaacaaactgctgagttcgctgatcacgtggctgcttgtttgttgaggctagagatcattctgattagacgaatacgaaaaacaattcataattataaaattttggcgagaccattttggttttaaaaatcattagcattaacgggtgttttaactgtgctactttaaaattttgaaaaaatttgaatattatttaagctaatcggataagtctaatagtcaagaaaaagtcaaattattgggttgtctttctttaaaccattttaattcacagttaattatttcactcacattccgacaaatccataacatttgtgaatttttcaagcaacgacggcattttctcaaaaagtggctgtgagaattccgctaaaatatttttaaaatgtttttgtaatgttttttgattcatacgtgctctcacaattcccaaatcgttgtcatgttcacgagaactgtaaattggctcatcgaaagcggcataatcgtcaaagcaaattgattcgtccgatacgttgccgtccaaaatcccttttccataaggatcaaaggcgggataatcgtcatggcaaaacgattcctcagatgaataatcgaccaaaacgcctcaaaattaattgaaatataaataaagttgttatttatataaattaattgaaatatgaattcaaagcaattaagaattttaaacctctttttaaattaatttattattaaattcaattatttgttggaaaagctgttaaatgcagaattgaagtgatcagccgtttttaatttaatgcattctcaattttaatgttcaatttaaaagttcccaaaacaaaataagtaatatccattttcactttgaagtttaaaattttttaaaattaaatcaattttatgtactattagcctttataattaattttttaattttaagtcaaataattgttttgccttttccatatgaagacgtaggcgtattttttagagttgtgccttaaaacgtgatttttaatattgttgataagcattatttaatattgcttgaatgaattaaattattttaaatacatttttctcgagcatttcgcgctggagaaggactcggagttggctctaagtattataatgtttttttaatttattttttttaaattaattaattcattatacatacttccacggtctgaaaaaaacgtaaaatcgccgcgctcaaagtaattccaccaacgaaaatattgctttctgtgtgtagttgctgacccaaatttttctttcaatttttcaaaagccgaaaatttgtcctcgtcattttcgtgtttctcgaggaaacacaaaagaagaaattggtgctgtttctcattatccattttttttctaaaataaggaaataatttttaaattaaaacgggtagggtaccagcgaattttataaggtgccatttcaccctttttgaccaaaaattggcacaagtatgtttaaaagcaataaaattaattattctttttagccagtaaatttcaaaaaagttacaagaaaaaaaatcataattttttggataatctcctttaaattaattaatttatcaatttagtgcgctaattgaaaatctttattgccaatttttgattcttgaaaaacggcgaaatttatacaaaaaaacaggctaaaaatattcaaaaatggaaattaattatatcatattttttaatatttaattatatttgaaagaaaaataaatattgctcaaatatctttgcctaacagcgacaaaatctctgtggccgcaataatttatgtgtgaaccaaaggatcgttcgattcacatttcatttttgcgttaatgttgctagttgaatttacattttcctcacatcgtaaatgcaaatcaaatttctgcttattgttagagtaaaaaaaagttcaaatattttttattgtgagtataaaaatatttaaaaaatttacaaaaatctttctttataaaattaattgaaattagtggttaattgtataaatgttttcaagtcaaagttcagttttgtgccggttttatgcagaacaattcagagagcattgcaacaaagcgacaaacaactgcagatgttcaacagcaattgaattaaaaaacgcaaaaaagtgaaaaggcaaccgcacaaaaattatgcagattttgttggcgaagagagtcggctactgcaaagacttatttgcttaaaaaattgcaaaaaccattagttatgagtgtaaaattatttaaaaaatagtatttctaatatgaatcataaaaaacagaattattcattacacctttatctgcacgacaggggccgtaaattaattttcttttgttcaaaatttaattttaataaaaaaaattatttattgttagcaaaatgaattaataaatcaacaaaaaatgttaatcttcataatatttcattttttttttgaaaattctctcatgtttttcttttttatttttgttaaccctctcaaactaatttaaaattaatttacaaattttttttcggcagtagttaatatattttttttataaattcttctagcaaattttagccatgcataattttttaaaaaacataaaagtttgaaaacataagtaagttttaaccacctatttattcagttgtttttgcactgattgaaggtatttgcatttatccattcgcggactctgtacgccacagactaattaaaaccttaatagtcaaaaagcagatacaaatcttaaaaaaataaatttgaaaatttaaaaacattttaatatcaatatcgtcaaggtatttaatttttttaagctcaatttttaattataaattttttaaaaataaatgcatttaaaatttttccgcaaaataaactgataattgtgattaacatcgatccgttaaaaaatgctgctcatgtggataaattctaagtaaattattttaagttatattgtcggttgcttctgattgtgagcaatttttaactcattcattcatacaattttttattaggttttggcaataaaattcgtgtacacgattaacctaattaattatagttttttaaatcggcaacgtgatccgcaattacgcattaaagtttcgcaaaatttgactattaattaaaaagaaagtttttcatttttattaagtgctaattgaatgtaataaaatggataaaaagtgaataattaaaaacagagggaaacaaaaactactcggaaaatcagttggtggaatttgttgatttaatttatttacgtttaaacacattttttctggatgtgttttacaatttaatttaataaccggaaaatgcgcactttccggttgtgtttttgttttgaattttatttacttttaaacccaattttttccggttgtgttttacaaatgttagttaataaccggaaaacacttttttgcgtgcattttttaaaggttatatagtaaccggaaagcacttttttaaaatttattaataaccggaacacatttccatttagttttttccggatagtttcaacggtttaagtaaaatgcggaacctgtttaagtacaaaacctaaaaaaaatacatacaaaaatacaaaagcatgccgtcttaggaatttgatcaaacatattgacactttttattccttttaaatctttggcattttgttttttaagcaaacaattttctcctcttttttaaccgtcgatgactgaacttcaaacatttatccttttgcaatttaatagtttttcatgtttcaaaacagggattgcacagaattccgacttcagacattttggggtcgaaattcagatttcaaattgaaaaaatgtgggaatttttttaatgttttctgaattttttgccatatattttttaatttttgtgtatagtttttactttattcacagttattttagttcaatttcaattctttttatttcgttttcgcgcactttcgcaaatggcaaattcgaagcgtgacagagttggtcagaatttattattcttcagccaaatttgtcgataattgtttcattttgttttttctttcagtttctctcacaaaaatgaagaagagccgcgagggcaaacaaaacactttgaaagaagcaagaaaaaaaaatgcattttttgtttgaaaattttaacaaaaattttcagggcagagaatgcgttgagcagtacaaacattatttgtcttctcgacgaagagtttgggctctgcaagactggtggaggttaaaaaattgcatttttggtccataagttttgggattgacaggcataaatgtcaccagggaaattcttgcgcaaaaaagaatttcgacattctctttagcactatttttatatttggtaataaattgaaatttgctaacaatcaatatgagtgatttttgaatggtaaaaaaataatatgaattttcataaatcccttgccccctcctttggaagtgaatttaagtttttaagaaaataacgcaaccatctttaggcaaacgaattgcacaaagtgagcgcactattgttaggtcaaaatggactgatgttcaccaatgcaaaagcaaaaaaagtgcaaaggtcggcggtgaataattccaattttttcgtacatttatttcttttcgtttttggcggggctcagccgtggagtttggcaaatttgcacaagaagaacaggtaggagagtgataccaacccataaacagtgacgtttacgagccatggcaaaacgcccaatttcacccaaccccggacacactgacaaaaagaaattcgaattttttttggggttgaacgcctcataatttgggagtcaattttatgcagccaatatgacttttctatttgcagtttttttgggttttttaactgacaatgagatatggacatttgaaatgagacaaatgccagaaaaaaggaatgatttttgaatgataaaaaaaaataatagtaattttcataaatttcctttcccccccttccccttccaatgtaaatttaatttttttttaaaataacacgtcccattttaggcgaacgcattgcgcaaaatgagcgcactttttagaggccaaaacggactgacgttcaccaatgcgaaagcaaacgaagtgcaaaggtcggcgggggaaaattccaattccttttcgtacatttatttctttctgtttttggtgggggcgcattttggtggaacatttttttaaaggtttctacgaattcgaagcacttcccttttttacatttttgtttgtttttcccgttccaatttttaaaacagaaagtttatcaacttttttctttattttttttcaaattttttaattttccaatttcggcccggcaaatggaatgttttttactcacaaagcgacagaaattttaaaaaaatcctaaagttttgaaggtgttcaattgcaatttgttgctctattttttgcagtttggcgtccaatcgatgccggattttcattttggttggccataccctttctttttcctatttggtcaatccataccaacggtacaccccaaaatacagctgtgacataacactgccgggtctaatttttttaaaaatttatccaaatttttttttcaaaaattccttgaattcatcattaaatttagaaaaaagcacgtgcaatttttttaaaatttattccgggctgtgttttgtcattttccgccataacaggcccgtagcctggttaattcaaaaaaaaactgtttttttaaatcttaagcaattttcttaacaaatgttttaaaatttcataaaaaattgacctgtgggcaccgcacttaaagacactaccggacctccattttacttttttttaaatttagatgcaaaaacgaaaatattttggtgaagaaaagttctttggattcgcccctctgaaattttcttttttctgaccgctggtattaaaaaatttaaaattttctaacgatttttcaaaatttcatcatgaattactaataaatattttttgtaaattattctttcatgcaaatggttggcgaataatttcttctgtcatccatcgtcatgccagatttttaaaatttcctgtatttgtgcgtttcgtaataatgtccttcccttttccctgctatcgacaggtaccattgagcttttggaggagttcactgtgtgcaagacggttgaccaactgtccgcggaccagccccgcattttgaagcagttcggccacctgttggcacaattccgcatccgtctggtcgcctggtaaagcaaaaagaagggatttgaacagattgacggaggagcagatcaattgaatgaataattgatgtgtttttttggttggatcaatccacaatttttcttttttttaaatttttttttaattttaattgatttcatgcgattttaatttaaaattaaacagtttggtggttttttagaccgacttctatttaatattccaccaactttggaccaacaaaatctcaaatttaaggctaaatttctcaaaatctaattgaccaaaagcagaaattgtttattgaacaataagaacaaaaaatataattgttttccggaaaaagtaaaaacatgtttcctgtcttgttacagaaatacacctatttttcggttttgacagaaaagacaattgttttccggttactgtcgaaggttttgaatgtgttgaaatacaatttgttgcagtcaaacatccaatccaatccaccactttattttgttatttttttctaatttaaattggttttatgggattttaatttaaaatttagttgctggtggttttgcaagaccgacttctattcataaaactatggtgtattttgatggttttacgaatacattattcattttcttcaataaattgttcttgtcctcagtagtttctcattaatttcccaatacattataaatgacgattttgattacatacaaaatggtaaatagatagcaaaaattggaaaattgagtttttacggctgatcagtagggggtcggaaaaacatttgatataaattcctgaaatattgcaccaacaaaatctcttatttatggctaaatttgcacgaaatctcttcaaaatcattaaatttcagttaaaagcctacggaatggtaaaatatttaaaattgaaatgcgttttttggtaatagtttagatgctatccccttttttaaaaaaataaattcaacttttaaataagtcataaagaaatgagtgtctttgattttttacagaaagcaactacaatagttttccggtttttgttgccttttaaaggattgtttccggatatgcgaaatctaatgtattttttctgtttttttattcaattaaccaaaagcagaaagtgttttccggtaaatgtaaagtcaaaaacttgaaatgttttccggaacaatagaaatagttttttggaaaagtaaaaatcgcaaacaaaaagtgttttccggaaaagtaaaaaccacaaacagaaagtgttttccggaaaagtaaaaaccacaaacagaaagcgttttccggaaaagtataaaccacaaacaaagagtgtttccggaaaagtaataatcacaaacagaaagcgttttccggaaaagtaaaaaccacaaacagaaagcgttttccggaaaagtaaaaaccacaaacaaaaagtgtttccggaaaagtaataatcacaaacagaaagcgttttccggaaaagtaaaaaccacaaacaaaaagtgttttccggaaaaggaactaaaatatgattaaattcataattttttttgctgtttattaactaaaaagtgttctatttttttaattgacaaaaaaaaatttgtgaaaaaggtttgcatggttgtttaacaaatgttatttaagtgccggaaatgcgcaatttcaggttgtaaatccacattttccggttgtaaatgcatatttaccggttgtgttttacaaattaaatttatgtgccggaaatgcacattttccggttggaaatggacattttccggttgtgttatacaaatgtaatttaagtgccggaaatgcacattttccggttggaaatgcacattttccggttgtgtaacctttattttccggttgtataaagaaaagacaattgttttccggttttgtaacagaaatgacaattgttttccggtttaaaaagaaaagacaattgttttccagtttaataacagtaaatacatttattttccggtttaaaaagaaaggacaattattttcggtttatcaacggtttattaacagaaatgacatttgttttccggtttttaacagaaaatacatttattttccggtttataaagaaaaggcaattgttttccgttttgttaacagaaaatacactattttccgggtttattaacagaaatgacaattgttttccggtttaataacagaaaatacatttaattccggtttataaagaaatgacaatagttttccggtttaataacagaaaatacctttttccggtttataaagaaaagacaattgttttccgttttattaacagaaaatgcatgtattttctggtatataaagaaattaaaattgttttccggtttattaacagaaaaaacatttgttttccggtttaataacagaaaattttattttccggtttataaagtaaaagcaaatgttttccggtttttaaaagaaaatacctttttttcggtttataaagaaattgcaattgttttccggttttgtaacagaaatgacaattgttttccggtttaatagcagcaaaaacatttatttttcgattttgtgggacggggaggcgggtgcggggagg

SEQ ID NO: 3 - DNA, 1181 bp, Heterodera glycines
ccccccccggtgcgccgcccgtaccaggcccgtggagcactcttatgtcgttaaatagctccgtgcactcgcttgctcgcggctcgctacgctcgcaccgctcgctcgctcgcgcacgtcgtgtcgctcgcttcgctcgctcgaatgctatggaaaacacatttaaagttgtcgaaagcgcacgtgaaattgtagaaaacacacgcaaaatgtcgaagccacatgcaaaagcggtatacaaaccgatattaaatacatgcaaaaacacaaagataaaacgtcagtttaaaccgccgttaatgttgggtttaaaccgaaaatacaaaaaaatttggctgaaaacaggctaaaccggtgctggtttagaagaaaatgtgtcgaaaacacatgtaaaccggtcgaaaacacatgcgaaaacacaaaatccatccggtcggtcgaaattccggacattccggatacatttacaattgtaaacggattgtaaaccggaagaggaaaacacaaaaaaaatcggcttttttcgacctttgccggggtataactttgttcgaatttgtcgtagagctacaaaatttttttctcacccttcagctcgacgagctctacaaattgttcgcttaccgcaaaagcgtagctcttacgattcctgagaaataaggtgaaaacacacattttacaacccatttttggccaattgtaaaaagccgggttttttttgttcaaacgcgattttctcgaaaaaaaagtgttgtgacattttacaatccgcggctcaaaatgtgcagaaaagatagagctttcgaatggtaccggtctcgttactcaactctcgatattcgcttgccaacaaacccgaaagcagttagcccccccgttatttttatatatagataactaggcgtcccggtagatggctgcgctttatagaaagccgagcctatcccgtcgagttgtagccagtaacggggtagatgcgtcaggttgttagtgcagtagcagctcaggcgcagatgcgtatctggatgttcgtgcagcagcagctaccggaagacagctgagcctagccgttcaccccatgcccgctaagtgacatctaaaagaattgatcaggttcgtattgactcggtacactcgctcgtcgctccgcttcgctcctcgctcgcgcacctctaggggca

SEQ ID NO: 4 - DNA, 1939 bp, Heterodera glycines
  unsure (1)..(1939): unsure at all n locations
catactagtcgtcgtcgtggcattttttggtcataccattataggtcgtggnattttttagtnatantagtggtggtcctggtattttttggttgtgcgagtcgtcgtcgttgcattttttggttgtgcgagtcgtcgtcgtggcattttttagtcatactagtcgtcgtcgtggcattttttagtcatactagtcgtcgtcgtggcatttttggttgtgcgagtcgtcgtcgtggcattttttagtcatactagtcgtcgtcgtggcattttttagtcatactagtcgtcgtcgtggcattttttagtcatacgagtcgtcgtcgtggcattttttggttgtgcgagtcgtcgtcgtggcattttttagtcatactagtcgtcgtcgtggcattttttggtcatacgagtcgtcgtcgtggcattgtgaagcgattttgtgtgtaaaatgtgaattttttaaaaaacggattttgacttttttgttcgaattccgggttcggggttcgaattgggcgaaaatagatgccggaatcggtttttccgaccctaatcactttggttggattttagaatttttccgttgtccagcactgactatctgtgtataaaagggatgaaacttttcactttatctcataccaaataatttttttcgcgaacaccaccggacatatttaccaaattcttgccgttatgccgctgagcacctccgaatgtattttgttttccgctattctgttcggcatctgcttatttgttagtcatacaattccatttttctgaataacactgtcttcctcttcaggtggtggattattatgccctgactgttgcgacctgttcattcctcttgggaattatggtagttgttatgtaattttcactttagcacaaaatatttcttttttaagttcggtgcactctggccggtgatttgttctactttttacggctctgtcaaaacttcgaagaagaccacttccgcttcaaagcaatcggcatctgccaatgcatctggaactgcgaacaccaaatcatcatctgaccattcctctggcacttccaaagacaagtcggcatctgccaatggatctggagcgaacaccaaatcgtcatctgaccattcctctggcacttccaaagacaagtcggcatctgccaaggcatctggagcgaacaccaaatcgtcatctgaccattcctctggcacttccaaagacaagtcggcatctgccactgccgcgggcacttccaatgacaattcgtcttccatggcaaaatcggattacgttgaacgccagaaggaccgctccagccgcgtatgtttactcactataccttaaacaaaaatacgcatttctttttttagtgcggtgagcagcagaagaaaaagtgatggaagaaaagaagaagcggatagaagcaacaaagatgtcgtctgattaagtgtatggaaatgaatattattgtatttgagaaatgatcgatctcaattgttgtgcttattttctctcagaaatgcttgttaattcattccttctataatatacatactcatttatttttctcgattttttttgttggccaattggtttaggataattgaaagattgtctaaagaatttggtagtagttaaagtggttccccccccccccaaaaaaaaattcccatgacatacataagagacaattaatttatttatttgcttgcttttatgtggtcccttttttcgtttcctcctcctcatttcattcgttctccctaaatttttctcattttgttgctgcacttttctgctgttggtcgattgggccatcactctttgggttattttttggccatgtcaaaaaacgacgacgcccccaacaaaaaaaaaatgtaaaaattcaacaaaaaattttaaatattttcttcaatttttcagctttatctgcg

SEQ ID NO: 5 - DNA, 3888 bp, Heterodera glycines
ttttaatatttcttcaatttttcagctttatctgcgccgattgttggcttttggtgtttgattttcttacgccttcccaatttggccccgaaattgcattgatcaaccgctgctttgacatttacgtggacgaacatttcaagacacgcaaatggaaattgggcgaaattcgaatttgctacaaaattgaagaaaatggcactaagcaaatgcatattcacaatgccgatgcaaatccattgccaatccccaaaatccgtttccgaacaaaatcatcggattcagacacatcaaaagcatgtaaagattgattaatttgcaatttttcgtcttaatttctgcttttcagttacatcgatcaaaatgtcatcgcatttctccgccgttttcaccgttgtattttcgccgtttgtttaacggatttgttcattttcacgggcaatgttagccttttggacaacatttggccaatgttccgcaattctatgtgtgcgatgattttgaataccatcgcttttcgtcgtttgcgtcaattggccccgtcacttctcaacgattgttcattcaattgaaccacaaaaatggaccgacggtaagaaaggatttaaaaaattgcaagttttcatttacccaattttcttatgtttcagttggatttgtggcgacgtgtggatggacattctcccatcttttgaccatgctcaactcggactcaaaatggcattgctttccgaccgtttcgatgttttggtggacaaacatttcgatggaaaaagcgaattgacaatttggagacgtatcagaattcgcaaggacaaaggaccaaaagcgaaactgtctgtggcgatcgatggcaaatttgtgggatttccattgccggaccattcgctgccaaacaaaatccgttttcgtttccttcagattcagtagatcaaaaactatacagaaaccaattaatatggttggtcatcttcatcattgttcccccttttcagctacattgaccattctgtgctcacatttatccgttcaaacaagccaatttgggacagaatgggcaccaaatttgagttttttgcgaaaagcattcgccagttgggctttaccagtggcgatgcctttgacaatttgcgtcgtctgatctcgccgacaattctcactggtcttgaccaattgaattcaattgattccaatgaactgttccccgatggaattgctgacgatggaccaaatgcaactgctggccaagctttggtcaaatggcttcacactccgagcaaaaatggccaaccgaagcgattgtatcgcaataattattttggtccacagaatctcgaatgggtcaacaacttcaaagaggtgtgtctagccatattttctataaattgtttttgtttttccaaatttgtttagacatttatcagtgccaccacttctgtcagttacaatattcaactttattttcatgtgaacacaattccaactgaaccatttgaattggtgaacaaacggacgaatgaaaagctgacactgaaacaggagatcgacgaattcgacgtaaatgtgtataattggctgttgcaacggtgcccaattggggagacggcgagggtgccagcaattaaatggggagacagcttaaatccgagtgccaatttgaacagtatcagatttgatctgtggagtttcgataaatccattgagtgagcagcagcaatagcatttgaattttatcgaaaaataaaatatttaattaattttaggccattgtcgccaccaacggaagaagaaaaagaagaagaagaagcggataaaagcaacggaaatgtcgtctgctgattaagtgtacggaaatgaataattaaattgattaattgtatttgagaaatgaattttcgattgaaacgattatctagagaatttggaaatccattaagtagttaagggttcactcatccccccgcttagaaaaaaataattaaaaattcactagggtaataagaaaggttgcgatttttagtgacgaaaaatctcgagagtttttctaaattttctcgcatgagagtcaatttcaagtacgtacttgccattcaagtacatacgaatccgagctaacaaataagcaagcaacattcaaatcaaaggcaagctttcgtgcatttgaacgtgcatcgatcggtgagaattaccaaatccggaaaaccccgatcagagagtccgcctcagtttcctagcaattaacaatttttcaatcatcgatattagcagggaacggatttttaggttttcacctacttttttggggggataacatatgctgagataagcgcaaaaaacacattttcttcgatcacttttcgatttagagcgacttttaaacaattattatgacttgtgaaatttttaaaaaacttttaaaatatttctgctttaacagaaacattattatgaaaaagcaataaaaaaacaaaacaaaaaattggcgttactttttttcaaaaaatgcacccctcagaatcgatttttcaaaaagcaaagatcctggacccatgatttggcggacgatcgaacatttttacgcttgaatactacatatcttcaaatttcagtacttcttgaaagggaaaagtgtgctctaaaattgcagcaaacaatgaacagacggtaaggaaaatttttaaaaattacaaattttccatgtttcagttggatttgtgcggatgtttggatggacattctcccatcttttgaccatgcccaactcggcctcaaaatggcattgctttccgaccgtttcgatgttttggtggacaaacattttgatggaaaaagcgaattgacaatttggagagcaatcgaaattcgcaaggacaaaggaccaaaagcgaaactgtctgtatggaccgatgacaaatttgtggattttccgatgccggaccattcgctgcccaacaaaatccgctttaaagaccttcagattcagtaaatcaaaaattatatagaaaccaattacttaatattagggttgcaaccccgaaccccgacatttttggccattttcggggaaaaccccgaaccccgacgcttccaaccccgaaccccgatcggggtcggggttaaatatacactcctaagaacggaatttttgtgggggaaaaagcaaaacatttatacaaaaattgatttttttaaccatcttgacaaatttttatgaaatatagtaaattttgcttttttaaaccaaaaatacctattaaaatcaatcatccatggcataatttatacggtcggggtcgttttcgcgtggccattttcgcgtggccgttttcgcgtggggacgttttcgcgtggccgttttcgcgtggggtacgttttcgcgtgagtacctgtttaggactgaaattggtcggatttgtgcaaaacatctatgtttcgaatcccgaacccgaattcggacaaatttcttaacttttttatttcttgcggctagtatcttctacaataatttgtcagtttggtcggatgtgcgtcaaacggaaaaaataattaaaattggttctagtcggttttacgcgtcccatgacattttacgcgtcccataacattttacgcgtcccatcacattttacgagtcccaacaacactttacgcgtcccatgacattttgtgtccatggcagggatggcattccgaggccccaaaaattttcggaaatcggaattccgtgccatccctggtctcatggtattatagttgtcctaataactaagagaaaaactatttttttttgttaggtattcagtaaagtttttaactataaatttcgttgttaaacctaaggttatcatgacaactcatacacaggcaactcgaacaatggcttattgt

SEQ ID NO: 6 - DNA, 12997 bp, Heterodera glycines
gttacacaattcaactgttttttcttttggacacaatgccaattgaatcatttgaattggtgaacaaacggacgaaagaaaagctgacactgaaacaggagatcgaagcattatccaacggaataatttataattggctgttgaaacggtgcccaattggggagacggcgacggtgccagcaattaaatggaaagacagcgtaaatccgagtgccaatttgaacaatgtcacttttgatctgtggagtttcgataaatccattgggtgagcagcaattaggatacggagaatccaggaaaaaaatatatgcatttacaaaaataaggaagccgtgtaaattatgtatgtattgaacaaaatcagcaaaacacccttccccattactctctctttatatacgcataaattaatgcgttatggccattattttggccaacaaatcattttaatctccccccatccgttcatccgttttcaaatctctcacttttattttggtagatatataaagaggtcgaaaagacatttttgatgcagaatagagaaaaaatgaacagacggtaagcaatttcttttgaaaaacagcatgggtaaatgaaaatgaaattcctcaccgtctgtgcatccaaaaagtctttttgacccctttatatattcagtagttcttaattgttgtgcgtaagaaagcattttggtaacctttcaaaaagacgaagaagaagcggataaaagcaacggaaatgtcgtctgctgattaagtgtacggaaatgaataattaaattgattaattgtatttgagaaatgaattttcgattgaaacgattatctagagaatttggaaatccattaagtagttaagggttcactcatccccccgcttagaaaaaaataattaaaaattcactagggtaataagaaaggttgcgatttttagtgacgaaaaatctcgagagtttttctaaattttctcgcatgagagtcaatttcaagtacgtacttgccattcaagtacatacgaatccgagctaacaaataagcaagcaacattcaaatcaaaggcaagctttcgtgcatttgaacgtgcatcgatcggtgagaattaccaaatccggaaaaccccgatcagagagtccgcctcagtttcctagcaattaacaatttttcaatcatcgatattagcagggaacggatttttaggttttcacctacttttttggggggataacatatgctgagataagcgcaaaaaacacattttcttcgatcacttttcgatttagagcgacttttaaacaattattatgacttgtgaaatttttaaaaaacttttaaaatatttctgctttaacagaaacattattatgaaaaagcaataaaaaaacaaaacaaaaaattggcgttactttttttcaaaaaatgcacccctcagaatcgatttttcaaaaagcaaagatcctggacccatgatttggcggacgatcgaacatttttacgcttgaatactacatatcttcaaatttcagtacttcttgaaagggaaaagtgtgctctaaaattgcagcaaacaatgaacagacggtaaggaaaatttttaaaaattacaaattttccatgtttcagttggatttcggtcggggtcgttttcgcgtggccattttcgcgtggccgttttcgcgtggggacgttttcgcgtggccgttttcgcgtggggtacgttttcgcgtgagtacctgtttaggactgaaattggtcggatttgtgcaaaacatctatgtttcgaatcccgaacccgaattcggacaaatttcttaacttttttatttcttgcggctagtatcttctacaataatttgtcagtttggtcggatgtgcgtcaaacggaaaaaataattaaaattggttctagtcggttttacgcgtcccatgacattttacgcgtcccataacattttacgcgtcccatcacattttacgagtcccaacaacactttacgcgtcccatgacattttgtgtccatggcagggatggcattccgaggccccaaaaattttcggaaatcggaattccgtgccatccctggtctcatggtattatagttgtcctaataactaagagaaaaactatttttttttgttaggtattcagtaaagtttttaactataaatttcgttgttaaacctaaggttatcatgacaactcatacacaggcaactcgaacaatggcttattgttagactaggcctaagtttaggcttttgtaaatttttttttcttatagttgaatttctgttgacatcaataagtgtgcttagagttgcttttgcacttctcttttatatgcaaccacgcgaaaacggccacgcgaaaacgtcctgtcccgtaatttatagacgtattgaacccaattttattttctttgaataaaaattcaattttttgactaaatcatgaaaatttacaaaaaaaagaaaaaaaataaaaatttaccagaaattcataaatttttggtgaaaatatgttacaaaatagaccttaaatttcaaaattcacccggcgctgcctatcggcatcgccggcgccacaaaaaaacctattttttcttaaaaaaaattggcccaaaatcgaaaaaatctatcattttttggacaaaatctgttaacaggcccatccaaattttcaaaatttttcacggcggcgcctatcggcaccgccgaacccatttctcctaaacgtctttagataaagagcgccgcaaaaaaaagaccaaaaaaaaaagatttatacagattttcgctgaaaattggccattttaaatgctttaggtatgtgtttttaattaattctatacaaaatatttatgataaaaaaaatataaaaagcacataaaattattattacgaaatttaaatatttttaagcaaaaatttataaagttttttgactatttggcataaggcaaaaattgaaaaaccccgaccccgaaccccgaacgatttggcaaccccgaccccgacacttccaaccccgacgtcggggttgcaaccctacttaatatggttggtcatcttcttcatttttccccttttcagttacattgaccattctgtactcacatttatccgtgtcaacaaacaaatttgggacagaagtggcaccaatttggagttgtctatttcaaatgaacaaccaatttgggatgttttcgcccatgaaatttggccaatttttgcggcaaacattcgccagttgggctttaccagtggcgatgcctttgacaatttgcgtcgtctgatctcgccgacaattctcactggtcttgaccaattgaattcaattgattccaatgaactgttccccgatggaattgctgacgatggaccaaatgcaactgctggccaagctttggtcaaatggcttcacactccgagcaaaaatggccaaccgaagcgattgtatcgcaataattattttggtccacagaatctcgaatgggtcaacaacttcaaagaggtgtgtctagccatattttctataaattgtttttgtttttccaaatttgtttaacatttatcagtgccaccacttctgtcagttacaatattcaactttattttcatgtgaacacaattccaactgaaccatttgaattggtgaacaaacggacgaatgaaaagctgacactgaaacaggagatcgacgaattcgacgtaaatgtgtataattggctgttgcaacggtgcccaattggggagacggcgagggtgccagcaattaaatggggagacagcttaaatccgagtgccaatttgaacagtatcagatttgatctgtggagttttgataaatccattgagtgagcagcagcaatagcatttgaattttatcgaaaaataaaatatttaattaattttaggccattgtcgccaccaacggaagaagaaaaagaagaagaagaagcggataaaagcaacggaaatgtcgtctgctgattaagtgtacggaaatgaatgattgaataattctatttgagaaatgatctatctcaatttgttgtgcttttttctctcagaaatgcttttgttaattgtttcgttccaattatataaaacatttattttattggcttttttgttgaacatttattaattatcaatgaaacgattatttatagaatgtggaaatacagtagtttttgtttccttcctcctcgcttagaaaaaaattcactagggtaataaatagggcttccaaaaatatggacataaatcgcgaaatatggaaaaaatggatatagaaattcatactagaagcttcaaaccaagctaaaaagatggttttcgtgcgtttcaggcctcccacagtccatgaaaaaaaatggatttccatatacataattggaagccctagtaataagtagggttgcgattttttaatgacgaagaatctcgaaatagttattgttttttattcatacgagtcgtcgttgcattttttgttcatacgagtcgtcgtcgtggcattttttggtcatacgagtcgtcgtcgtggcattttttggtcatacgagtcgtcgtcgtggcattttttggttgtgcgagtcgtcgtcgttgcattttttggtcatacgagtcgtcgtcgtggcattttttggtcatacgagtcgtcgtcgtggcattttttggttgtgcgagtcgtcgtcgttgcattttttggtcatacgagtcgtcgtcgtggcattttttggtcatacgagtcgtcgtcgtggcattttttggttgtgcgagtcgtcgtcgttgcattttttggtcatacgagtcgtcgtcgtggcattttttggtcatacgagtcgtcgtcgtggcattttttggttgtgcgagtcgtcgtcgttgcattttttggtcatacgagtcgtcgtcgtggcattttttggtcatacgagtcgtcgtcgtggcattttttggttgtgcgagtcgtcgtcgttgcattttttggtcatacgagtcgtcgtcgtggcattttttggtcatacgagtcgtcgtcgtggcattttttggttgtgcgagtcgtcgtcgttgcattttttgttcatacgagtcgtcgtcgtggcattttttggttgtgcgagtcgtcgtcgtggcattttttagtcatactagtcgtcgtcgtggcattttttagtcatactagtcgtcgtcgtggcattttttagtcatacgagtcgtcgtcgtggcattttttggttgtgcgagtcgtcgtcgttgcattttttggtcatactagtcgtcgtcgtggcattttttagtcatacgagtcgtcgtcgtggcattttttggtcatacgagtcgtcgtcgtggcattgtgaagcgattttgtgtgtaaaatgtgaattttttaaaaaacggattttgacttttttgttcgaattccgggttcggggttcgaattgggcgaaaatagatgccggaatcggtttttccgaccctaatcactttggttggattttagaatttttccgttgtccagcactgactatctgtgtataaaagggatgaaacttttcactttatctcataccaaataatttttttcgcgaacaccaccggacatatttaccaaattcttgccgttatgccgctgagcacctccgaatgtattttgttttccgctattctgttcggcatctgcttatttgttagtcatacaattccatttttctgaataacactgtcttcctcttcaggtggtggattattatgccctgactgttgcgaccttttcattcctcattggaattatggtagttgttatgtaattttcactttagcacaaaatatttcttttttaagttcggtgcactctggccggtgatttgttctactttttacggctctgtcaaaacttcgaagaagaccacttccgcttcaaagcaatcggcatctgccaatgcatctggaactgcgaacaccaaatcatcatctgaccattcctctggcacttccaaagacaagtcggcatctgccaatggatctggagcgaacaccaaatcgtcatctgaccattcctctggcacttccaaagacaagtcggcatctgccaaggcatctggagcgaacaccaaatcgtcatctgaccattcctctggcacttccaaagacaagtcggcatctgccaaggcatctggagcgaacaccaaatcgtcatctgaccattcctctggcacttccaaagacaagtcggcatctgccactgccgcgggcacttccaatgacaattcgtcttccatggcaaaatcggattacgttgaacgccagaaggaccgctccagccgcgtatgtttactcactataccttaaacaaaaatacgcatttctttttttagtgcggtgagcagcagaagaaaaagtgatggaagaaaagaagaagcggatagaagcaacaaagatgtcgtctgattaagtgtatggaaatgaatattattgtatttgagaaatgatcgatctcaattgttgtgcttattttctctcagaaatgcttgttaattcattccttctataatatacatactcatttatttttctcgattttttttgttggccaattggtttaggataattgaaagattgtctaaagaatttggtagtagttaaagtggttccccccccccccaaaaaaaaattcccatgacatacataagagacaattaatttatttatttgcttgcttttatgtggtcccttttttcgtttcctcctcctcatttcattcgttctccctaaatttttctcattttgttgctgcacttttctgctgttggtcgattgtgccatcactctttggttattttttggccatgtcaaaaaacgacgacgccccaacaaaaaagaaatgtaaaaattcaacaaaaaattttaaatatttcttcaatttttcagctttatctgcgccgattgttggcttttggtgtttgattttcttacgccttcccaatttggccccgaaattgcattgatcaaccgctgctttgacatttacgtggacgaacatttcaagacacgcaaatggaaattgggcgaaattcgaatttgctacaaaattgaagaaaatggcactaagcaaatgcatattcacaatgccgatgcaaatccattgccaatccccaaaatccgtttccgaacaaaatcatcggattcagacacatcaaaagcatgtaaagattgattaatttgcaatttttcgtcttaatttctgcttttcagttacatcgatcaaaatgtcatcgcatttctccgccgttttcaccgttgtattttcgccgtttgtttaacggatttgttcattttcacgggcaatgttagccttttggacaacatttggccaatgttccgcaattctatgtgtgcgatgattttgaataccatcgcttttcgtcgtttgcgtcaattggccccgtcacttctcaacgattgttcattcaattgaaccacaaaaatggaccgacggtaagaaaggatttaaaaaattgcaagttttcatttacccaattttcttatgtttcagttggatttgtggcgacgtgtggatggacattctcccatcttttgaccatgctcaactcggactcaaaatggcattgctttccgaccgtttcgatgttttggtggacaaacatttcgatggaaaaagcgaattgacaatttggagacgtatcaaaataagcgaaactgtctgtggcgatcgatggcaaatttgtgggatttccattgccggaccattcgctgccaaacaaaatccgttttcgtttccttcagattcagtaaatcaaaaactatacagaaaccaattaatatggttggtcatcttcttcattgttcccccttttcagctacattgaccattctgtgctcacatttatccgttcaaacaagccaatttgggacagaatgggcaccaaatttgagttttttgcgaaaagcattcgtcatttgggctttcacgatgccgatgctttgaacaacttgcgcagtcgcatttcaccaacgattctcactgatcttgatcaattgatttcaatcgattctggtgctctgttacgcgatggaattgctgacgatgggcaaatgcaactgctggccaagctttggtcaaatggcttcacactccgagcaaaaatggccaaccgaagcgattgtatcgcaataattattttggtccacagaatctcgaatgggtcaacaacttcaaagaggtgtgtctagccatattttctataaattgtttttgtttttccaaatttgtttagccatttatcagtgccaccacttctgtcagttacaatattcaactttattttcatgtgaacacaattccaactgaaccatttgaattggtgaacaaacggacgaatgaaaagctgacactgaaacaggagatcgacgaattcgacgtaaatgtgtataattggctgttgcaacggtgcccaattggggagacggcgagggtgccagcaattaaatggggagacagcttaaatccgagtgccaatttgaacagtatcagatttgatctgtggagtttcgataaatccattgagtgagcagcagcaatagcatttgaattttatcgaaaaataaaatatttaattaattttaggccattgtcgccaccaacggaagaagaaaaagaagaagaagaagcggataaaagcaacggaaatgtcgtctgctgattaagtgtacggaaatgaatgattgaataattctatttgagaaatgatctatctcaatttgttgtgcttttttctctcagaaatgcttttgttaattgtttcgttccaattatataaaacatttattttattggcttttttgttgaacatttattaattatcaatgaaacgattatttatagaatgtggaaatacagtagtttttgtttccttcctcctcgcttagaaaaaaattcactagggtaataaatagggcttccaaaaatatggacataaatcgcgaaatatggaaaaaatggatatagaaattcatactagaagcttcaaaccaagctaaaaagatggttttcgtgcgtttcaggcctcccacagtccatgaaaaaaaatggatttccatatacataattggaagccctagtaataagtagggttgcgattttttaatgacgaagaatctcgaaatagttattgttttttattcatacgagtcgtcgttgcattttttgttcatacgagtcgtcgtcgtggcattttttggtcatacgagtcgtcgtcgtggcattttttggtcatacgagtcgtcgtcgttgcattttttgttcatacgagtcgtcgtcgtggcattttttggtcatacgagtcgtcgtcgtggcattttttggttgtgcgagtcgtcgtcgttgcattttttgttcatacgagtcgtcgtcgttgcattttttgttcatacgagtcgtcgtcgtggcattttttggtcatacgagtcgtcgtcgtggcattttttggttgtgcgagtcgtcgtcgttgcattttttggtcatacgagtcgtcgtcgttgcattttttggtcatacgagtcgtcgtcgtggcattttttggtcatacgagtcgtcgtcgtggcattttttggttgtgcgagtcgtcgtcgtggcattttttggttgtgcgagtcgtcgtcgttgcattttttggtcatacgagtcgtcgtcgtggcattttttggttgtgcgagtcgtcgtcgttgcattttttggtcatacgagtcgtcgtcgtggcatttttggttgtgcgagtcgtcgtcgttgcattttttggtcatacgagtcgtcgtcgttgcattttttagtcatactagtcgtcgtcgtggcattttttggtcatacgattggtcgtcgtggcattttttagtcatactagtcgtcgtcgtggcattttttggttgtgcgagtcgtcgtcgttgcattttttggttgtgcgagtcgtcgtcgtggcattttttagtcatactagtcgtcgtcgtggcattttttagtcatactagtcgtcgtcgtggcatttttggttgtgcgagtcgtcgtcgtggcattttttagtcatactagtcgtcgtcgtggcattttttagtcatactagtcgtcgtcgtggcattttttagtcatacgagtcgtcgtcgtggcattttttggttgtgcgagtcgtcgtcgtggcattttttagtcatactagtcgtcgtcgtggcattttttagtcatactagtcgtcgtcgtggcattttttggtcatacgagtcgtcgtcgtggcattgtgaagcgattttgtgtgtaaaatgtgaattttttaaaaaacggattttgacttttttgttcgaattccgggttcggggttcgaattgggcgaaaatagatgccggaatcggtttttccgaccctaatcactttggttggattttagaatttttccgttgtccagcactgactatctgtgtataaaagggatgaaacttttcactttatctcataccaaataatttttttcgcgaacaccaccggacatatttaccaaattcttgccgttatgccgctgagcacctccgaatgtattttgttttccgctattctgttcggcatctgcttatttgttagtcatacaattccatttttctgaataacactgtcttcctcttcaggtggtggattattatgccctgactgttgcgacctgttcattcctcttgggaattatggtagttgttatgtaattttcactttagcacaaaatatttcttttttaagttcggtgcactctggccggtgatttgttctactttttacggctctgtcaaaacttcgaagaagaccacttccgcttcaaagcaatcggcatctgccaatggatctggagcgaacaccaaatcatcatctgaccattcctctggcacttccaaagacaagtcggcatctgccaaggcatctggagcgaacaccaaatcgtcatctgaccattcctctggcacttccaaagacaagtcggcatctgccaaggcatctggagcgaacaccaaatcgtcatctgaccattcctctggcacttccaaagacaagtcggcatctgccactgccgcgggcacttccaatgacaattcgtcttccatggcaaaatcggattacgttgaacgccagaaggaccgctccagccgcgtatgtttactcactataccttaaacaaaaatacgcatttctttttttagtgcggtgagcagcagaagaaaaagtgatggaagaaaagaagaagcggatagaagcaacaaagatgtcgtctgattaagtgtatggaaatgaatattattgtatttgagaaatgatcgatctcaattgttgtgcttattttctctcagaaatgcttgttaattcattccttctataatatacatactcatttatttttctcgattttttttgttggccaattggtttaggataattgaaagattgtctaaagaatttggtagtagttaaagtggttcccccccccccccccccaaaaaaaaattcccatgacatacataagagacaattaatttatttatttgcttgcttttatgtggtcccttttttcgtttcctcctcctcatttcattcgttctccctaaatttttctcattttgttgctgcacttttctgctgttggtcgattgtgccatcactctttggttattttttggccatgtcaaaaaacgacgacgccccaacaaaaaagaaatgtaaaaattcaacaaaaaattttaaatatttcttcaatttttcagctttatctgcgccgattgttggcttttggtgtttgattttcttacgccttcccaatttggccccgaaattgcattgatcaaccgctgctttgacatttacgtggacgaacatttcaagacacgcaaatggaaattgagcgaaattactatttgctacaaagttgaaaataagagcatttccccaacatctgtattctatgtcctcttcgcatctcttcatgttatcactctaaaatgttgattctaatcttgatatcatgtcagcttctatctcatagaaattataatgattaattcaagtctcgtatcccatatggcgcggcgcaaatttccgcggcgcaattgtattttttgctgagcggcgcaaatggtgcggcgcaaaagtcggctaaccctacatcagatagaattaatttaattatcagttagttaaattttacaatgaatatattacgtataattttgtttttgttattcttttttttactctacctttttcatctaacttgatatttattttatttatttctttattactttaggaggcataaatagaattcattattaaagcataacacacaaccattcatttatagttagcttttttattatttaatgtgaaaaatttatataaacattaattaagataatataataatatataaaatttccctcgagctataaaattctaattgccaagataaaatattccaactataccgaacgatgccttgttataattttttaataatggataatttttttccgtaaatacataatagttatcataaataaaaccataaacataaagtattaagtacaataattaatattgtaataaactgatataaattatacaatgactctatcaataaagaaagaaaatataatcttatatttttgtgcgtagcatcaagttagataaaaattaaattcatgatgtttaagtttgcgagattatataaaaatagaaaaaatcaaatactaataattttatcccagctagaaaatttaattttttaattagttttccaaattttctaataagcattcatttttctcgtatattaaaaacgtaagaaactgtgattaacattcataaataaaaggataaaaagttatttcctataaataatgcaggaggaatattaatatttatttagacaactaaatatgatttacat

SEQ ID NO: 7 - DNA, 3498 bp, Heterodera glycines
actaacataacataccatatcataccatatcataccataccataccatatcataccataccataccataccccccttttttttgttatttcactttgttaacctttaaaaaactaataaaaattattccaatagaaattaatcttttttacttcgtcccatttattttattttatgattttttttacatttaattttaattttattagcatcactaaaaccttaatactattttccttttattaatccagagttattaaactattattccaataaaaaagaattttgattttttacttcattccattttattttatgaattcattaataataataataatttatttttatttttataagaattagtgaacttaccatttaaatttttctccatggcaaactccaatcataatcaacttcagcaaggacagtcagcacttggaaatgtatattttggcacatttaatattaatatatcattaaaaaaaatgggttgttttactcaattgatctgactagccaacatagatttgtcatttatattaatttccataattgttcaagaatgtattctgcaccgatggaacgcacaatattcagttcttgaatggatgcgttacccaaattggccaacctttaccgtatgtttttttgatggtgaagactttaaatttgtgttccaagaccgctctgcctgatcgttgtttcaattgatcaccggcccgaacaacagactcccgcaggattgctttctgtgactaatgttgtgttgcgcaatgccgatggtcatcggattgaagcttcgggatggcaaactcaagcgggtgttttggcgtcattgtccattggaactgcttactggttcatgaactgtatggcacgttcacggtatcagcgactggattgttggtaccgaattggcgttgatggtagaaatgctaccataattcctcacccaatacgccaggtaatttttattattattattattattatttaaaaaaatcactgattagcaaacaaccaatgctcgtcctaatgaatcagttggacttcgtcactcaatcgcatctattttgggggaacaaattcaagtttttaaaaattaactaaagttgtgtataatttaattaaggctcaaccggttcaaattcagacgggaagtggtcgcaatgaagtggtctgattttattaaaaaaaaatttaaaaaaaattatataggtaaatggaaatttgaatggttcacgtaatcagctccgttttaaccaaaccaatgaagaggatgtgaacaataacaacgtgaggaaatgatatttcttctcagcatttttataatttctgtggaataaaaattatattagacacttcatcaccgttttggcataccaatccgtacgcgacctcccgagagaagggtgggtgaaagtgttcgtttattttattgtaactgatttgctcttaaaacaaaggccaggatcagagatcattgtttacaaattagtccaacgatattttaaaaggtgaatcgttcgattgatgactccttcgtaattgaacgtacaacaccaatgagaaacacactgagaaacacgagaggggaagtgtgtgaaatcaggttcttgcctttggaggacaatgagcgtcccgaccttgtgatggagatcctcattcaacaccttctcgaccgtgtcttagatgggcacccgagtccaatcctagttggactgcagctccaaccgccggggtttgatcgaccctacgtgatccgacttcggccacctgaacaaaacaacgcggcagcacttgctgcagctatcgaaagactcaatgagcaatcggccgctggaatagacttgctttctggaacgaccgtcaccaaagttctcgctgtgtggcctttggaatccgttcgtgtcgatgctcagcgagggggttgataaaaaatttaaaattttgataaaataaaatataggtgcgtgcgatttggataacgaacatcacttatcacacaacgtgcagtcaatagttcgtgttgtgaaccccaacgatcgttactgcctcgcgcgtgctgttcttcttggactttgtgatcgtgagacacaaatgccaaatggaggtggtcgtggagcgttcaacacatacgcaagtcgtcaataccaacatgggactcaggccgttcatttgcttacaagagccggtgtttctgttgacaaacacatgtacacactggaggatgttgcgcaactccaacaatatatcaataatgagaatggggtaggacaaattcgccttgtaatcttcgaaaaggagcaagaataccgtattgtcttcaagggagaggggtaatatttttttgtttatctaaattaaaaaaaaaacatttgaagaactgcagcgcaattcaatttatgtatcctgctagaacgaggacacttcaactatattggacgaattgcacagctcttcaaggttcctggatactgcattgactgtgaacggagagcagatgcgcgttaccatgcgattggttgcaaggcggcatgtcgtctttgttttcgattcgggggtggatacccgtgtcaacgagaacgggttttaatttgagcttatttttttcagttataaaatttttttagttgtctgatggtcagatcagttcacgaaaatgtaccgaatgtggtttcattttcccaaatgacaactgttatgaatatcatttggcgaatgatgcccctgctccaattgatgggcgcggacatagacaacggcgttcactttgtcaatggcgacgtttttgtcccacatgcggtcgtgttgcctattttggaatccatcaatgcccctcgatacgtcgtgctattgggccagttgattgctttcgttgcaaaggtccacatatgttggatgaaccttgctacatccaaccgattggtgttgcaccacctttaccaatgcttggtcctgttcacaacaacgacgacgacaacaacaacaacaacaacaacaacaacaacaatgaggatgaaaatgatattgatttcataatcaacaatctgggaggagaaggtgatgaagatgaagatgatgttgaaaacggggatgatattaatgatgatgatgatgatgagcgagatgaactgctaccacttcgtctttgcttcttcgatgccgaaacatcccaggagcgcccactacagctcaacaaccaagtcgcccataaacatgtacctttgctaatagttgctgaattcatttgtgaaccttgcattcgagctggaatcaacatcaacgatgggcaaggtcagcgcgcacccggttgcgtttgcctatgtggaagagtgagaggtcaacagatgcgtcaatggatgtcaccaccttttgtaaatgctcctggggataatactcttcagccggaaggagctcctgtattcaacaaccgtcgtttattttttcattctttagagaacgaagcttctgaccccgtagaccaatttctcga

SEQ ID NO: 8 - DNA, 12920 bp, Heterodera glycines
  unsure (1)..(12920): unsure at all n locations
aaggacgatgcggcgactctttgaactcgacactaacccattggatggagcttcacgtcgtatgggggtgtgagtggaaagaacggctccgancgcganttggagctcaagcagcgtttcgaagcagtatttgtcccgtgtccattggatccacgaaacgatgccactccgtggtggtcgtacggagcccttcaaacttcatcatgtgtgctcagacgatgaagagatattgtgcattgatatagttagcctatatccctacgtcatggtgctttttctcaataaatttgaatttgaatttgaatttagaaggtgaatcctttcccagtggggaatccacgtgttctcacgcgtgaggtattgcttcatccaaccacggccccacttccctggacatgttcgtcaaataacatgttccggggacttttacttgtacgagtgctcgcaccgcgcctaattcgtgtcccgttgctgggctatcgcaccaaagatggacgtttcacctttccactctgtgcttggtgtgcggacagacgccagcaacgtccatgtcaacatggtgacgaaaagcgttcttgggtgtgcgcatacacgcacatggaattgaacaaggcacttcaactcggctatattgtcgttgatctctttgaggtacattaaaaataacgaaaaaaaaaatataaaaaaaaggtttggaactatgacgagtgggacgacgacttgttcagcaaatatgtcaatacattcgttggtctcaaagtccaagcgactgggtggccggaagggtgtgagacagatgaacaacgtaaagaattcgtggataatttcatgcgcacggaaggcatccaattagactcaacgaaaatgacacccaacccagggctccgcctcattgccaaaacattggcaaattctctgtggtatacgtttttaaacttctatttgaacaaaaaaaaaatgtttaggggaaaaatggcacagcgcgtgggtttcacgcagataaagtacacgcgcactccagcggaattccatcaactcttggacgatccaacattagacaaactggactttgtccacgtctccgagcatatggaccgagttgttgtcaggaagcgtcccgagtttgcaaaggcacccctcacaaactgtcttccagtcgcaatatacgtcacatcgtacgcgagacttcatctctattcatacatggaaaaagtgattgcactggaaggggctgagcttctttattgtggtttgcgaatacaatagaaaaaaaaatgttagataattttagacactgactcaatctactacgtgaacaagatgggtgggcggtgtgttccggaaggcgaggcacttggacaaatgaagcgtgagcatgttgatcgtcgaattgtggaatttgtagctggtggtccaaaaaattatggaattcggcacacagcacgagacggaactgatgagcgggccaacctaaaaatacgaagcttcagattatcgtacgccactcaacaattactgaattttgaagcaatgaaggatctgacactggctacatataacattgacggacctatgtcagtttttttttaattttcacaactaataattttaaattttagtgatgacgtcatcgacaacgatgatctctacgtgtacggaggaggtggagcccatcgttgcatccgagtaactttcccgcaaattgaccgaaatgtccgttctgacgtatacacctgcgaggcccacaaagactacagacctttctacgccaagggccgtgttcgaccgggaatgcaaacacgaccatttggatatgtggaggatgtatcacatccaccaatacaacctacggctgaacgaagaaagagaacattgattgaccctgacccaactcgaccgggttattctggatggttttgaaaatttattatcaatgaataaaaaattataatctcaacgaaaaaatttgggaatcacacttgagagatattgaaataaattgtgtaaattatcaattgaattgacaccagttataatgatttttcccgagatatagatgagacacgttgcatcattttccaatttgcatcgaagtgctgggaaaatacttggatcgtaaacaccacccagtcttgttacgaggcgctccacatagattcgttgtggaaaggttttcacacccacaatgttgaccacacgcatctcatggatatcgaagatggtgttttgtgtatgttgtattcttcgcaaaactcgtttcgcaaacactcttgctctgtctgggtggggtacgccggttaggacgacacgtgccgactgaaaaattagagcagccactgtttttttgtttgatgaacggattcgcatgatgatggcgtggaaacggcgtgggttgtactcagtattggctccatgttgtgcaatagtcaaaaattgttcaattgttagtggttgagcatttattttaaaaacaacagtacaatttgatacagaaaacatctaaataacaatattcaaagcttctaatgggaagaaagtcttatgatctccaccgccaaattcaacaacacaaggcaaatttgaatgacgcaatcgaataccgtgtttgatgtaatagtgcattcgaacctaaaatattttgagaaataaaaaaaataaaaagaataaacaccgtgattccgaggtaaccacggtatgcagggactgagtgagcatccaaaatggagagatcgttgcagcgaactgggaaattccgtatcgatggacgcaggtgggaggtgcacaattgagaagagcgtaggtgttcaacgatggcgcgacgcttccccaagtctttgaagagtacgtgtaactcgtgggcggaacactcaaatttcttgcacaagtggtcaacaagcggaataaagcaacgacgcttctctcgacagtcgcaatttccgggaggatctaaattttaattaaaaaaaataacactaaaagacaaactttttctttgtttctcctcttcctcatcgatttgcacaatagctataggctcccgcttttcctcttcatcaatgagactaatccaactagggtcttcctttggtgacatgttagccttgtcctgttccatttccgggtaagcgttattcatccaatcagtggcgagaattaaatccattttttttaaattaacagaattaaaagttatatatagagttttaaatctaaatgtaattaaaaatggaggaaacttttgatcatacggatgtacagtttcgtcatccattcacaatgattgtgtcaggaagtacgggaagtggaaagtcggaatggataatgagattattacgtaacttggacaaaattatttcagtaccaattgagcgtgtattgtattgttacggggagctgaatccgaatattttaaatttacaacgcaatgggagaattgacaatataacagtcactgttcacaatggagttcctgctgaagactacattaaaggaaatgccaaaaaggaaaaattgttgctggtgttggacgatttattggttggtatgagacagcaatatttagacacactctttactcgcggttcacataattggggagttagcataattctagttactcaacacctctttaataaagagttgcgtgtcgcgcgtggaaattcacattatttggtgttaatgcggaacccagccggtgagcttcaaattcgtactttagccacacatctttttccttcaaggacagctcattttatggagtcataccgtaacgcatgttcaaaaaattttggttatctcctagttgacatgcatccagaaagtcttgaaattttacggttgagaacacatatatatgatgaaaagataattgtttacgttcaaaaatgaatgtttccaatttaattacaaagaatacaaattttttagagagtatttgtaatgcaaaaaattccaaacaacttatacagagagcatcagatgaacagcttttatgtatcgtagagatttgtcttaatattttaaaaggacgggttcctctaaagcctgaacatttaaaaaaattgaaaacacatgctcagattttgcgtcatctagccagaacacgttgttctcgttccgcaaaacgaatattattgcaacacggtgcgggaattcccgccatagctggattgctctcttcaattgttttgcccttggtttcaaatttaattgcaaattataaataacgccacaaaaaacaataaataattttaaaaatgcaatacacaaagcggtatttgctcgttccagaggagatttatcagagtctgacgtcacctcaagatggaagtcctcttggattagttagatcacgaattaagcaaattaaaaatgatgatgaaattaacgatgatgagagggcatttaaatatgaacaagaatttaaacgcctcaaaaaattaaataaagatgaggaggaacgccctgttgatgttaaattgcaaaacctacaggaaatgacagaggctatgccaaaaccttttaatctggtaagaagaccggttgctcgtagacgtcgtaatatcaaacttggtaaaacaagaaaagatgaagaaaatgaagtttttgaagatgcagaaacatttgaccaaggggatattataaattacatttataaaaactctgaggccttgggaatcaatgaggatggacagattatcaaaacaaatggccatgttcttagaacgagtaatatagaagatattgttgcgcatttgttaaacaaagacaagcgtgcaaataccaaagaaccaacagcactcaaagagtttgttgctagagccaaacaaaatccgcttttgagtaaacgtctcttttctgaaggtcaaattggcacgggagtttataaaaaggctatgataaaatttaagccttcgttatggatttgaagaaacagcgattactcgagtttttgtataaagacataaattcaccagtcgcattcacgagccttgaaccattgttgagagaggcgaaaaaacggcaaagaaaaatcacgagagcagatgttcaaaatttcttgtacacacaacgaacttatacgttacatcggcaagccaagcgtcgctacagacacttaccaacattagctcctggattacataccgaatggcaggcagatttggccattcttgatagacttgcaaaacataatcgtggattcaaatatttgttagtttgcattgacactctaagtagacaaatatttgttgagcctgtaaagtcaaaaacaagtataaacataattaaagcatttgataatatctttatgagaagcaagtacattccatggaaaattttgactgatcaagggaaagaatttacagctcattcagtaaaaaaatattttgatacaaaagatgttgaacatttttgcatgctgacttcccctcaattccacgctggtatggctgagcgtgccaatcgtagtataaaagaacgtttatatcgttacttcaccgaaagagacacttacaaatggattgaggtagttcaggacattgttaagggcattaatcagtctataaactcctccattggaatgcgacctgctgacgtaaattttgaaaatgcagaggaactgagacaaaagttatataatgaagcgaaaaaatttccaaaaaagagtcctaaattcaaagtgggcgaccgtgtgagaatagaaaaatacaaacatgtattccaaaagggttatttaccacgatttaccgatgaaatatttacggtagcagaagtacatacagaacgctcgcccgttgtctacagattaagtgacgatagcaacgaaattataaagggatggttttattccaatgatttatgcaaaattctcaaaaacaaagaatcactatatgatattgaacaaattttgaagaagaaaaaacaaaatggtattgaatacgttctggtaaaatggaaaggatacagtattaaattcaatagctgggttccattgagttctatctccgagaaaaatatataaaaactttattgcgctttatcttttaaaaaaaatgccatccaattctttttacattgttcttccttcaaatacaaatgttgaaggtaacaagacaaattcattccgggttcgtttaccacgaaaactacaattcaactccgaatgggaagttggactcgctgttattgtatatcctcatacttggccttcgattggtactgttgaacagcaatttgtagaagttgaatggcaaacaggaaatacggtgcgtattgaagtaccaccatcgaatgtcacaaatccaattgacttgggtaaaactctgtataggctcttgggcgaaggaagtgaaccgttagcaaaaaaggtacgaaccgcacagaattctttttcgcatgctacaaactctgctcgtcgtggggctagagaagaatacataaaacgaaaaacgagagagaaacgaagtattcgagatgaagaaaaacttctagaagccttattgacggacattgaaacaatggttgacctttttggtgtgactcaaggtcttttagcgcgtgagaagcgcgcggagacgagcaaaattccgttgagaatgtctgctgatgacaatgaatcataccaacataaattggatgaatatttttcaaatttaagtggtcccgatttggacatactcgaagaaatgatcagagcaaaattgaacgaagaaattaaaaatatggtagaggaggaccgtacaattcttgatgcaacgaaagaaatgggaatggaagcgtgggttcaagcgtaccgtaaagttaggctcgtttgccgatttatttttgatatcaacaaaaatcgtttcgagttaatatttgatcagcgatatgtaaggagggttaaaatttcttcacaacttgcgtatatcttaggctttgacagtacagattttacgacatcggaaaatgaagcaaaatttatgccagatatgaatggtggcgtatcatcttttcaagtttatactcccgatctcattgaaccaatgatgattggtgatgtcacagcaccagtgttacgcatcgtcacaattcgaggaaaacctgatgaaatagttgaagaacaatttttagcaatacaatatcacaaaattttaattaaggaaatttctgaactcctgatcgaaattcgtacaaatagcgggagcctaatgccattccaatatggaatatgtacattaactttacatttccgaaaactgtcctacttctgaagatgaataccttggaaattgataaaattttatcgacaagcccactcacaaaacagacttatatcggctgttttgcggctgaccagataccaaatatggaaatggtaaaatttccaaattgtctggtaatgaatattgacccaatcacctctaaaggatcacattgggtttgtgcttacagtccttctccgtcacacattgaatactatgactcgttgggcatttggccaccacctagcatacacattgcaaattatttgtcaagattcaaacaaattcgttatagtataattctacttcaatctcccaattcaagtgtgtgtggtcgtcatgtgctcttctttttgtttaatagatgtctgggaactccctttgaaaagattgtaagatttttgcattttggaaaaacaacacctgacacacttgtcagttcttttgttacaagaataataaatataaatagttgaaaaaatatagttttttcacaaaaatgcatgtcgattttgatccccaccaagtggattggtctacattctcgcacgaatttattcaatatggaggttacaatatttttcgtggtgtaccatatcagcgcggtgctggtatcggttcagtatttagaagcttaatgagatttcttttaccgatagggaaacaaattggatcgtcaattgcacgtcaggggcttgaaagcgggaatcgagtgttaacaaatgtattagaaggtaaagatttgaaggagtctctcgtcagcgagggtaaaacaggacttaaaaaccttttggaaacggcagcaaataacattgaaaaccaaaaaggacagggatttgattttaaaaaatacaagaaagaaaccataccacggtatggaaaaattagaagaaaaaatataaataagctccaatcttcaattggaccacctatggttgttaagaccaaaaacaaacgtttacgtgttgactcattgggagcttactaaaaaatgacttgccctcaaaagattagtgaaaacagtcctttggcaataaacagtggtttaaacattttctcaatacctccaacaaatgtggcggtcgttcgttcattctttcgtcaagttcttcccttggcgacaatcactcaggaatcaccatatctctttaggttatacagtgataatttgtggactgatttgtcacgaatctatctctatcttgaattgtccattgaaaaaccgggagctattgacaaatggatagctatagaggacactgatgtcagcgtgtcagcaattcaaggaattgggcaaacgtttgttcagcaattaaaagtgaccgttggaaacactgaagtttacgatagcggaaatttatatccatacaaagcctacattaccaatgaattgagctttccagtaaatgcaaaaaagaactttctcggctcaacgggatattatcacacggaacgtcacgatgatccaacggatgatggatttaaagaacgttgtaaagtttttaaaggtggtaataatgcacagttcctctctcgccttgactttgacttgggaaaccaagaactctacctgttaaataatttggatttgttgttcacaatttacaaagcgaaagacgcatttcttttgcaaacacttaaagctaatgacgacacaaagtaccgtttgaccgtgcacgatgttaaaatttacgctaaaatgattgaggttcagccctcactcaacatgaatctttacaagacactagaaaagcagcctgctacttatgctgttcgtaaaaccgaaatcaaatcttcatacattagcagtgggcgctacgaatttgaatacaacgtgttcagctcgacaatacctcgtcgtgtaacaatagcgttggtcagtaactcggcttttaatggtgattacaaattgacgcccttcaagttcgatccatttgatttgcgagaaatttcagtacatgctgggggcatggtctatcccgttgtaccacataaattaaatttttcaaagaattactatgtaagagcattcgtggagatgtatgaagcgttgggcatggctaattcagaacgttcatttgacgtttcaatgaatcaattcaaaaatggatgggccttttttgtcatctctttgaattcaaccttagacgatagctgtggatttgagctgttgagaagcggtacaaccagtattagggccacatttgattcaccaattccaaagggaggagtggaaatgattgttctcggagaatttgaccaaatgattatgattgattataatcgacacattgtctccgactcgaagcttgggtaaatttataaataaagctcaaaattatattagagaaaaatgaataacacgacgaaagaaggaattgaggtgttacgttcatcagatgagactaatgacactctttttcatcttttgctcctttcacattatgcatttgccttccctgtttttctactctgttggttcataataattaaattcctcaagaggagaggtcatatatccccaagcgaagcggaaaccatgattgaagaaatgaaaaatattcaaagacaaccaccaatattttttcaatcaaagtagtgtaacttactttttttacaatgcattatttttttcttataagaatttggtataattttaattgttattggaattttttttgttaaagacaaatttttaaacatttaactgtttaaaaataataaattattgtttataataaaacttaattcctgttattaaaaaaaagtttggtctctcgccgccacacgcccgcctccgcagcgcttgtggtgaagcaaaggggaaaatttttcaccatttagtcaacaattatcccattcctttcaactcaccctgtggccaagtggttaagctcctcgcttccactctcaacggttcgagtccactaccatgtttttgatttttcacaatttttcggaattttcatcataaagtcaacaattatcccatacctttcaactgcccctgtggccaagtggttaagctcctcgcttccactctcaacggttcgagaccgcgaccatgtttttgattttccacaatttatcggaaaaagtcgcgcagctctcgctcatttaaattaattaatttaaatttaaattaattaaattctcgcgcacaagtccatccaataggtttcggctgaagggatcaaagatcatccaataggtatggggcggggggggggggggggggaccaaaaatatggattgaaaaaaatcgataatcaaagtacatcgtaactttagctggttccacgcatatttacatatattaatctattttggtgcattccgactagcttaggatctcacatgttcaatgcttggacggcacgaccgcagcgtgtcaactatggctgtctgattggcaacatgtccaccggagaagagtgtatgtctcccgatttgggcatacgatgaaaaccaaaacggcggatgaggacgagggcgatattatgagagggaacagtgtggacgacacgccttaccttgtctagaaggcaattatgagcaccctaccgtatccaacacaattagcacactaccgtatccaacatattttcaagtgaatactgtattttgtaatttatagctttttgcactccttttctcattcatgtgatcatttaaaattttcgagcctatctattctattgcaatatgcaaataataaataaagtatatcacaatacatcaatttgttcgtcgattgtgcatttaaaacttggcattttggtcaatgaaacagactttaaaaaaataattcgctggtttgagtccgcaaggattctttttaatttaaataaaaacggctttttatcaaccatgatcgaaaatttcctaaaacaagagcattgccagtcaaaaataaggagattttaagccttcaattaaaaacctgcatttctttttttgatataactttgctcaaaagcaaccaaattttaaaataatgatatttttcgatagcactaagtgtttactataaatttgcaaaattcatgaaaaatggttaagtttcaagaaagttatgacaaaaatgtttaaaaaaacttaattttttaggcttctcagttcaaaactgttttgaagcttaacgaattgcatagaaagcacttagggctaccgaaaaatatcaagattttaaaatttggttgcttttgtgcaaaattatgattaattttctgccaaaaattttcttccaagtcatttttcgtcagtctgcattttcctagattgttttgttcaggaaatctagacccaatggtcagattaaaaaaaaaacttcaggcataggtccggttttagcaggaaaaaccttgatttcagggatagaaattttagaatttgtagtaactagtttaatggtatgcagttagctgaaatttttggactgtcatcggactaacatttgcagaccgacttttgaggactgacatttgcggaccgacatttgcagaccgacttttgaggactgacatttgcggaccgacatttgcagaccgacttttgaggactgacatttgcggaccgacatttgcaggccgacctttgaggaccgacttttgcggaccgacatttgcagaccaacttttgagaaccgacaatggaccgacaatttacatatgctgactgaaaattacccaatttccgctaaaaattacatttttttttgctatattgaatttgcatatatacttcctttttgttaattgctaaaaatcctaaattatatttacgtgaaaagcattcatacgtatgtaaatatatgcttaatatttttaataatgccacataaatgactgagaactgcccaatttccactataaattatcaaaattattattgcagttgatttattcataaattcgaataataattcacatgtacatgagcacaaaatatgcatataaaaggcggttgtcaattaatgaaaaccttacaaaatattttaaaaatttccttttaggaggtattctcaatgaaaaccccaaatttcctcgccatttccattttcatttccatcggatttggaattgcaactccatctaatgaagatgaatgtaagattaatcatataaattaataaatttatataaattaatcccgttataaatatataattcatataaatttatataaattaatcccattataaatatatataaacttaataaatttatataaattaatcccattataaatatatataaacttaataaatttatataaattaagccgcgatgatgacaatcagcagcagaagcaatattgtgtgtccgacattgagcaggacccccaaattttgcatgagcaatgcttggatgccaaagagtggtccttgtccaacggattggtcaaatttattcaacaaaaaatgtgaaggatttcaaaagaaaactaaaaaagtagcaaaaatgcattaaaaaatatgtatacaatccggaaatactatattgtttcttttttgtcacatgttcttctctttttctgtctctttttcaaatgttttccaaaagattanatcacaaatagagaataaaagctagaaagtacaaaaaaaaagtgaaaaatgattagatgtaaatgcaattttttaattcgcatttaataatttaaatttgaaaaaaa

SEQ ID NO: 9 - DNA, 1655 bp, Heterodera glycines
gagactaatgacacttttttcatcttttgttcctttcacattaagcatttccttccctgtttgtctcctctgttggttcataataattaattcctcaagaggagaggtcatatatccccaagcgaagcggaaaccatgattgaagaaatgaaaaatattcaaagacaaccaccaatattttttcaatcaaagtagtgtaacttactttttttacaatgcattatttttttcttataagaatttggtataattttaattgttattggaattttttttgttaaagacaaatttttaaacatttaactgtttaaaaataataaattattgtttataataaaacttaattcctgttattaaaaaaaagtttggtctctcgccgccacacgcccgcctccgcagcgcttgtggtgaagcaaaggggaaaatttttcaccatatagtcaacaattatcccattcctttcaactcaccctgtggccaagtggttaagctcctcgcttccactctcaacggttcgagtccgctaccatgtttttgatttttcacaatttttcggaattttcatcataaagtcaacaattatcccatacctttcaactgcccctgtggccaagtggttaagctcctcgcttccactctcaacggttcgagaccgcgaccatgtttttgattttccacaatttatcggaaaaagtcgcgcagctctcgctcatttaaattaattaatttaaatttaaattaatttaaattaattaaattctcgcgcacaagtccatccaataggtttcggttgaagggatcaaagatcatccaataggtatggggcgggggggggggggtccgaaaatatggattgaaaaaaatcgataatcaaagtactcgtacattgtagtggaataatatgctttttaaacagacagaaatttttgtttttaagggtatttttgagaaactattaatccgatttttatctcacagattgacgcaaatttataatagaattaaatataaataatttttaggaataatatgctttttaaacagacagaaatttttatttttaagtttatttttgagaaactattaatccgatttttgtctcacagattgacgcaaatttataatagaattaaatataaataatttttaggaataatatgctttttaaacagacagaaatttttatttttaagggtatttttgagaaactattaatcccgatttttatctcacagattgacgcaaatttataatagaattaaatataaataatttttaggaataatatgctttttaaacagacagaaatttttatttttaagggtatttttgagaaactattaatcccgatttttatctcacagattgacgcaaatttataatagaattaaatataaataatttttaggaataatatgctttttaaacagacagaaatttttatttttaagggtatttttgagaaactattaatccgatttttatctcacagattgacgcaaatttataatagaattaaatataaataatttttaggaataatatgctttttaaacagacagaaatttttatttttaagggtatttttgagaaactattaatccgatttttatctcacagattgacgcaaatttataatagaattaaatataaat

SEQ ID NO: 10 - DNA, 1179 bp, Heterodera glycines
  unsure (1)..(1179): unsure at all n locations
tcaaaaatgttggcacatttaattgcgtgaaagggtataatttcccaaacgattaaatgtaagcgcatatttattaagaaacaattgggcaaaattcaaaaattttttaaagattttgccaatttaaatttacggtttttgagatcaattttggcattttctccgaaaaatttataactaaaaagtgtttgggtgtctgtagccctaaaataaatgaattaatcaaaccattaaactaaaattgataggcatattttgccccctaccaattaataccaattttaattaaatttttagtgaattcttttttaagctaaaaatttcaccatgaaaagcgatgaaaaaagaagacaaaaacgaatggacaacaacaataataacaatggggtacggtgagaatgaaatccggcaacaagcaaaacgaataagaagcgaagagagatggccaaccgcgaggcacgggacatttgtagagctattatatttttttgagtagagcgggaccgggaattttgggcttaaccgggaccgggaccttttcgggttgaaaaaccgggaatttttggctgggaaaaccgggaaaaaacccgggactggtcccggtcaaaaccgggacctcggtactcagttttactcagttgtccgtgttttggtcccggtcccgctctactctaatatttttcatactgtgctttctttgagaattgccttatgtgtgccatatatgcctaaccatatgtttgcagcactgattctaatcatatctttttcatctgcgactttgtatttgatgatattctttttccacgaatgtcgctatgctttttccaattctgaaccgattttgccgctgtaagtgatcataagactgaattctgtgcgaattgttgttgctgtatttgttgttgaacaaaagcatgcataaaaatgtttttcttgcattctaaactcagttgagcctgatgaaatgggtccattcagtctgaggcatatttttctggccatatcttttttttacgtgataagccgaagtgacataagtatgaataatcgtaatatttaaaatttatttatttgaattttatttgataaataataaatcataacttagctncaggcttannagtattttaatggcattttgttaagaaaattgcttanaatttncaaaaaatactg

SEQ ID NO: 11 - DNA, 18686 bp, Heterodera glycines
tctgttatacattctatgctgtgtaattttctatatctttatatttatccactcttaattactctcctattctagccctttaaatgccatcaccatttaaagatacttcgcaagaaaagcttaaataccaaaaattcgaatctgttatacaattctatgctgtgtaattttctataaaatacatatttatccactcttaattactctgctattctagcccattaaatgccatcaccctttaaagatacttcgcaagaaaagcttaaataacaaaaaattcgaatctgttatacaattccatgctgtgtagttttctataaagcaaatattcatccactcttaattactctcctattctagccaattaaatgccatcaccatttaaagatacttcgcaagaaaagcttaaataacaaaaaattcgaatctgttatacaattccatgctgtgtaattttctataaaacaaatattcatccactcttaattactcacctattctagcccattaaatgccatcaccctttaaagatacttcgcaagaaaagcttaaataccaaaaattcgaatctgttatacaattctatgctgtgtaattttctataaaatttctagcccattaaatgccatcaccctttaaagatacttcgcaagaaaagcttaaataacaaaaattcgaatctgttatacaattccatgctgtgtagttttctataaagcagaagtagaatatattcatacataaattatcgattttttgccaatcaagtcaatcgatctgattggcaaaccagaagatgtgggttttgtccaaaagcctattgctacatgcgggtgccgtgcctcacacgctgactccgccccctttatcatgatgcaatcaactgactccgcccccttagcataacgcaatcaactgtctccacctcatgacgtcattaactgacccccccccctatctcatgacgtcatcaactgactccgcccccttattatgacgcaatcaactgactccgccccctttagcatgacgtaatcaactgactccgccccctttatggtgacgcaatcaattgaccccgccctttgctatgtttattattttttaatgattttttgagcactctatatcaaatcgctctgtaaggtcctggctataaaagtgcctccccttgtgcttctaaatcattcaacttttgcaaatgcccccaagcgaaaatctttttaatatctcgttaaatgttaatgatctggaagcgcggccgctgcctgagccccaacaacccgaacagcaacaacaaccgcaacaacaacaagcagaattattgattcagattggggatgttgaggatgcattgcttctcaacgttcatgagggagaagaaagaggagaggaagcagaacaagaagaggaagaacataatgttgagcaaattgaagaattgatgcgtttacatgccgagtatgtagcgcaaattttcaatgaaattgctgatgatgaaataaacaatgaatgatttttttgaataatcgataatgatgaaaaaatttccaatgtgtggcaggataaaaaactatggattgatctttgagttttcagcagggtaatcaattgtattgatcacgggcgtcgctttggcaatataaattgctgttccctagtcccgtttgtccagttatttcatttttgttaaatatccaatgcgtcaaaaatcttctccccgaaaaattgtcaatcccgacaacaacaacaacaacaacaacaacaacaatgttgcttctagttattctgaccgcctaaaaaagtttgcaaatgacgaagtaaagaaagcgctcattgagatcgaagaagagagaaacaagaagaagcaaaaacaacgccaagaaaagcaataatgtggcaaaaaatccttactaatgattattgtttttcacattgatcatttttcaatatctttcatatttctaaatcaataaataaattgtcagatttaatggctggacgtaatccattttctattgaatcggtacacgaaatgcggaacagaccaaggaacacacggggcgaggtggctcaagttcgttttgtcccgcttgagcaagtgcagcgtccagaccgcgttctggaacaactggttgaacaactgtttgcccgtgtgttgcaaggccgaccacctccatcattgataggattacaattgcacccgcccacgtttgaaagtccgtttacgattgcacttcgtcctccagaacaaaacaaccctgctgcaatagctgactttattcaacgcttgaatgaccaatctgcggcaggcatcgacttaaccgcaggaacaacacttaccaaggttttggctgtttggccaatggaaggtgatcgaacggaaaatggtcgtgaaggtggagaaaaatatgatttttttgtcattgtcaccatttatcaataggtggttgtttgtgggacgaagagcacgctgttatccatacagtgagttcactggtcagaattcgaaatccaaacgaccgactgtgtttggcaagagctgttttgattggtctaaaggattatcgttctcgcatgtttcatgacctacaagaaggtcaatgtgtgttcaatgattacgtggcacgtcaacgtttccacgggccagaagcaagtcatttgttgcgaagagccggaatcgacgtgaataaatacatgtacactttggaagacgttggacggctacaacaatgggttgatgaacattacggagaagggcagattcgtctaacagtttttgagaaggaacaacagtaccggattgttttcaaaggtagtgatttgtaatggaaaaaaaacttttctaaaaaaaggagactctggtagggctgcaagatttaacttgtgtttattgctggagaacgcgcactttcattatgttggacgtattgagcaactgtttcgttgtgcaggctattgtgttgattgtgaacggagagtgactcgaaagtaccatccgcaagaatgtaaagttgtttgtcgactctgcctacgtttcggcgttgattatccttgtcaacaacaacaatttcctgatggatcaaacagcaaacgtcagtgtttgcaatgtcaattcgtttttcctaatttggattgttataactaccatttgttaaatcgcgcacctgcaaccttggatggacgaagtggacgacgattcagcccaatctgtgaatggagacgtatttgtcggatatgtggtggtatcatttatgccactttcgagcacatatgtctgcgaggaattcgacaacagcaacaacaacaacaacaatgcctacagtgctggggagaacatggtcaagcggagccctgctttattcaaccgttggacgagtttcgagcaccaagaaggtccaaccagcagctacaacaacaacaacacgaacaacgccaagaacgaacgattgaaaatgatgttgatgctgatgaagatgaagacgacagtgaatgtgatgatagtgaagaaaacaaccggggccctattaatggtcggcgttctcgtaaactcaaaccgataagatattgtttctttgatgccgaaacctctcaagaccaaccattgcaacttcgaacccaagttgctcaaaagcatgttccacttcttatcattgcggaagtgatttgcgagcgttgcattgctgccggaattacggttcacgctggcgttggacagaaagcgaatggttgtgtctgtggcacgccaacggggcctagaggacgacagtggtgcagccccccgtttcgcaacgcgcccggcgacaacaccgaaatgcctatccatattacatacaaccagcggcgccttttcttccactgttttgatgacgcaaccaaaaatcccgtggatcagttacttgacttcctaatctcaacggggccccggaaatcgcacacgatttgtctgtcgcacaatggcgggaaatacgatatgcaccttgtattggaggcactccatcaacggaatttaccacccaaacggatctgcacaacgggcctgaagatttactcaatgacgctcaaaggcaatcttcaacggcaagtaaccttcaaagacacgctcaattttttcttctgtgaactcgatgctcttccgaggaccttcagtttgccaaacaacattgcaacgtcgaagccattctttccatatttgtacattcgtcatcaaaatttgaatgttcgcctgcaagggctacccggtattgaattttatcagcccgatcacatgaagacggctaaacgtgaacaattcttgcgatggtatgcagttgaacgcaccgccgccaaatttcagctcagagaacaactgataacctattgtgcaaacgatgtggcaattctacgcgagagcgtgctgaagtttcgcgaattaatcatggaaaatacgagaggattggacccatttgtaattgcgtcaacgggtgctggtttggcgttggccacgtttcgacgttgttttcttgctcgcaacaagcttgtcaacacacctgagggcggatatttacgcggaagacgagcatcagcagaatctgcacgatacattcgcatgtatgagttgatgaatcctggtgtgcatgtccagtctgcacagtggagcgtgggagaagcgcacgttgatgacactggttaccgattggatggcctccatgttcgttcgcctccacagcgaaatgtggcgatagagtacatgggttgttattaccatggtaattgcgtagtgaggggccgagttaagctttaaaatttatcaggttgccccaaatgctatccaaacgaacgtcagcgccatttggctggtggaaggactgctgaagagctgtatgagcagacacagcggcgtttatgggagttggagcacacgcatgggcttgaactccatgttatatggggttgtgagttgaagaaaaatttgcgcacaaatccgatgcttcggcaactatacaatgatgcgtttgtccctcgcccgctggatccacgtgaagatgccctacgtggaggtcgcacagagccatttacactgcagcacgtttgcacccaaaacgaggaaatcattctcatcgacattgtaagtggatggtacattatgcttttttaagatgtattacgttttgaggtgagcctttacccctatgtgatgaaagcatttgagtttccggttggaaatccacatgtaataacgcgagaggttctcttatgtcctccaacggccccgttaccctggcaaaattcaaattgcaacacttttcgcggacttttgtttgtttgtgttttaccaccaaatccggatgttcgccctctacgaattcctctgcttccgtaccggaccaatgatggacgactgacttttcctctctgtgcacgatgcgctgattttcgccaacagcgcccatgcacacacacggaccgtttacgctcatggaactcagcgtatgctgtttttttctttaaagtctatgccaaaaaattcaggtatactcatgtcgaattgaacaaagcactcgaacttggatacacagtcacggatctatttgaagtaatctaatcaaatgaagatatatttcatcaaaaaaaaataggtttggcattatgatgcttgggatggtgaaatgtttcgtggatacatgaacacatttgtcggtatgaaagttcaagcgagtgggtggcctgcgggctgtgaaaatgagcaacaacgggctgagtacattgttgatttcgaacgtgtcgaaggttttcggcttgcgcgtgaaaagataggaaataatcccggtctgaggatggtcgctgtgagttgaattgctcaaatttatttttgaatcaatcaataaattaagaaactactagccaattctctttggggcaaatttgcacaaagggttggacgaaccgaagttcgttataccagaacacctgctgaattccattctttgctcgaggatcccacagttgaggttatcgattttcatcatgtttcgccttacatggaccgggttgtggtgaaaacaaaaactgaatttgctttggcaccacaaacgaactgtttgccaatcgccatttttgttacttcatacgctagacttcatctttatcgctatattgagcaagtgggccaactcggccataaaatactctattgcggtcagttaaataaaagttttttttaaaattatttattaaagacactgactcaatttattatgttgcaaaaaatgggagacgattggttcccgaaggagaagggctcggacaaatgaaacgtgagcacactgaccgacgaatttttgaattcatcagtggtggcccaaaaaactatggctttcggcactgtgatcgtcttacgcgggcagatgaaaaggcggagctaaaagttcgaagctttcgactctcttatgccaccaatcagctactaaatttcgaatcgatgaaacaacttgttctggaacattacaactttgatggagaaatgttctttttaaaaaatttttacgtaaaaaatacatttaaaaatttcagtgatcccgctctctatatgaacgacgaatgttatgtctgccccggatcatcccgttctatccgtgttacttttccacaaattgggcgctccccttgctcagatttatatacctatcaagcgcataaggattatcgcccccattacgtgaaaggccgcgtaaggccaggaatggagacactgccttttggctatcgcaacgggtttacacgtgccaacacacaacaacaacaacaacaacaaccgcaaatcaacgaaatgcatggaagaaatgtcaatgatggtgatgatgctgcattccgtgatttgccgggctgttcacattggcaacccactcattatcgcaatcgatataattatcaatagttttaataaagttcttcatttggagtcaaaaaactagataagtgaagaatgaaaatcgacaaaactgaaagacaaagtttaaaatcagcaggtacaaaaacattctcttccaacttgtttcctcaacaaatatgggtaactgacagggctcattgtgtgcacattgttgttgagtgtgacttgctcatttcctttctgacgattgtttagctccatatattgcggggggcgggggtgaaatttatcgttggcaataggtcttcgtcctcgcccttgttcttctttgcctctctgacggtttctgtttcgacctcctcctcctcctcctcttcttcttccttgtctatgaataatggccgaacccaaagctaatctttctccccctcgttggttatcactaattcgtgtttcaacgacacttcttggacctccgcttgcttcagcttttgcacgggcgtcttcacctccacgtgccattacgacgacttgctggtgcgcgccatcatgataatcattatcatcatcactcgtcttttgggtttgccctttgttggctgcagcaactgcaacaccgccttcacgttcactcaacgcttccgctcttacaatatggctgtcctcctcctcctccataccactgccttcctctcgattgacaccggtttcagctttagccctggagccttccccggttgcggcgactgctgcccatgtacccttttcgtgtcggtcaggccatttgaaatctctggcattgtcgtcaatcgatttcagggtatccccccatggttcaggacttctctttgacgctattgagcagacaacagaataaaattggaatagaaaaaacgaaaaaagcatttttttattcaatgttatcagtgatgaatgaagacaatagtgaaaaggccttatttatatgctcaacagaggcgagtccagtgataattgctttgccagaatgataaacaatacaagttgcatgaacatcattatcagtcagtgagagtttgcatcgaagtgctgggaatattgttgggtcataacggacagaaaaaaattctttacgagtgtacaggacaggcaacaggtgaacaatgggtattcggtgtgggaatgtgtgagaacatacaatgttgaccactcgcaaatttatcaaagaaaatttttctgctttgttggtagcatgattataagcatgttgtatacgtcgaaggacacggtgggcaactatctttgcaaaacttggtttccttacaccagtcaaaacaactcgtcctgattgaaaaataaggcacgcaactgttctcccagcgtagcgaagccgcataattattgagtgaaaacggcgtgtgttcaattcaacatttgctccattacgagcaatttttaaaaattcgtctttgctcaggcgtcgccttattattttgaaagtaacggtgcagttttgaatgtttagcataattttatggctaaaaatttgttacaacagtaataatcaatgaaaaaaaaagaattatccgtcattgacatgtaattaaaatcaattcatcaatcaatctttctgttatccttctcttaacactctctctctctctcaattctgcttcacaacattcaaacactcgagcgggaacaggtcgtaatgttcacctccacccaaacgcactacacatggaaggtttgggtgccgtaggcggagtccgtgtttaacgtaataatagattcgcacctttaatttttctatttatacagccaccaaatgcatgagcaaacaaaccgtaattcccaaataaccacgcattgcaaaagcatcagttgctgaaagagtcgacaaatcactacattgtacgacaaagttgcggatggccggtctgagatagtttgtacgcaggcgtacattgaaacgcatatattgtagtatctggcggcgtgtcttcaaattttgcaataacacttgaagttccttggctgagcacttgtagcgctcacacaaatgctcaatcaatggcatttcaatttcttgcgcttcatgctgttgttgctgctggctgtatggcccgctgcgcccacagtgacatttattggatgtcgaattggagttgtttgtcttaaaaaaatctatatagtaacagaaaagcattcaccacttccggcgccgctgcctcctcatcgcttttcattgtgtttccattgcgtcttttgttctgctcctcttcatcctcctcgtcaatgactcttagccagttgatgccatcagcaatggcagcgtcgttcgactcgttgttttcctctcctcctcctcctcctcctccagactgttcatattcagggtaggcattgtgaatccaatcagttgccataatgcgctccattgagcagtacaataagcaatatataatgaattgtcctaaacctaaattgtttttttattgatttgctataaatggagcaaaattttcaatcattcaatgtgacggacacaaaatttcggcatccatttacattgacgatttccggtagcacaggaagtggaaaatcagaatgggttatacgttttttgagaaatgtggatgcccgggtatctaatgggccaatcaatatgatattttattgttatggtgagtttaaccacaacattgcttctctccaaaaaatgggttcgattggaggggtgccagtgaacacccatgcaggggctcccggtgaagaaatagtaaagcaaaaggctcgggatgttggaggaaaattgttaatggtattggatgatctaatgattggaattggccaaaattttttggacacaattttcacacgaggctcacacaattggggggtcagcgttgttttggtgactcagcacatgttcacgaaggagttgcgtatcgccaggaataattcgcactacctagtgttaatgcgtaatccagcaggagctttacaggtacgtaccttagccacccaattattccctggacgtgctgagcattttatggaggcatacagggacgcgactgggaaacagtttggctatcttgttgttgatatgcatccagaaagtgaggatttgttacgactgaaaaccaatatatacggagaaaatatgggcggagcatccacaatttatgtggcaaaatgagaaagggcagcagcagcagctcaaataacagtggcgttcctatacaaataggcccgctaatacacaaaaatattgattttctaagcaaatttaacgcaaaaacacgtgcttttcagacacaacgacgaatgttacagggggcgacaaacgaacaattattatgttttgttgagatatgtctgaacatattgaaaggaaaacttccaataaggcgaaagtcgcatttgcgtaaattgggcgcaataaagcattggttaagaggtctgtcacgcactagatgcgcaaaaagcgcaagaagaatattgttaaatgctccgtcacaagtcgggtctggagctcctgctattgcgggactattagcaagtattttggtgccaatgttgatagaaaacataataaataaataaacgattaattgaaataagaatgagtaattaataataataataataatgcggcacacaatgcgtatgttcctcgtccctgaggatttgtttaattcagtgataaattcttcaaaggcaccggcagatggaacagcacttggtcttgtccgccagcgtctgcaccaaattgagcgaaacagaaatatggatgagaatgaacgcttagcgaactatcaccaagagtttaaaagactgaacaaaattgtacgagaacaagaggaacgtccaatggatgtccgattacaaaacataaatgaaattatgagcgccattcctccccctccttcacctaatctatctgggcctctacagacttttcatcctcctcaaaacacgggaaccaaaacaaaatcggtagcatctactaagccgtttaggatcgtaaataaaaggaaaagcataaaagagaagttgttgagaaaaaaagcaaaaaaaagttattttaatactaaaaatggtgatgagaatgaagatgatgatgatggtgaagatgatgaatggggacgtaattcagcagaaaaagaggatcaaacgatgcgacaacaacaacaaacatcatcatcagcctttccttataaattaaggtcgggttccgccgctgagggtgaagaaccacaaaaaggcactaaaaaaagcaaaaacgcaccgaaccaaaaactcgtcgcaatattagagcatattaaaaagaatgcggaagccctaggtgttactgcggatgggaagattttgagaagggtttcaaccagtgaggtagggtcacaaacaccgtcaacatacaaaacaagtaatattgaacaaattgtgtcctatctattgaaccagaacatcagcacgggtatcgctcgctttaaaaattttccagttggattaaaagattttttggatagagcataccaggatgattatcttaaaacaaatttggtttccgacagaccttatcagtttgggagtggagttgggagtttaattggtttcaaagagaataaaaagtgtgaaaaggggataaagagttttgtcaattttaagccatcattatggtattagaaaaaaagaagcgaaccattttggaccacctttacaaagatataaattcgccggtcagctatacaagcatggttccattgttgaatgaggcgcggaaaacaaacagttcgatcaagcgcagggatgtggaagaatatttggctgaacagcccagctacactctgcatcgtcaagctattagacgattcaaacgtttgcctacgcttgcttcgggtttgcataccgattggcaagccgatcttgcagtttttgaccgtttagccccacaaaataaggggttccgttatttgttggtttgtgttgatactctgagcagacagttgtttgttgagccagtaaaaagtaaaaaaagtgaggacatggttcatgcatttgataggctgtttgcccattccaaatatattccatggaagttggtaacggaccaaggcctcgagttcaccgccaaacgcatgcaaacatatttcgattcaaagaatgtcaagcatttttgcatgtacacgtccccacaatttcatgctggtatagcagaaagagcaaatcgaacaattaaggaacgattatttcgttattttacggcgcgtcaaacccaacgatggttggatgtcatccaggatattgtgaatggaattaaccattcatacaattcatcaattcaaatgcgcccagttgacgttacatttcggaatgcggacacgctaagagagaaattagccaatgaggcagctatgagtagaccaaaacgtctgcctcgtttccatgtaggggatctggttcgcattgaaaaacataaacatgtgttccagaagggttatgttggccgttttacgagcgaaatattcaaggttgacagtgcggatgaaggccgttcacctgtcacataccgaatcagagatgcggataatgaactgatcaaaggtcgtttttatgcttcggatctatgtcgcgtccgcaaaaacacccaccaggatggtgaaaaattatatgacattgagaaagtgttgaggaaaaagaaaaaggatggggtagagtatgcatatgtgaagtggaaaggttataacaaacagcataacagctggattccaatcagttcaatcacccataaaaatatataaatatatagggaaaaatgataaatcaaaaaacaaatgtccaccatttcgtcaaattctttttatgttgttgttccctcgaacacgaacgttgaagggaaccggacgaactctttccgtgtgcgactaccacgaaaaatacaatttaattcggaatgggatgtgggcctagctaccataatataccctcactcatggccatcattgggcaccactgaagaccagtttatagagcttgaatggaaaaccggaaatgtggtgaccatcccagtcccatcatcaaacattatacgcccctatgagttgagcaaaagtttgtacagccttttggatattagtagtgagcatttgtctaaccaggttcacgatgctcagcaaagctacaaaagagcaatgaacgcggcgcgaaaacatgcacagagagagtatttgaacatgaaaagtgatcttgatagagctaggccgaaaaggagcaaaattagcgctggtgatgacgctatcccattgttgacttcacttctggtcgctgtcgatacaattgcagatgcactcatatacaatgaagacgggacggcaaactctatgctaactgctgacgcattgcttgatcgagagaagcgtgcagcaaccagcaatgtcccactgcgaagagacagtgatagcgatgaggaatatcaaaaaaaattggataactattttatgaaaatacgagacactgatgatcttcagctttatcgagagttagttgccaagcatttggagctggagttgaacaaattgactaaagatcagctctcgctcaacaactcaatcaaggaccttggaatggatgcttggattcaggcctacaggaaagtgagcagcgtattacaattcatttttgacgttcaacaaaataggttcacattgtcaatcaataccaaatttattaaacgagttaagctttcggaacaattggcctacattcttggttttgctccccaaaccgagttcaagcgaagtaaaaatccagcaaaatttatgccagatatgagtgggggagtttccacacttcatgtttacgtccccgacctaattgtgccaatgatgattggaaacgttatagcacctataatgcgcattacaacaatacgtggtaatccggatgaaatggttgaggaacaattttattcaatacaatatcaccgtgtgttgcaaaaagaaatttctgaaattttggtagaaattaggacttcaagcggtgcgcttatgccttttcagtatggaacgtgtacattaacacttcattttcgaaagtcatcatatttttgattgcgaaaaaatatgaacactgtggagcttaataaaattctgacaagaaacccggccactaggtatgcctatcgtggctgctttccagcggataaaattatgttcagtccacgctcaagtttattgccacagtgttttgtggctaacattgataccagtgatatgattggaactcattgggtagcattctattgtgaccggattggtcgtatcgagtattacgattctagtggtgtttggccaccgatcagtgagcatataagtaattttttatcaaaattcccatcagttcgctacaaccgggtccccctgcaatcaccatacgctcgctcttgtggtaaacatgttatttttttcctacaccatcggtgtcttcagtgctcatttgatgaaattgttcaacaattatggctcgcaaagcaatcacctgacactattgttaacacctttgcacgagaaaagatctttagaatataaatagcatgaaaaaaatatatccaaatacagcttttttggccccaactaataaaagcaaaaaaatgcatatcgattttgacccattaaaggttgaatggtctactttcccatttcaaaattcatcgtcatcagaattggtattcttcaatcaatatggtggagcaggggttggtacttataatatttttcacggccaaccataccagcgcggtaatggaataggggcagtgttccgcagcctaatgcgttatctggtcccaattggaaaggaaattggtgcaacaattgggcgtcaagggctcgagtcgggcaaccgtgtcctatccaatgttctggagggcaaagaccttaaagagtcgttgataagtgagggcaaggtaggactcaaaaatttgcttgagaaggcggccaacaatgtgcagacccaaaagggaaaggggtttgatttcaagcgatacgtcaaacctgaagaggaagatgctttcaaaaaaaggattggtatcatgaaaaagggcaataaatctcgtaaaaaagatataaataagctacaatcgagcattgggcctcctcaattgctaccagcaccatctagcgtaaaaaaaaaggaaaagcgcaaaaaagacgcattcgcaaagacatttttggcacatactaaactaattgtcgccgtgactaacccatagatgagttgcccgcaaaaaataaatgaacagagcccattggcagtaaacagtgccctcaatattttttccacccctcccacaaatgtgtcggtagttcgttcatttttccgtgaagttctaccgcttgttacaatcacacaggagtcaccctatttgttcaggctgtacagtgacaacctttggtgtgacctttcccgtatctacctgcatcttgaactttcaatcgaaaaaaacaaagacgataattgggtggaaatcagcagcgtagatgaaccactggttggagcaatccagggtgttggccaaacatttactcaacaacttaaagtttcggtaggcagcactgaaatatatgatagcggaaatttgtatccctacaagacatatctgacaaatgtgttgtctttttcgaaaaatgtgaaaagtcattttttaacatccaccggcttttaccatagcgaaaagcatgacagtgagaaggacaaaggcttcaaagaacgttgtagtcaatttgaaggcggaaaaaaggcacagtttctctctcggttggattttgatttgggcaaccaagaattgtatctgttgaacaaccttgatctgttgttttcaatttataaggcaaaagatagtttcctcattcataccctgaaggataaagacacccaggaataccgactgcgcgttcatgatgtcaaaatttatgccaagatggttgaagtccaaccatcactaaacatgaacatacacaaaatgctcgaaaagcaaccagctacctacgcggtgagaaaaacggaagtcaaatctacgtatattagtggggggcgctatgaggtcgaatacaatgtgttcagttcaacgatacctcgacgtgtaacaattgggctggtggaatacggggcgttcaacgggaatccaaaattggacccttttaacttcaagcactttgacataagagacattgcggtgcacgctggcggtttcatatacccaatggtaccgtacaaattggctttcaaaaaggaagcatttatgcgagcgtatgttgatttgtatgaggcgctcggcatggcaaactcagacagatcttgtgatattacgcgccagcaattcaaaaatggatggacattgttcgtcatccccctcacatcaacactggatgacagtgtgggctatgaactgttgcgaagcggcaccacaaccatacgtgctagcttcaacacagcaataccaggtggtggggttgaaatgattgtgctcggcgaatttgatcaaatgataatgattgactacaaccgtcatattgtttcagactctaaactgggttagtttttgcctatacaaatatataaatatattggtgtgtgtaaatggaagtcgttaaatgacaatgaacattacaaccaacacgacaaaaaaaccccttgtccaaattttgaatggatatgatgttgatggaccatcatcatcacttgaaatgacaaattttgaaaaaattatcttattttttggtctctaccttataatatttccgatgtttcttctctgctggttttcgttaattaattttttaaagcgctttggccatattagtcaaagtgaagcaaacggtatggtcaatggactgcaaaacatacctttaccaagaatacgatagtttacaagggaaaaataattctgaatgttcatttcatcattatcattatcatcatcatcatcatcatcatcatttattagtcagaaagtgtctgctcaaacctgaaggaaaacaatcattagcctgtagaagtggggtggtatttaccccacaaacgcataaggtcccatgctttccaacaaattttcatgaactgatttgagcagtgcctctctatcattgttctcagttgggcatagtgccaagaacgtgacttttcgctgatttcggcatatcatcaatacacattgcagacgctgggtaaaagcttttagaaaaaacaaaattgctgttacatcttccacacattgtagtttatggtggtacatctctgttaattaaatttatctcaaaaatgctacaaaaaataaattgttcacattgaacatttttttttcataatccagaaaagcaaatcactattttttaaaattattcggatcgtgcaatcttctccttcgagcctcccgcaccatcttgatcctcgcccgtttttttcgtcgtcgtcttgtaaaagcggttgaccacccagtcaaagccagtaaaactttgactgtcttcctaagagaaaaaagaatagaggcaaaaaaaaagttttaaaaagactactacctttatcgtcacttttgcagtaatcattgaccctaactttgcttccaaatgtgcgtatagcaccttgtcttccatttctaccacctgggtcgccttcaaacccaggaaagtctccgccacctggtccacgatttatcaaatgtgaaaaaaaacgaggaacccaaaccgcggaaaacatggttgcacgctgcgtgcagtcgctctcatcaatatcttgcagaacaactcgtaggtaaatgttcttgattggcctatcaactttttgcccgccacaagattcacaaatgtggttttcgggtagctttcgacgacagggaaagccccgcattcgcagaggacatgactaatgggccaaaaatgaatgaaacgaaaaaaggggaaaagatgtgcctacatcgtacacttggtactgtaaatcagcaactattgccccaatgtaaaaagtgccagcgcctgcgaagcgaatcacttctcgcaaatttttggcactttccagctcctcttcctcgggcgcggggcgtttggcagggatttgaaagcgggagagagacatttattttaataataataataataaaatatttatttgaagtgacaaaatttgctgaatgcctgttcttttatacaccccccccccccgatcgtagaattagtctttgatttttgcgaataaaaaaccaaaaactaaaggctaaaactttatgcagcactttgtatccatctatcccccccccccgcaaaagtgagaataaagaacaaaaactagactataaaagctttacgcggcggaggattttgtgttcactctacgcctgcggagcctgcgtaggggtctgtacgcggcggaggacttttgtcttcactctacgacagcggagaaacttgttcactctacgcggcggagaacttcactctacgaggcggatgacttcactctacgcttgcggaggacttcactctacgcggcggatatacgcggcggaggatttcactctacgcttgcggaggacttcactctacgcttgcggaggacttcactctacgcggcggagtacttcactctacgcggcggaggacttcattctacgcgacggaggacttcactctacgcggcggaggacttcactctacgcggcggaggacttcattctacgcgacggaggacttcactctacgcggcggaggacttcactctacgcggcggaggacttcactctacgcggcggaggatttcactctacgcttgcggagga

SEQ ID NO: 12 - DNA, 2582 bp, Heterodera glycines
  unsure (1)..(2582): unsure at all n locations
tttttaaagcgctttggccatatagtcaaaagtgaagcaacgggtatggtcaatggactgcaaaacataccttaccaagaatacgatagttacaaggggaaaaataattctgaatgttcatttcatcattatcattattatcatcatcatcatcatcatcatcatcattanttagtcagaaagtgtctgctcaaacctgaaggaaaacaatcattagcctgtagaaggggggtggtatttaccccacaaacgcataaggtcccatgctttccaacaaattttcatgaactgatttgagcagtgcctctctatcattgttctcacttgggcatagtgccaagaacgtgacttttcgctgatttcggcatatcatcaatacacattgcagacgctgggtaaaagcttttagaaaaaacaaaattgctgttacatcttccacacattgtagtttatggtggtacatctctgttaattaaatttatctcaaaaaatgctacaaaaaataaattgttcacattgaacattttttttcataatccagaaaagcaaatcactattttttaaaattattcggatcgtgcaatcttctccttcgagcctcccgcaccatcttgatcctcgcccgtttttttcgtcgtcgtcttgtaaaagcggttgaccacccagtcaaagccagtaaaactttgactgtcttcctaagagaaaaaagaatagaggcaaaaaaaaagttttaaaaagactactacctttatcgtcacttttgcagtaatcattgaccctaactttgcttccaaatgtgcgcatagcaccttgtcttccatttctaccacctgggtcgccttcaaacccaggaaagtctccgccacctggtccacgatttatcaaatgtgaaaaaaacgaggaacccaaaccgcggaaaacatggttgcacgctgcgtgcagtcgctctcatcaatatcttgcagaacaactcgtaggtaaatgttcttgattggcctatcaactttttgcccgccacaagattaacaaatgtggttttcgggtagctttcggcgacagggaaagccccgcattcgcagagggcatgactaatgggccaaaaatgaatgaaacgaaaaaaggggaaaagatgtgcctacatcgtacacttggtactgtaaatcagcaactattgccccaatgtaaaaagtgccagcgcctgcgaagcgaataacttctcgcaaatttttggcactttccagctcctcttcctcgggcgcggggcgtttggcagggattgaaagcgggagagagacatttattttaataataataataataaaatatttatttgaagtgacaaaatttgctgaatgcctgttcttttatacactcccccccccccccccccgatcgtagaattagtctttgatttttgcgaataaaaaaccaaaaactaaaggctaaaactttatgcagcactttgtatccatctatccccccccgcaaaagtgagaataaagaacaaaaactagactataaaagctttacgcggcggaggattttgtgttcactctacgcctgcggagcctgcgtaggggtctgtacgcggcggaggacttttgtcttcactctacgacagcggagaaacttgttcactctacgcggcggaggagacttcactctacgaggcggatgacttcactctacgcttgcggaggacttcactatacgcggcggaggatttcactctacacttgcggaggacttcactctacgcttgcggaggacttcactctacgcttgcggaggacttcactctacgcggcggaagacttcactctacgcggcggaggacttcattctacgcgacggaggacttcactctacgcgacggaggacttcactctacgcggcggaggacttcactctacgcggcggaggacttcactctacgcggcggaggacttcactctacgcggcggaggacttcactctacgcggcggaggacttcactctacgcttgcggaggacttcactctacacttgcggaggacttcactctacgcttgcggaggacttcactctacgcggcggaggactttgtcttcactctacgccagcggaggtacttctctctctctctctctcgacgcggcggaggactttcactctacgcctgcggaggtgtatcagcgtgcccggggattgaacttccactgacaaagtcattatccaatacactacacgggccgctgacaaattgcaatgcaaataatatttcaacataatttattataaaaaataattttccccgtttttttaaatgaaatgggcaccaatttcacaatatgaataaacaattaattagcgtttaagtttgaataagtaacaaattaaaaaaaaatttacacatatattaaaaaaaataaattttttaatagtggaatggatttcaaattcatgatattgaacttttacaaatgatccacccccccccccccccacgaaatctacagcacttgccaacaacaccttttttcttaccccctcttttcgaggccacattcactccacttggggcattaattccattttgact

SEQ ID NO: 13 - DNA, 3302 bp, Heterodera glycines
  unsure (1)..(3302): unsure at all n locations
agaccagaaaactatgcagaatataatgttttagcaaaactttgcagatatccgattattattcaatacggaaaaaagtgataaattcaatattcacattgttttatagtgataatgacagagtcagtcaaaatggaaatagtgcccacacggagtgactgtggcttccaaagaggtggccacaagatgttcttggcaaatagtgcaaatttcttcagctatcgcctcatcaacttcaacaacgggaaatatttgggttaattcggtgcgcgttagccctggcggcggcggtggtggaggaggagatcgtgcaagatgacgattacccatctcaaaaaaaaacaaacattttctaatgaattcccttttttaacatgagaaatttattcaatttactttcacagaatcattaaaatttacttaaaaaattatcaattcaccacatttggccttccttgccctccctgccctcctcttcctcctcctcctcctcaacctccggaacgtccaccattcctagtaccattgccacgcagaatgtttggacatggggtgggtcgtcgcgtcagctaattgtttttattttttaattatttgtttaaaatctgttttgtacaatttgttgactggtcccctgtaccattgatggatcaagcccattgacgcccccaccaccaccaccaccaccaccaccacttcgaccagaagtcgaaagtatgcccggagcagcttcttcctttattattattattattattattattattattattattattattattaatattattgataatacattttctccaattagcctaaacatatcatccggttgctgagccggttggccctgttgtgtttgaagcacaggtggcggtgcttgtggcatttgaaccaaaaatgactcaaattgtgccgttggcatttgtacattcattggcaaagtttgctgctggacagcgggctgaaccggtggctgtagctgaatttgctgttgctgctgttgatttggcacagtttgctggggaggggggggggggtactcaattcgtacaaaggctagtacatcggcaattctcagtgatcaaataccatacaaatttttttaaaaaatgtctttttaaaaaaaaaattttgaaattggaaaataatcttttttaagaaaataaaaaaactgaaaattatactttaagaaaaaaattaaattaaatttttttttgtgtaagagttgcctttgtacaagttgccacaacattctactacaacaccatctgctgctggtgctgctgctgctgctgaaccggcaatgtgtgattcaacagaataggcattgtgttttgccacaccgtcgcttgctgctgtgttggttgctcctgctgaaccgaaacgggttgcagctgtgttggcatcgtttgctggaccgaaactggttgcagctgagctggcatagcctgctggaccgaaactggttgcagctgagctggcatagcctgctgaaccgaaactggttgcagctgagctggcatagcctgctgaaccgaaactggttgaagctgagctggcatagcctgctgaaccgaaactggttgcagctgagctggcatagcctgctgaaccgaaactggttgcagctgagcaccaatattgcgaatgaacaatggtacctgctgctgcttttttttttaatatcccaaaagttataatccgatttttttgtactgccccaaaccctgtatttttggtgcgaaaaaaagggttaaacaatattacgattgtaattagtttttttactaaaaattttgaaaaccaaagcattagtactgttgaatttttaaaaaaggggggttcaaagggcagtacagtattttaaacagttttactggaggccgctgtactggtgcgtttgcattgacttgatttcgctgtgtttgccttccccgccgccaaaaaaataaaaaatttatttattattatattttttttcttattcaatcatatttttttataagatatgtcagaaaaatattaattgtcttagaatttaaatttaaaaatttttaaacaatttaaaatttttaaattaaaaaaaataaatgaataaaaccaccgtcttgggagaaaatgtccatggcgaggatcaacaagatgaggcggaggtggaggaaattgtactgtccccaaatactgctggtgtacaaatggccatgggacttgaaattaaataaattttaaaaaaatcccgggcctcattaacttttcttagttagacttataattttttcattaattctctttatgggggggggggggataataatttaaaacaccttgcgcacgctggataggacgatgtagacgctgaaatgagtccaaaaatgattattcaagaataaaacaaaactatgaaaagaaacgaaaataatttcaaaattattaattcgatcgagaaattttttaaaaaattaaatttgtgcttttttcacctgttgtgccctccactgccttctgctgatgctatttggcaattcatcacgccaataccatggcatttttaattaggaaaagacagccaatttttttttcattaattgagaattgtttattttttatttttaaattaattttattttcattattattatttttaaattaattttattttcattattataagtctttttttattaatttagaattgtttattttatttttttttcttcattattataagtcatttttttattaattgagaattgtaatgattaaaaattaaaattaaaatatttagcaatacaattataaaattatatttttattatttatttgcttcaattaaaatattattgtgaatcgcctaataataaaattggccagaatgatttcgctcctcaataatataaacaatttctgctgatttcgtttttttaaatttttttttacttgatcattttccatcaatcccccccccctccctttcaccccgaaaattgtttatgccctccaaaaaatatcgtttatgttttcctctccctcatctcaatccccgcatttagtcaaatcaatgtatttaaaacttacgccaataatgaccccatattgccaagtggttagtgcagtggatttgaattttccatcgggatttagccctttagacgcggtggtatttttgaagaatttttanaattcgaagattttttaatttaaataaatttcaaatattttaaaatataaaaaataagacgcttaattcatgaaaaaaaattctcgcgcnnaagtcataatagaatgggataacgaaa

SEQ ID NO: 14 - DNA, 2720 bp, Heterodera glycines
gaagttcccctcggcccactcattttcctcatcctctgacaattccctcgccgtgccgtcggcgttgaagaccaaaattccgcttcgtcctcctctggcactctcgtcggcaccaccgaaattgccgacaaataatgcaacctcctgaatgtagcggcctattggtcatttatatattgaagttgagcaaggcatttaatacgagaaagaaaacttattgcagtctacaacgcaactcaggctgacgtgtaaagaaaaccgaaagtcaaagaaagagctgaaaataattttcataatattttggggttaataaattttaataatgcaaaataaataattaactattgttatgttcttttttaaagctgaaatggttttcaaataaacaataattttaaaacaaaaaacaagcaacttttcccatttgataaaaataaatacacaaaaaataaattaaattttaaatttttgttcatttctaactacttttaatacatatcacatttaataaattcctttaaaattttctaattaaaaaatatttaatccagtatttttcatttttccatcaattaagaggcgcttctcttttccatttctgctccgcagctatttttttattagcggtgacttgtatcaccgtggctggcagaaatggagagaacaaaaaaaactgtttgtaatttgtttattggacaagtcttttttcaaatttaatttaattattaaaaaaatacatttgtattttgtacttgtaattttagtaccggaaaccatgtattttcgctttttccagcatgtttaacaaatgtgatttaataaatgaaaacatacattttctggtaggttttacgattgtacctaaagtactggaatgcacatttaccggttttgttttacaactttgattttgtgcgggaaatgcacattttccgttttgaacttaaattttagtttttttttcggttacgtttttttttgtattttcaacaataattttactccgattgcgttttttttgtaaattaaatttttttaacgttttttcgaaatttcattatgaattactacttttttaacaaaataaattatttttaaaaaattttattgaaaaatttctatgtttgaattatgctcagatgccgccgtcaagcagataaaatattttttgtaaattatttaaattttttcatacgagggttggcgaagaattccctttttttgtcagccagcgccagactaaaatttttgaaattttcctgcattttgtgcgtttcgttgtaatgtgccttcacttttgcctgccattaacaggtaccattgagctgtttgaggagttaactgtgtgcaagacgggtgatcaactgtccgcggaccaggcccgcattaattttaataagtatgccatttattttaaaactcaagaatgataattaaacattcaaaatgagaaaatacttaatctaaattgaaggtcagtaaaaaataattgaactcaaataaatcgttcattgtttttgccattggtttaagtcaattttaattcaccagacaagtgcatgaatttaaactgcttctgcataaatataaaactattagaaaagttgaaaaagaaacatgattcaatcaaaattaagaaatgaaggtcagtaaaaaatataattaaatataaaagaaaaaaataaataaagcaattcatttttcaatgaaattgattaagctcacgaaatgggttaagaaaaatattgttaaaattttacaagttcatttaaatttatatttatattatgtaataaatataaaaacgaaaaattaaacctaaagaatcggcctgaaaatttacataaaaatgcagctctatgaaatgaaaagttttctaaaatttattattttattttcttgacaagaaataattttatttttttaattacagccccctttcttcgggattcaggaggttgtactaaaccttgaaattgtgagctacgattgaatagaaaatgtaatttggatttgcaatttttattttttattaaatgttttttaagtcaattttttcaataaaatatcctttatttaaaatatcattatgtagttatgtaaatttttaatttatatttttttttgataaaaagtgatttggaatgaacaaagatgtaaaaaataatctaaaaaatgcattgagacgtgtgaaacttttgatttttaagctttgataaacaacctttttatttatttcaatattccttttggtttataattttgcttttttaagctttgaaaacggcgttcttgtgccaaaaatgttaccttattatttcagtttctgcattaattagcaaattttgagaattttgcgcttttaagtaactaatgcactgatgattgataaacttattaactagcgggtgtgtgcatgcgagggtggcgcttgggaaagcgctgcgcgcttcttgagcttcgctacctaggcgcgttttagtctgttagggtctttgcgtcagccgacatgcacttggtttcctccaataattggagttgacacatcgcataatgcaatggaaaccggaagtgccctaacgttgcacgtcatggccctcctccctcccttagtccaggcgttggcacgttattgggttgagcgctaaatggcaattcacctgtaggccctaaagagggctgaccggtccatgtcccggatccaagcttctcaccatttt

SEQ ID NO: 15 - DNA, 12641 bp, Heterodera glycines
atcagctcttccttgctcttaacgaggaactgccgagcattccagaagtgctctccggtttctccgagcccaatttggctgcacatttgcaagtacgcttgctgacctttgcccaatctctggttgatggtcaatttcatcgtggtgaattgaccaaacaatggagatgtttgaaaacaggctgtcacctgagcggttaagccttcatgaggcacgaccggcagcgactgtttgaagtcaccgctgaaaatgactgttttccctccgaagaggagatccttgtgctggcgaattgccatctctttgcacactcggtcgatgacctcaatcaccgtgttgtgaagcatggtgatctcatcaatgatgatgagttgggcctcacgaatccgacgggcaaagaagctctccagcggaatgcttgggagcttgtctaatgacacttctctacccagacgaaacgtggaatgggctgttttcccatatggcagcaaaatggctgcacacccagtggatgccgtggcaagcactttgtaggtgtatggggcctttcgcaagcgcctaataatttggccaaacaggaatgtctttcctgtacctccatcgccgtatatgaagaaacggcgggggacagtcggatccctagggttcgactgtattgccaacaaaacagcatcaaagaccttctgttggtcgctgttaagtgacggaggggcatttggctgtggacgaagatttggttgccctggaggcaaattcaaatcatcatcgccaaagaaaaactcttcaattgccgcgtcagtatttttggcaattgagtttggcgggtctggcaggccaaaatgcacacagcttaagttaaagcagctgtgcagccgccaatcaaggtcggctagggcttcaagctctgctgctttatgctgtgccggagtaataatgccttgcggattgtacatttggtctttgtacttgttccacaattctatggcattactcggctggccatagaccatgatgctcacaaaaagccatctcatctgatctggccagcgcgacagagctgcctccgccagagttttgtcccaaattttgccgtcttcaagaagaccatgcattattgcagcctcagtgaatgaggtacaaagcaacccattaaccatcttaagatgatctggatctccaggaaagtgacgcataagtgaatagagcgcgaacctttccgggtccgatgggggtacaggaacaattcggccgataggtggcctttttatttgctgccttttgtacaggacccatttgtcctttgcccatcggaactgctctgggactttttcaaaaagaatgtccttaaactttgggtcattcttccactcattttgccattgtttccaatatgctgaacactgcgtttctggcagttcgccttgctggatttgttgagctttgctcaccagctggaatgccctatatacaatgggctgttggtttggcaaatgaattgccaatttgacaacatgatgcgaaagacgggcaaatggcattgaatgaacaatggcatatgcttccgttgcaccacggaagttcatcttggcatattgagccggctcgtcaattccgattttattgccggactcttctttgcactcgacataacaatgtcctggccctttaaacgggtacttgagtgcgtacttaatattcgctttgttaccatatgcaaacagtacattatggtgtactcggtaacgcagcagaacataaggattatacggcacgacatgtgagttgtcgtatattaggccgtttacctctaattgggcaccaccatcagatggtgaaggccggaaatacatcgcgggcctatccgggcgtaaaacagtacattttgagtaaggggctgggaaccccttcttgcaccgcccgtaaattgggtcgctaggaccacaccaactgtcactgcatctgtgcagttgcatatgcattgtttcgcggatttcgcgatgaattttcgcaatgggcgtgtcgtcatctttatcgggcaaagatggaatgtgcgcccatatgtattcctgaatgacatgtggtactgcgtccaggtcagtttgggcaacaatgtgagcgtgtgggcctcctcgaccttggaactccatggattcaccatatccaaggattgttccaaagaactttttctcataaagttcttctcggaactcggcgatgttgctggtccagacacgcatccacatgtcaaaacggtcagtaaatacttgaccatttttatatatattctctttgaactcaggccattccctgttgttcgtgaatgtgatgaagagacgcgcctttttcgcgtcatggcaccgtgcaaaaacggtgttgcaatcctcatacattttcttccaatattggagagaatttacgttgtgctcggacagccgaacaacactgccaatgtcatcaacagttttctgttgggcattggggttttgccgtgcttgctgcctgttgtattggttgaccaaatactgcagcaaattttttggagtgctgatccgcaggtccatgtctggtctgcgcaaaaatgtggcgacttgccaatcaatttttgcagcctgatcaaggatccagcgttggccaagtcctccaccacatgaaagaatgtggtggtacttcaactccacattttcgtcccttatggcgagacgatacttgcagtaatctcgcaatgagataaatcttttagatttgtcaatgcgtccatacgctgatgaagcagaagctacagattcagcatctgagtctgcgactgacccagcatctgatgatgcaattgactgagtctcgcacgactcattatctgactcggcttcagagtcaaataggccagatgcattctgagcaccttttcgcttacgcgatgatggcttagcatatttaatgccagttgtgtatccatcatctcccaatggtttgattaatgggtacgttaggctgtcagtccacggactgaaaggagcaatttcatttaattgcccttgtttgttctctacccaaattcctttgggcggaggtgcacccgtagggtccgcatgaatagcgaacatcccttcacccgtagaaggggtgattatttggtgtgggtgcaattttgggtctttgaggccagctggagctctgcgctcattcaacaaagtcatacggaagaaacgaagctcttcctgattttgttgttggagaagctcagtgagctgctcatgcgcctgcttatatgcttgcgcagcaggatgatgcgcttggatcatttgctccaagatctcaagggtcttatcattaagttgatgaccttgcacaaactcttcttcgtttgtgattttttcacccgtgaatgtgggatttttccgtcgttgctccatggcttcgactgggtccagaatgtacaactgaccgaagccaggaatctgggttgtgccagcctgcatactgcttatgcggcgatggaactctccattgagaattactgccattggtccgcctgccggacatggcttattgccagccgaaacactcgcaaattggagcaaattgttgtaacgcgacatatgtcgcacaaactccttcccttcacgggattggttttcgtccacaaggagctttgcaagctcttttggatgtgggttaagctttggtaaaacaactcttccctgtcgacagcaaaggctgctgttctcatgcgggaagagtagtgctccacaatgagagcactttttttcgccaagcctaccagaatctgtgtattctggataatgctttgctgctgcggcagcacagcaccaacccttgtgcacaaggtgacaccgtttagtgagcggtgtaacttgtccaggtacattttccgatgtgcgacgcttcggtgcaggtgaagaagaacggctaatcgaagctgattgccgtctacctatgcgcactgatcgccttggaggcgtcttaggtctgacaaatattgcatcgtcagcctgcgcaattggctcttgcggaacgcaagattccgacaccaaaccaagcgtgtcagcttggttttcacctgccacttggcattgggtgagaattgcattagctgcctttccacttgtctgtggttcgatgatcattatgtcatccggctcatctaattccattggctcagcggccttggatgtcgactgcacctcatccgcatgtagatagacaattgggcaaggagttggtaccccctccctcggatggtatggcacattatcagagccatacagctcattgatgtgccacaaaatgcgctttttttcataattgatggataaatctggcagaacaaatgtgcggttgttcataagccaggattcagcatacaggcacacaaagtacccgcagctatttccatcgtgttggaccgtcagatttacggcattaaaaatcccggtcaacactgttgacggcaaaatgtcagaaatgatctttataattttgtccgtcagttgcacatccaatctgccatatggggtaggcaaagagtcggcaaaatgagtaccgcactgaacatcatggacaatgagagtccaatgtccagggaaatgcaatggcaaaagtatgacttctgccgggacattggggtcatacccaaatgtcatatttttatattcaatgacacggtcaatgcccatttgccacacagctggatcaacaacgaccacttttcgctgtgatatgcttgccaagtatgccaaatattcgacaataaaggcgtcattcagaaactgtgccagatcattccagcacgtttcaatgaatcttgggcctgaccttcttgcatcgcattcgtaaagagcagttgctccccatttccaaattttacaggctaaattccgcgtggttgcgaaattaatttgcactgtgctgaaatttattttttcaggcacattgggcaaaaccgccgcatttatgccagcttcagagctctgatccattgaagagctttcgcccatggaatcattagctttgcccctgcctgggccacctcttttcttagccggccgccctccactcctttgcgtggaaaccggtgtcaaagcaattgcctcaagagcagatatgggtcgatcaaaatcgtcgatcttcccttttttgttgcgaggcgatgactcatcattttgagtggccgatgcaatttgtgtgccaacggatgacacactgttttgcgaagccctgaatggctccgctccggctttcggaggcatactccgtcttttacttccaatggaagaggccggggtgcttaattgcaaagcaccaatattgggcgtggtggtgcccgggtgtgatgccaccccattctcatctgcacttccgtctgggacgggtgagcgatctgggctgacagattgctccatctgccgctggtaccgctcttgccttttcgctctcaaatttcgtttatttgaaggcatctgaaaaaacaaaatgactcttccaataaaagatggcaaaaatatgaggcaaactgaaccataaatgcacattttaatcaaacatttattcagattggcaaataaattcaatctgacatcattcttcgtcatggtgtgtagtcgtcccgctgaatccatcagccatggatcggctcacatatcccattcaagagtgcagaaagtgcgacacagcctcgaaggccagtcagcgaaccatgttggtgcgacatatgccccaaagggcctgtcagcgaaccacattggtgcgacatatgccccgaagggcctgtcggcgaaccgcattggtgcgacaatgccccgaagggactgtcagcgaaccacattggtgcgacaatgccccgaagggactgtcagcgaaccacattggtgcgacaaatgccccgaagggcctgtcagcgaaccacattggtgcgacaatgctccgaaggagctgtcagcgaaccaattttattgccctttgttcgcgccaatccctaaatggccaggggcagggaactccgaacaacagacgcgttgctgatgaacagaggacaatcccaccgtagccaacctcctgtttggaaaatgggacctccaaacaattagcattgctaattaatcaaaggacaatccttttcacaaacattcagctgggatacaaggccagaaaatggcgctcgcattggaccgtccagccacatgcatcgcaagggcgagtgcaagtctggccgtcattttcatatcagtcaaatctgactgatatgttgccatggtcgcaaagcagaccggcattgtgtcatggtcgcaaagcagaccgacactactggctatggtcgcaaagcagaccagcctcgccatggtcgcaaagcagaccggcgtttgcactacatatcgtggtcgctaagctgaccgatacgttgccatggtcgctaagcagaccggcacgtgcacaaatctcatcatggtcgcaaagcagaccgatgagatttacaaacaaataaatgtgtgaatttcaaaatgggtataaggacagaagtctttacaattgactaccaatattcaaaaaattattttaatatatcccaagtattaattcaagtgtaaagacttcttaattctatttggggcttatgcgtgccaaagtgtactaaacttatttcctaactaacctcagatttgggttagtaaaactatttaatcagcgtacactttgtcattatttagaatatatgtgctctgaaaatttttgcttgttctattaaattcatgaaaaatagatgaattttattttaaccggccaaacacagcaattgcctgagaatttcttcctttcacaaaaaatttactggatggaattggtatcatcccaacaatgttgagattttcgaaaaatcacaataattgattttcataatttgaaaattttttaaaataaaaggtttttcaacaaagaaaaatgtttccattttccatttttgaattgccgacaaaaatattggagcttagaaaacatttgaccggttaatttgaaaaaaataaacttgcgcagcaatccgcttgacgccattgaaatttgtcaaacagcgaattgaaacgtggcgaaatcagtgccaatttgaggccgggttcaaggccaaaagaggggaaaatgtccatccaaacatcgctagaatactaaaaataggatttgtttttgttaaagtaaagtcgatagagcgataaaagtttaaaaaaacgaaaaaaaaacaaatagtttgtgactctctttgtgagtaaattgtacaaagtttttacatttataggtttaaaatcaaaatcataagaaattcattcaagaaaaaaattgatttaaaatttcagaaattttttactttagttttttgccttaaaaaatttctggaagaaaaatatttttgaaatttttgcgacgagattttgtccggcaagatttctggcggtgagatttcggcggcgagattttgcctggttaccaaattgttaacaaattttgtcaaatgaccaaaattagcgctttttggaaaattttaagaaaaatagtagttttttttgagtgcgggcggcggtgacggtagtgccgcccggaaaattttttgtaccttttaagcaatataagaattcagtacataattgagttttcagatagataccctccaattcaggacaaatctgaaaaatcaggagctgtgaaccttggattagcaataaattgtccttcagcgtgctctttcttgaacttttaaaattttgaggcctagatccaaaaccgataaataccaattatgcacacaatccatcaaaaaaacttgccaaattcagaaaaaatatccgttttgccaccatcaatgcatcgaaagggcaaaagcagtgtcaatttgaggccgagttgagcaaggccaaaaagggtaaaatgtccaccaaacagcgttgtgcatgtgctgaaaaaaatcacaaaaattttataaaattgcaaaaaaaatttaaaaatgatttaccaaaacccaaataccgggcactttttattaaaaaaacgcggaatttgggaaaaatatttttgtcagctattcattgacttttacagaaaaaaacccaaaaattttatcgaatttggaatttcattttagagctatttttgaaaatttgggcctttatggttttggggctataaccaaaagaaaacttgccaaatttaaaaaaaagcaatgtttgtccaccaattcgaaacgtggcgaaagaagtgccaatttgaggccgagtgaaaagccggtcaaaaaagggaaaatgtccatcaaacaaacgattgttaagcagttgctgaaaatgttaagaaataaaattgcaaaaaaaaagcaaaactcctaaaaacgggcacttttacaacaacaaaaaccggatttggtttttaggcaaaaaccctttgaaatttgaggcccattttgccacaaaatccttaaaaatccttaaaaaacaattcacctttttgccatcgaagtgtttgtccaccaaatcgaaacgtggcgaaagaagtgccaatttgaggtcgagttgagtacagtcaaaaacggcaaaatgtccatccaaaagtcatcgcgaaatttctgaaaaaagtcacgaaaaacttataaatcacaaaaagaaacaatgaaaaaacaaaagccttttaggcaagatcctttgaaattgtaggcccttttttggcagaaaatccttaaactattcattgacttttacagaaataaaccaaaaaattttgtcgaatttagaatttcattttagagatatttttgaaaatttgggcctttaaggttttggggctataaccaaaaaaaacttgccaaattttgaaagaagcaatgtttgtccaccaaaagttcgaaacatggcgaaagaagtgccaatttgaggccgagttgaggacagtcaaaaacggcaaaatgtccatcaaatcaatacaaaattgttactgagaaaataaataataaaatataatcgatatttgtcgctgaaaaaagaaattttgttttgctctctagttatttaaaaatgggaaaaaagaatatacgaatttgttgaaatttattacaacgaaaaaacagtgaaattattgaatttattgacgaattgatgaattttaaaaaatatttaaaaaggaaaaccgaaacaatttttacaaaagtgattagaagaggtacaaatgtaatcagaagaggtaatacaacgggaaagaggtcaagatgatttaaaattaaataaataaggaaaagtttttataaaaaattaaaaatcggatgcattttaattcaaatttataataataaaatactcgttttattcattaaaaacaattttgaaaattaataagtgcatatttatttaatttgaaatgaaatgtacgtaagtgataagaagtggtacaacagtgatgataggatgtacaaaagtgattatagaggaaaacaatgatcagaaagggtacaatattgataaaaaaggtaaaaagtgagtagaagaggtacaactgtgattagaagaggtagaaaacgttgaaaattattaattgaatattttttaatttgaaattaattattttttgaccaattcaataaaaataatgaaactatttaatttttcaatgtaaaataattattaattttaaattaaacatttattcatcaaaaaatttttaatttaaaaaatttatttattattaataaaacaaaacaattttaaattaataaaaaccttgaaaataaccctaaaataaatagaaatataatgtgttgccgtccggatttgaacttgcccccacccccctaaaatgatgcctcagaatccccaatcacacggggattctgaggtcttgacgatgtcaaaattaaaatctgatcacttattcgtgatcagcatcataaaatagccctaaagacatgtttttggaagatttttggtgaaaaaattttttcaatcaaaaatcctgtcaccacctttggtccggaatcccaaaatcacttttatttttgtaacttttttcaaaaaggtgataaaaatgtaaaataaaacttataaaatagagcaaaaaattgcgaatttttgtagtattttacttttacagaataactttcccgaagggagttaagattttttttctgaaaattcgaaaatttccaaaatttctggaataacttttttcatattgatgctaaaaatcacaaataaagcccataaaattctcctgatttttctctattttttaggcttaatttcatgaaaattgtaccacagtgaactgatttacgaattttcaaaatttcacccaaaatcccttgggccaaaaaaatgaaaaataatttcgaatttttaaaaaattccaaaaaatctgaaacgtaaaactaacatcatattcgtgctcaggacctcgaaataccccaaaaaaatatttttcacccccattttcaacccaaaaaaaattagaagaggtacaaaagtgattagaacaacagtgatcagaagaggtacaaaagtgattagaagaggtacaatatggtttgaaagtaaataaataaggaaaagtttttattaaaattaaaaatcgaattcatttaaatttaaaaaatttttataataaaaattttttagtaattaaaaacaacattggaaattattaatggaatatttatttaatttgaaattaaattaatttttttacaaattcaaaaagaaataatgaaattctttaattaaaaaaaataaatttaaataattaaaaagaaatcttcaaattaattaaaaacagtgaaaataacgaaaaaattcatagaaaaataatgtgtttccgtccggattcgaacttgccccaccccctcaaaatgatgccccagaatccccaatcacacggggattcagaggtcttaacgatgtcaaaagtaaaatcagatcacgtattcgtgatcagcggtccaaattacccctaaagacatgttttcggaagatttttggcgaaaaaatttcttcactcaaaaatcctgtccaccccctttggtcccgaatcccaaaatcagttttatttttgtatcttttttttaaaatgtgataaaaatgtgaaataaaatttataaaatagggctaaaaattgcggatttttgtagtattttacttttccagagtgacctttcagaaccgagagctgaatttttttctgaaaattcgaaaatttccagtttttctggaataatttttttctaattcatgtagaaaacccaaataaatcccataaaattctccttatttttctctatttttaaagctttatttcatttaaattgaccaactcaatcatatgttatgaattttcaaatattagcccaaatttccttggccaaaaaattggaaaatattttcgaattttgaaaaaattccaaaaattttgaaacggaaaacaaaggtcatattcgtgctcagcaccttaattaacccctgaaaaatatttttcaccccaattttcaacacaaaaaaaaattccgaaaatttctagggggcctagctcggaaatttttgaaaatttccgaccatatatcacaccattcgatagcattttaaaagctctacaatttagctctaaggcattttttcgattaaatcaacccctaacgagttatgggcccgggactcaaatgtcccgctcaggccaaaaaatttttctatttccgggaaaaaactgaaatttttccgaaaaaaataccattcgatagagctcgaaaaactatgtgttggaagtggcctccgttttcccgggaaaaatcgttaaaaaatcctaaaattcaaaaaccccaaaacctacttttaggcctaactcgaaaaattttgaaaattttcgaaattttgaaatttcaaaaaatcgagctttccaagctctacaataagtctgctggggacatttccctcagataaaagcccggcgtgttattcacctggtactgaagtgtactttttgagcacgcttcagttgctcacaactgcagaccaaggggtggctctaataaaaaaataaaaactacaagcatgtagaggaccctttgggggggtgccctcaaagcgggtactttttgattagagttttagaaaaaaagttacgggtcctaaactgcaagcaaaagtgacaaatcgctccctgggactcagttggccgtcggatcaaaaaacctatagttttcccggatgcacctcaaaaagttgtaagacccttccactactttcagggcgctcccggccttcggccgggagattttgtttttggcaacgaaacccctagtcaatataacatatatagtaactagcgggtgcgtgaaccgtcggatctggacctgggaaaaagcgcttcgcgcttcttgagcttcgctacctagactgttacgggggaagaggtacaaccacgggtgggaaggtacaattgtgatcagaagaggtacaactacggtttttttagctctggttgtggagatttggaatttttaaaaaattatctgggacttttaggccgcttcgcgggctcgaacgagcgcttcgcgcccgttttttaaattttgttgggcttatacgggcgcttcgcgccaggttctttatttgttg

SEQ ID NO: 16 - DNA, 2431 bp, Heterodera glycines
ggttcgctgactggccctttgcgtttagtgtctcaccaaagcggttcgctgactggcccttcgggtcatttgtcgcaccatgtggttcgctgactggccctttgaggcacgtgtcgcaccaaagcggttcgctgacggcacttcaaggcacttgtcgtacgtaccaaagcggttcgctgactggcccttcggggcatgtgtcgcaccaaagcggttcgctgactggcccttcggggcatgtgtcgcaccaaagcggttcgctgactggcccttaggggcatgtgtcgcaccaaagcggttcgctgactggcccttcgaggcacgtgtcgcaccaaagcggttcgctgactggcccctcggggcatgtgtcgcaccaatacggttcgctgactggcccctcggggcatgtgtcgcaccaatatggttcgctgactgacccttcgggtttatgtcgcaccaatgtggttagctgactgacccttcgggtttatgtcgcaccaatgtggttagctgactgacccttcgggtttatgtcgcaccaatgaccaacaattgtcgtggacctgccctctgtgggattgtggttctgacaaactatggttgtggacctgcccctctaggggattgtgggccatcaaagtttactcagatttccttatcgtttccggccaacatccggggcgaagctggtcccgcactttgccaagaccagtggactggtgagaggtaacgtaggatatacgcattggtcgtggacctaccccttcggggattgtggaagggtcttaaaactttttgaggcgcatctgggaaaactataggttttttgatccgagggccaactgagtaccagggactgaattctcacttttgtttgcatttgaagggccctaactttttttgtaaaactcgaatcaaaaagtgcccgctgtgagggcactccgccaaagtgtcctctaaatgctggtattttttaaaattttttttgagcaaacccctggcctgcaaaaaatggcaactgaagcgtgctcaaaaagtacacttcagtaccaggtgaataccgcgccagggtttgatctgagcgggggttggccagcgaacttattgtagagctttgaaagctcgattttttgaaattttaaaatttcgaaaattttcaaaatttttcaagttaggcctaaaaaacggttttcgggtttttgaattttatgattttttaacgatttttcccagagaaacggagaccacttccaaaacatagtttttcgagctctatcgactggtaatttttttggaaaaatttcgattttttcccggaaatagaaaaaaattttggcctcagcgggacatttgagtcccgggcccataactcgtcaggggttggttttatcgaaaaaactcctcagggcaaaattgtagagctttttaaatgctatcgaatggtgtactacatgatgtaaaattttcaaaaattttcgagctaggccccctagaaattttcaaaaattttttttaggttgaaaaagggggtcaaaaatatttttctggggtattttgaggtgctgagcacgaatatgatgtttgttttacgtttcagaatttttggaattttttaaaaattcgaaaatatttttaatttttttggtccttggaaatttgggttaaaatttgaaaattcataactcaatgaaggactgctcaatttaagtgaattaaagctttaaaaatagcaaaaaatcgggagaattttatgggatttaaatgaaatttatatcttcaaatgaaaaaaagttattccagaatttctggaaaaatccgaattttcagaaaaaaattcagaactcggttccgtaaaggtgattttgaaattttaaatactgaaaaaatccgcaattttttgctctaccaaataaattttatttcatatttttatcacatttttaaaaaatgataccaaaataaaagtgattttggggttcgggaccaaaggggggtgaccaggatttttgagtggaaaaattttttcaccaaaaatcttcctgaaacatgtcattagggctattttatgacgctgatcacgaatacgttatcagattttacttttgacatcgtttagacctcagaatccctgtgtgattggggattctgagtcatcttttggggggggggggcggcaggttcgaatccggccggtgtaaattatttttctttgtattttttgggttaattttcattacttttaataaatttaaatgtttggttttattttcaatgattttaattaatttaaaatattttgttgagttaataaataaaaaattatatttaatttaattttttattgataaataaattttataagtttaaattaattatttttttaattgatagaatttcatgtattttttaaattaaatttgttaaaaaatat

SEQ ID NO: 17 - DNA, 1269 bp, Heterodera glycines
cctcttcttctcttccgctttctgttcctcttacctacatagggccacttcgattttgtcttgtgtttgttgttccttttaaactttctcttgaggtttatgttcatcttccactttctcttgccgctttctgttcctcttccactttactttctgttcctcttccactttcagttcctcttccactttctcttccactttctgttcctcttccactttctcttccactttctgttcctcttccactttcagttcctcttccactttctcttccgctttctgttcctcttccacgttctgtttctcttccactttatgatcctcttccactttctcttccgctttctgttcctcttacactttctcttccacgttctgtttctcttccactttcttgtcctcttccactttctgttcctcttccactttctcttccactttctgttcctcttccactttctcttccgctttctgttcctcttccactttctcttccactttctgttcctctcacactttctcttccactttctgttcctcttcttctcttccgctttctgttcctcttccactttctcttccacttccacttcctcttcctctttatctttctcttccactttctgttcctcatccactttctcttccgctttctgttcctcttccactttctcttccgctttctgttcctcttacactttctcttccattttctgttcctcttccactttctcttccactttctgttcctcttccactttcagttcctcttccactttctcttccactttctgttcctcttccactttctcttccactttctgttcctcttccactttcagttcctcttccactttctcttccactttctgttcctcttacactttctcttccacgttctgtttctcttccactttctggtcctcttccactttctgttcctcttccactttctcttccactttctgttcctcttccttctcttccactttctgttcctcttccactttctgtttctcttccactttctgtttctcttccactttctgttcctcttacactttctcttcctcttacactttctcttccgctttctgttcctcttccactttctcttccgctttctgttcctcttccactttctgtttctcttccactttctcgtcctcttccactttctcttccgctttctgttcctctgccactttctgtttctcttccactatctgtttcttccactgtctgttcctcttacactgtctgttcctc

SEQ ID NO: 18 - DNA, 1092 bp, Heterodera glycines
tttctgttcctcttcactttctgtttctcttgctcttccactttctgttcctcttccactttctgtttctcttccactttctcttcctcttccactttttgttcctctcacactttctctttctgtttctgttcctcttcttctcttccgctttctgttcctcttccactttctcttccgctttctgttcctcttacactttctcttccacgttctgtttctcttccactttctggtcctcttccactttctgttcctcttccactttctcttccactttctgttcctcttccactttctcttccgctttctgttcctcttccactttctcttccactttctgttcctcttccactttcagttcctcttccactttctcttccactttctgttcctcttccactttctcttccagttcctcttccactttcagttcctcttccactttctcttccactttctgttcctcttccacgttctgtttctcttccactttatgatcctcttccactttctcttccactttctgttcctcttacactttctgttcctcttacactttctcttccacgttctgtttctcttcaacgttctgttcctcttccactttctcttccactttctgttcctcttccactttctcttccactttctgtttctcttccactttctgtttctcttccactttctgttcctcttcttctcttccgctttctgttcctcttccactttctcttccgctttctgttcctcttacactttctcttccattttctgttcctcttccactttctcttccgctttctgttcctcttccactttctcttccgctttctgttccgcttacactttctcttccacgttctgtttctcttccactttctggtcctcttccactttctgttcctcttccactttctgttcctcttccactttctcttccgctttctgttcctcttccactttctgtttctcttccactttctgtttctcttccactttctgttcctcttcttctcttccgctttctgttcctcttccatttctgttcctcttacactttctgttcctcttcttctcttccgctttctg

SEQ ID NO: 19 - DNA, 11755 bp, Heterodera glycines
  unsure (1)..(11755): unsure at all n locations
tgttcctcttcactttctcttcactttctgttccccttttaatggtctgncctcttacactttctcttccacgttctctttctcttccacgttctgttcctcttccactttctcttccactttctgttcctcttccactttctcttccgctttctgttcctcttccactttctgtttctcttccactttctgtttctcttccactttctgttcctcttcttctcttccgctttctgttcctcttccactttctcttccactttctgttcctcttccactttctgttcctcttcttctcttccgctttctgttcctcttccactttctcttccactttctgttcctcttacactttctgttcctcttacactttctcttccacgttctgtttctcttccacgttctgttcctcttccactttcttttcctcttccacttttgttcctcttccactttctcttccactttctgttcctttccactttctgttcctcttccactttctgttcctcccgtacccggtttaaaaacttggacccggacccggctttgctggacccggaaatatccggacccagttttgcccaaatacccggattcgtctaatcctaaaattaactcattttgagatttataaattatttaaatttttattaatatttgtttatttttaatttttattcgattaattttaatatttaatttagactttattattctattaattaaaaatatttattattttattaattcaaaaaatcattatcattaatttaaaataccataaagttaattaataaaaaaaataaattaaaaaaaacaaaaattagaataatttcaatataatatttgctttaaaataatcagaagaaatgggactctaacccatgggaagccagcaccaaagtaaggcacactaactacttgaccaccggatcgcttgcctccttttaatttccttttcactttccttcttttttggcataaaatatttataattttatgtttaggtaacttattaatttgtctccattttttaaatgattttgcacaaaaaaggtcaaacaatagatttttgggctaaattaggaagaaagaattattatttttaatatttaaaataaattattttaataaacttaattaattttaaaaaaataaaatcattcaaaaaatgtaataaaataatggatgaaaacacccagaataggtgggacccgagccgtcgcccaccaccaccaaaggcaaaaactaaaaatttatgctattaaaacagcaataatttagttggaaatatttattgaataaaagtaggagcagtaaaaaactgatgatgtaaatggaaacaattgataatgaacattttttgcttattgaaaaggcgaggttaaagaccactggcgagcgtgcattacatataaaaaaaggaaagaaaggaaagtaatcaatttttatccaaaagtactttgctccaaatttttgttattatgtctttctcttttataaacccataaaattttttataggaaaaatattaaaaacaaatttaaaaccaaataatttaaatataatatttgacgggaaaatccaataaattaatgggactcgaacccacaacaccccatgaccaaaggcaggcacactaaccacttgaccaccgagtcgcttgcctcctacccgtttaattcccttttccttttccttctttttttgaaaaaatcctgatcaaaagtgcttgaactccctttttagggcacttcccggacccggaccctgacaatttatacatcactagaaagccaagactttaatggaggggataggcatattcaattttttatttgacccattttaagacatgcaaaaagcgttcaaaaataggcaatcccaaaaaagtgctatttttgagtcatttttcgaacacagttcgaacagttctaaaccgatcgaaatggctatagtttttccttatagccattgaaaaactgcgtcgatagaccccactctcgccccgtaaaactcgctagaaagccttaaattagtttttaagtgagttaggggggtagattcttcttatatagggaaccagggccctgcgggccctgtgaaagcgccgggggcgctttcaacaccggggccagcaagaaacagttgaacttttaaatttaataaagtattttttaaattatttgcgaaaactaacacattgtcaaataattagcccatcattatttttcaacaaattctccatttaattgcatttccaccaaagcataccctgataaatgcccggaaaaaaacagggtgcccaacatgggcaagctgtacttgctggaaaggtgataaactgaagttctgatgacggcaaatgaatcaaagtaactattccctaacttctgattcaatagatgtactgatgagtatgcaaattaattaattttcctttaattaacataaaaactgcccccaaaagtagcattcatatggtagaaactctttgagcgacaaatgcaagtgaatcaattaagtaattatttaactcgatgctgatcagtgcatctattgcatcagaagatagggaataattatttagattcatttgccatcatcagagcttcagtttaccacctttccaccaaagtacagcttgcctatgttggccacaatgctttttttcgggcatttatcagggtatgctttgatggcaaatgcaattaaatggagaattttttataaataatgattagctaattattttgcaattttctatcacattacaatttgtaaataatgatcagctaattagttggcaattttttatcacattagattaatgggtgttgggtgatcggaatttaataaaaacccatgatgattttccatggagtttttgaaatttttttaaatgcaattatattgtaatgggatagaaaattgccaaataattaggtgatcataatttacaaacaaattctgcattttattgcatttccaccaaagcataacccgaaaaaaagcatgatgcccaacatgggcaaggtgtactttggtggaatcatgctaaaatgttgcagtcaagtttaaagtttttgataaataacgatcagctaattacttggcaatttgttatcacattagataaatgggcgagtaagaaacggattgttagatgttaaacaggcaaaagcaaaaaatttgggtcatattcgaacccgccgcttaatttttcttgtacatttagaataaaattgacttgatagaaagtcttaacaaaccatatttgttattaaaaagttatttgggcatataatgtcaatttctgaccaacgtaatgtatgcagtacactaataattatgttaaattaaattgaaatgatataagttattaaaagaaagcaaaacataagtttaagcttaaatttttgatatatctttaagtctgaccaagttattctatgttagttaaatttcagtcaactttggaacagctgtgtaaatttgaggtcgtattatatggagtatcaacaaattccataagcagtagttaagaagttccacgatgcttttgaaagtatttatgatttttcgaaataacagcgtttaaaataaaataaattaaatttgtaacaattaaccaatcagtgttcatcaaattcaataatatcatcatcggtttccttttgttccgtacccaccaaatggacatcgttgttttctttgtcttcttcaagcatatgaacgtcgcattggtcggctttttctcgaatcgtacccacctaaaaaaaaaataaaaaagattgtacaatttacgagttaaaccacctgcaaagattttcgggctttattcattgtttgggccaaattttgtaattcacagaaacgtgaattgaaaaattcttttttcgaaccctctaattgctcaatatcagggagaatggccatccaaagttcagtgcgtttctggtggtagcgagcgttctctgccttgatctgcttatcgcacgaaacctccactttcgtaagacagtcaatttgcttctgtattgcttggccaagatcagcaacctcatccagcgcacccgcagatatatttcctacgaaaaattcatattaaaaaatgaaaaaaataccaacctttcgtggtgtaagcatgtttcagagtgctaagattgtttttaagttggatcaagcgcaatttttccggttggagttttagattgatctgttgcacaaacgactcatgtgcaaattgctcatcacgtagagccgcacccgcttcagaaaccaatccgtaaatacgttttgacacttcactttctttatttgcaatttcatccttgattttggattttgcagtcaaaaaagaagcctttgcttcttcgaaaatcaattggactaaaaagattgcgttaactataaaagcctaaaaaccaaacaccaaatactaaccatttttttgttcttctggcttctcgtacccacttgatgcttctgttcctggatttaattgatcagtttgagttgggcgttgatccatcgcaattatttaaagagtataatgctgctaaaatatagattatatgaaaaatcttcgataatgggaggtacttaaagcacaacaaataaatatgttttataaaagtattattaaatataaataaacttcaaatcataataaaataaagttagaagctaacaactacagatgaaaaaatcttataggattggaaaataaaaaaattataaaaacattgtgttataaaacgcacactaaattgatacaaaaccttactgttataacagatcgtgctgacacacgattaaaaaggtgtgtgtttttaaactgtttgtgctctctatgcatagaagaaaagaggttaaaacagacgccaatggaagtgtgtgtgcaggcacgcagggacctcaaacattcaagatactgggacttatgtgcaggcacgcagggacctctaaggacagaaataattccaatgttgtccactttcaacaggtacttgaaaatgtattttgaagctaattattttaaaatcagccgagtgaatacgttaagagtttgaataatagcaaaaaggtggtgtgacttaaaactaaaggttaactaagaattacacataaaatttttcagacaaaaatttattaataataacgcaaaaaaagaaaaaatcagcaaaataaattaaaaaataatcaatcaaaaaaatcatcaaaagaactatcaagatcatttggttcttgatcgttcgcacccgctgcgtttccattatctcgttccacgtccgggtcattgtccacgtccggtactcttgggcccacgtccggtattgctgcgtccgggtcattgtccacgtccatcagtccacgattcggtgtcctcggctgctgcgtctccaagtccaacagctcgtggtaaacgacgttctcgatgtgcgtcccgtacccactttggctgaacggcgcgtacaccctgatgccatccatctgcgtgactctggacatggcgacgtacacctggccatgcgaaaagcactggcgcccgttgagcacgagtgccatccgctgcagtgtctgcccttgcgccttaacaaattgtacacgtatttctttagataattgtatgaattttattctctttcaccttgttgatggtcatggcaaagcaaaggcggaccgggaactgcagacggcggaatcgtagcccacggtggtgccgtgcgcggccgtattcgaattgaatttggggaatggcgatgatgttctgcgcacccgctcgtggtccggtgaggatccggcagaacaggttgttctccgaagtgcgcatcacttgaagtcgggttccgttgcacagtccctgggtgacgtccaaattgcggatcagcatcacaggcgtacccacctggatttatttattaaaaaattatcaaaacaaaaaagagttcactttgatggtcagtttgtgcggcggcattccggacggcatttcattgtgcaccgcctccatgttgaagtcggtgcggaaattgttcatctcttcgttaggctccagaggttcgtcgatggacaggaattcccttccgcacccgctcattctgccaagcgccacctcattgatgtgctgcacgtcgttgttggtcggacagaggatggcattgtgggcaattgcgtccgcgttggccagcgggtcgtcaaacagtgcttctgggaagcagaagtgaatggtgtggtcgaggtcgtccacgagaagttcgggcggaatgcgcagttggttggtgaagccttggctgtccgtacccacgcggtgcattccattgccgatttcctgcagccaatcgcgcaacgattgttctcctggtgcggtccgcatgttgatcgttaggctaataacataaatatgtttgtaaaaaacaaagtagacaaaaaaacctgatttttttgaacagacgaaagagcgctcccatcttgatcgacgtacccacttggtcctcacgagttccatgctcgactacgggagtcagttgccgccagtcgccactcaacaccaccactttgttgccaaacggtgtgacatttgcacaaacgtctcgcaacagccggtcaatgtagtcgagcacggtgttggacaacatactaatctcctaaaaatgttatcatgaacgaaaagcaaacttatgtttttgtttacatcaatgatgatcagttgtgcgtggcgcagttgctccgcttttgccgactcgaagttcagcatcggcggcgtctcctgcgacacgtcgtttggcacgtagaagtgcctgtgtgcagttccaccgcctatcagcaacagagcggcgatgccggtgctggcggcggcaacagctgagttccgcttcagttcttggttgcgtacccactgtgcgttggcgtttccatccaaggagggcttgcctgcgatgcaccactttatcagcgtgttgtaaaagtacgtcttgcctaaattaactttagcaattaattatacttttagaaaaataagtaagccgttattaccgcatccgcccgcgccttcgaggaagaacagcttctggttgcacccgccaagaattgatgttgatatctcatcaaaggcggcccgttgatctgggttgaggcgtccaatctgctcgatggcaacttgctgcggtggtttgcagcgttgccgagcatcctccccatagaagctgtccaagatgttgtcctcctccaggagctgcgcctgatgttgaaagtcgtagcccactggcagtccttgcagcccaacatctcttaaaaataatgattatatggacaatattatgccagctttactcacttggtgttcgtccccatgcagttgaggtaatactcaaggttgagcatcacctcagccgcgcggacttcagctgacttcggcacagctcctgggtggttggcggcaacaggtgggttcatctcgtcgaggaactcgtcgaacagcgcctgagggttggacggatgggcgtgcgcaagcagcattgcaaagtagtgctgtagccgcttgaggttggtcatttcggcacaggcttcttgcatggctcggcggaagacttcatcgctcacttgaagacccaaatgttggcacgtacccacgaatgtgtcaaattggatgccatcaatggtgcgaaggtcggcaaagctcttgggtcccggacggtggaggagcagtgttctatttgatagctttattaacttttcattttaatttattacctcaaggcaaatagctcatgcttgcgcggtgacacggtgtacacacgcacaaacattttggccttgtccgggtcttcttccaggggacgcacccgcttcttccatgaccgcgacctgaagtcccacctaaataccgcaaaacattaactaattaatcaattttatacatttatttcaactcacgagtaacggtaaggcactcggtcataagtcagctccgctgcctccgggtcccttccgcagagtgcgaagaaggccgtaaggcgggtgttctctcgaaccctccaccgtccttcctcttcatgcccttcttccacgacaatcgtttggccgagctcgtcgtgcacgctaagagtgtagatttggtgcgacgtacccacgattttgtacgagttcaggcgcaggtaggcctccatggcggtcatgtagcgcactttgaacgtggcggcaatttcgtcgtagttgtacacttcgtccgcacccgcagtttcgtcgcttctgccctgttgcgccgatcttcgtggctgtgcgacacggacataggccttttcaaaccctgaatgttctggaattattgaaagaaatcgaaattaataaaataacaaccttttaacaggtatttgaagatatacttgcaggccttctgtccgaacacgtactccacattgatgtggcatccgtatttgagcagaagaaacggattgtatgggatgacgcggctgtcgtccatcagaatagcgctccggaccccccttttcttcttgtaatgcgtctggccatgttctcccttaataattatattttaattaagttttaatataaataactggtacatgctgcctctccggaaggcgcccttgatgtggcatgcgctgatagcgcacttcggcccagtcccgttctgggtcagcagcgggatcgtgatggtcgtcgtcatgttggttgtcggatccaccagttcttccaaagaatgcatcactctcgtcgggcggtatgcggacatagttcgtgtaacggacctcttgaaatttttagaaatacatttcatgttttttaaatgacaagatggttacccgagagctctgtcctgtccgagtatggcttcggaaaatgtttgcggcaccgcgaaccctccagacatgccgcattgcagtcgtgcagcatcattgatgttacgttatgccagaggcgacgctgttggtgtgcctccggagattggtccgaagatggcggaagggcagggatgcgcgcgcagacatattcgtccacgtgctgcggagtgtcgatgcggaccccccgttcaagaatcaggagcatgtgtatgtgtggcatgccttaatttatttttcttttcatataatataatttaaattttacctcgcttctggtgttccacactgtaacaccatccggcaactttgcccagcacaccacgctccgtcacgtccttgatgaattcagctgccttgtccatgaagatgcggcatacaatgtcgggccggtgggcatagttttgacgcacccgcaatgcttcgtcgatctcaggccactttggattgccagtgaaggtcacaaacctaaaaaattgatagcatcaattatgaattaaggtaatgcatttatgttaccaagtcggagcccccagtgcaacgctttcaacgtcgcttgtatccacacgttgcagtaaattgtgttgatattcattgttttgcgtacccacatttccattatgacgtgatcttttatttgtagagcctgtcacttgtttaataactataactttaattactcttttgcgtaaattaagacctccaacaatagtcaaagcccgtaatccagtggtggtcggagtcgaaacaacactggtgtccagatccattgccgacgtacccacagcagcttcaacatcacccagtggttgactgcattgtgctcggatattggttgaggttgatggcactacaaataggtattaaattctcatgaaataaaaacaaataatggagaccattgccgaggtcctgaataggactggttgctgctgtgctggccaatgaatcctgtgaaggaatcgaagccgcacccgcaacactgtcagcttttcccagacgtgaatctctcgtcgtccagttaacgttctctttcgaggcatttagtatttttgaaataattgctaaataatctaaagcaaaaaaagtatatgttacgaaacagaaggggagggtgtattgtttctcagcaaatggagcgaatgaaggggatggaacggtgctagcttcttttatataaaaactaaaacaaataaaaaggtcgtaaactgtaacaatgaaaaaattggagcgaacatatatttgtttggtcaaagtgaactgacaaacgcactaaatcatagtccttttatactctttacgtgtttctctgcgtaggaaagaacacgctgaaaagtgaagccagtgaaaaatgcaagcacgcagggacctctaggtctcaatatgctaggacctgtgtgcaggcacgcagggacctctaactttaacgttgactattttatataccaaggagcacagtatcttggtgataactgaagttaaatcagaaatttaaatgtcaaacatctttaaacattgttttaagagtttctgatgtattactttgttctttataaaaaaaaatttttcggattctggacacgattccacatcaagtatcttggtgagtattggacatgtaatgcccaaatgtatatatggcgtatttcactatattttaaatatttccagtataaaaaattctttaaaattccaaaaaaattttcacccccagaattattaaattttttattagtgcaagagtagtgcaagagtagtgcaggagttgttcatcagtggttcattagttgttcgtgagttgttcaaaagttgattattttacataccaagatgcacatgcagtatcttggtgagacttgaagttatatccaaaatttaaacgtcaaacatctttttacactgttttaagactttctgatgtattacttttattacttaacctaattttcaaaattgaattttttcggattctggacacaatttcccatgaagtatcttggtcagtattggacatgtaatgcccaaatgcacgtagggcgtctttacacattattttaagtatttccagtgtaaaaaattcatcataattacccatcaacccctctgaatccctgcgtatcccccctaacaaaaaaagtaggcaaaaaaaattgtcaatcagatccctttttagggtatttcccgaacccggaccaaaacctgccttataccatctgaaagagcaaagtatgtagaagtgtcatcaactcttcttttttcgattgaaccgattttaaggcaggatatgagccatcaaacacaaaaagccaaaaatttttgaaaaaattttcaaaaattttctgaagaaacttttttttacgtgaaaatttcaaaaaacgctttacaccattcgatccgcaatcgaaaagtgccggaaggatgcgcaaaccgcatcccgctatgagcaaccgctcgcttatttttttagcaaacgtcatttcaggctacatttttctcttatagagggaatgatagcacccgaatttctagagagaaggattagttttccaaaaaatatgctggtacccaaccacaggcactaaaggaatatttttatgacggaatttcttttttcccatgagtaattggcattaaaataaggaatattcaatgttttttataagcgttcaaagtcttaaaaacacagacatacattttaagctttacccaaaaactaacttttgaaaccatgttggaaaaattttggcctgtatgacgacctttcactggcatcgccgcgagcacaacgaatttagattcaaaattcggatccaaaaaatggccaattataccaaaaattgagtgggttgtgtcagaggaccacgaatccaccgcaattgtaatgtaat

SEQ ID NO: 20 - DNA, 8112 bp, Heterodera glycines
cgtcacgtgctgcggagtgtcgatgcggaccccccgttcaagaatcaggagcatgtgtatgtgtggcatgccttaatttatttttcttttcatataatataatttaaattttacctcgcttctggtgttccacactgtaacaccatccggcaactttgcccagcacaccacgctccgtcacgtccttgatgaattcagctgccttgtccatgaagatgcggcatacaatgtcgggccggtgggcatagttttgacgcacccgcaatgcttcgtcgatctcaggccactttggattgccagtgaaggtcacaaacctaaaaaattgatagcatcagattataaattaaggtaatgcatttatgttaccaagtcggagcccccaggtgtcgaaccatcgtcatcaggtcggcatatttcccttggtagtattgccgtgacccggcaaatgtttgtggcatgaggaagacacggccgagctttgcatttggtccttgctgtcggacccccttctccatggcggtgatgtactcacgggccataagttgacggtagttcttctttgcctggattgacttcagatggtccagttcgttgcgctcaattcggttgagaaccgaaatggtgaagtactcggcgaggcgacgtgcaaaccacagccaatggaagtcgtatttgccggacccccgaagtgccattcgatagcggtagaactgccgttccgaaatgttgcttcggcctccgcgagtctccacttcatggtcgaagaggacgtcctcattttcatctctttctccgcaaattggttgggccgttgacgtacccactgcatttatttcgggttcctcaagctcctcgggaacatcggcgtccaattcgagttcgggctccggcattacgtcaatttcctcctcattcagctgcgtacccacaatgtcgtcaattgcaatttcatcgcccaattcgtcgtcggaaatttgttcatgttcttgttcctcctggtgcacttcgggtcgggcattctttatcaaaccaatgtattttgagttcattttttattttatacctcggacccacgtttcttcatgtaccacctccatccaagggtgccgagtggatggagcagtgggaagcagcacgggtcgatttgcggcatgccactcttcagctcgcgcatcttcccggccttgtcggacacccagaatgctaatattttaaattagagttcattgtaatgttttttattaccgctaatttggggaggaagaccatcctcttgaacccaaatcacagcgacctgctttgcagtgggagcatccacccgttcaatcactgtgatatcattgcgtccctgaagcggaccccctttcaagtctcgatccgtgagcagtgcaatctttattattaaaaaattattttcatatatatatcctcttattactctgaagtgtgggacttctccagttgcagcacgagtcgcttgtaccttcgtacccactgtttgaaaggtctgtccaaatgggttttcccgcatcagcgcctccagtctctccatgattgtgcgcctgacatgtggtgaaacagcggtttcaaaagcctcttcgcggacagccaaagcgtcttcgggtgacaatgtgtaaacttgagcaaatgacgggcgacggactcccggagcaataaggtcgctgaacaggaatgaaaactgccctgtaaaagtataattaaattgattactaaacgactaattaaccgttatatttgcatgtatccaaccgaccacccatttggtccggtggtgctttttcgccatgtgtggaggcaaaggcgaacaggttgttgaacgccatgttgttgttcagaaaagcatctcgaaccctctcgtcgtcaacatccaccaatccatgtaaataggcaggaggcggctgttggagttcgtgaaattcggccaccatttgtccagtgtgcactgcgccattggcacagcaaggtgtttgccgcccccgcttaatgatttcgttttcgccacgaagaagacgtgcacagcaatgtccacaaaacgcgtcaccgaactgaccactgtcatagtagtcaatctataattctatttttaaacaatataaaactgattatcaactcggtgcccggaagaacgtgcggcacacttcaagaaggtgttccggtgacatcgttcagtcggacggaccccctttatgttacgtgttgcggtaaaaaagattggtgcaggaaaaacgccatgcgtgaactccttcagatacacccaagcagcaatgaaggcagtggcattttttaggcattgtgaatacgacaaacaattgcagccggacccacagcgagtgcatcgtgcatctgtaaattatgtgtttcgtatattataatttaaacagtttaacccgttgagcggcgacgtttttgcgctatcacaggctgctttggccactcccttgacaaataatctcggaccaccttttgcatgcgttcttcgagcaacgtcacattaagttcggccagctaaaaccgttaaaattactatttaactgaaaaagaaataacacaaaaacaatgaatccaaaacctttgcacgcctagcgcttgtgtaacgtggtgtgttcgcacccgcagcaagaagcgttggtgctgatttgcgacgtcgattatctgtaactatttgtagaaaattatgggaaaataaactcaaaaaacctgcaacgctttcagcgtgacttatatcctctcgttgctgtaccgtgtgttcagttgcattgtttgacgtacccacgtttgaactgtgacgggttcttttatttgtagagcctgtcaattgttttatatatattgctttagttgaaatttagcttaaagaaagacctccaataatagataaagcccgtaatccggtggtggtcggagtcgaaacaacactggtgtccagatccattggggacgtacccacagcaggttcaacagcacttcgtggttgtgtttgtgcttggacattggttgaggtagatggttctatatctatttattaaaatttcgtttctaatagaaccaaaaccctgatttagttgaaaagattgttggtcgcttgtgctcggacccaccaaaacattagccacgtctggagtgtttcgtatagcacggcgtcgcaagcgatcagcttcctttcgtctctgttcttttgaaggcataatttaaataatcgcaaaataattaaatattaaagctaaaagaaatagtaataaaaactaaaaaaaataaaaaggtcgtaaactgtaacaatgaaaaaattggagcaacatatatttgtttggtcaaagtgaactgacaaacgcactaaataagagtccttttatactctttacgtgtttctctgcgtaggagagaacacgctgaaaagtgaagccagtgaaaagtgcaagcacgcagggacctctaggcctcaatatgctgggatctgtgtgcaggcacgcagggacctctaactttaacgttgactattttatatacaaaggagcacagtatcttggtgagaattgaagttaaatcagaaatttaaatatcaaacatctttaaacattgttttaagagtttctgatgtattattttgttctttataaaaaaaagttttttcggattctggacacgattccacatcaagtatcttggtgagtattggacatgtaatgcccaaatgtatatatggcgtgtttcactatattttaaatatttccagtgtaaaaaattctttacaattccaaaaaatttttcacccccagaattattaaattttttattagagcaagagtagtgcaagagtagtgcaggagttgtgcatcagtggttcattagttgttcgggagttgttcaaaagttgtctattttacatatccaagatgcacatgcagtatcttggtgagagttgaagttatatccaaaatttaaacgtcaaacatctttttacatcgttttatgagtttctgatgtaatacttttattcttttttaaaaaaaaatttttcggattctggacacaatttcccatgaagtatcttggtgagtatttgacatgtaatgcccaaatgcacgtagggcgtaataatattatattttaagtatttccagtgtaaatttttttttataattactcatcaacccctcagaatccctgcgtatcccccctaattcttgaggcaaaaatttttccaaaaatttttaattcgtgtccagagcaaaactcaattttaaatttatgctagaaagatgtatgatagctcattagaagcgcctgagtgtcgacatttatcctccaaaacatcgctaagccggtttcggcactccccgccaagatacagccctttttctgagagccgttcaaaaaatttcagaaaattttcaaaaattttctgaagaaacttttttttacgtgaaaatttcaaaaatcggtttacgccattcgatgcaaaatccttaaaaaatagttgtgctcttttgtttggagccgatccgagcattttaaaaaaagttatttgcgatttgcgtcgaatcgtgctattttcctcttatatagggaaccagggccccaaggggccctgtgaaagcgccacgggcgctttcaacaccggggccagccggggccattgggttttccccgcgcttaaggtactcgctcggccgcttcgcggcctcgtacgggcacggtaagcgtttgaataatagcaaaaaggtggtgtgacttaaaactaaaggttaactaagaattacacataaaatttttcagacaaaaatttattaataataaagcaaaaaagcaaaaatcagcaaaataaattacaaaataatcaatcaaaaaaatcatcaaaagaactatcaaaatcatttggttcttgatcgtttgcacccgctgcgtttccattatctcgttccacgtccgggtcattgtccacgtccggtactcttgggcccacgtccggtattgctgcgtccgggtcattgtccacgtccatcagtccacgattcggtgtcctcggctgctgcgtctccaagtccaacagctcgtggtaaacgacgttctcgatgtgcgtcccgtacccactttggctgaacggcgcgtacaccctgatgccatccatctgcgtgactctggacatggcgacgtacacctggccatgcgaaaagcactggcggccgttgagcacgagtgccatcctctgcagtgtctgcccttgcgccttaacaaattgtacacgtatttatttagataattgtatgaattttattctctttcaccttgttgatggtcatggcaaagcaaaggcggaccgggaactgcagacggcggaatcgtagcccacggtggtgccgtgcgcggccgtattcgaattgaatttggggaatggcgatgatgttctgcgcacccgctcgtggtccggtgaggatccggcagaacaggttgttctccgaagtgcgcatcacttgaagtcgtgttccattgcacagtccctgggtgacgtccaaattgcggatcagcatcacaggcgtacccacctggatttatttattaaaaaatgatcaaaacaaaaaatagttcactttgatggtcagtttgtgcggcggcattccggatggcatttcattgtgcaccgcctccatgttgaagtcggtgcggaaattgtgcatctcttcgttaggctccagaggttcgtcgatggacaggaattcccttccgcacccgctcattctgccaagtgccacctcattgatgtgctgcacgtcgttgttggtcggacagaggatggcattgtgggcaattgcgtccgcgttggccagcgggtcgtcaaacagtgcttctgggaagcagaagtgaatggtgtggtcgaggtcgtccacgagaagttcgggcggaatgcgcagttggttggtgaagccttggctgtccgtacccacgcggtgcattccattgccgatttcctgcagccaatcgcgcaacgattgttctcctggtgcggtccgcatgttgatcgttaggctaataacataaatatgtttgtaaaaaacaaagttgacaaataacctgatttttttgaacagacgaaagagcgctcccatcttgatcgacgtacccacttggtcctcacgagttccatgctcaactacgggagtcagttgccgccagtcgccgctcaacaccaccactttgttaccgaacggtgtggcatttgcacaaacgtctcgcaacagccggtcgatgtagtcgagcacggtgttggacaacatactgatctcctaaaattgttatcatgaacgaaaagcaaacttatgtttttgtttacatcaataatgatcagttgtgcgtggcgcagttgctccgcttttgccgactcgaagttcagcatcggcggcgtctcctgcgacacgtcgtttggcacgtagaagtgcctgtgtgcagttccaccgcctatcagcaacagagcggcgatgccggtgctggcggcggcaacaactgagttccgctgcagttcttggttgcgtacccactgtgcgttggcgtttccatccaaggagggcttgcctgcgatgcaccatttgatcagcgtgttgtaaaagtacgtcttgcctaaattaactttagcaattaattatacttttattaaaataagtaagccgttattaccgcatccgcccgcgccttcgaggaagaagagcttctggtcgcacccgccatgaattgatgtggagattgcgtcaaaggcagcccgttggtctgggttgaggcgtccaatctgctcgacggcaacttgctgcggtggtttgcagcgttgccgagcatcctccccatagaagctgtccaagatgttgtcctcctccaggagctgcgcctgatgttgaaagtcgtagcccactggcagtccttgcagcccaacatctcttaaaaataattattatatggacaatattatgccagctttactcacttggtgttcgtccccatgcagttgaggtaatactcaaggttgagcatcacctcagccgcgcggacttcagctggcttcggcacagctcctgggtggttggcggcaacaggcgggttcatctcgtcgaggaactcgtcgaacagcgcctgagggttggacggatgggcgtgcgcaagcagcatggcaaagtagtgctgtagccgcttgaggttggtcatttcggcacaggcttcttgcatggctcggcggaagacttcgtcgctcacttgaagacccaaatgttggcacgtacccacgaaagtgtcaaattggatgccatcaatggtgcgaaggtcggcaaagctcttgggtcccggacggtggaggagcaatgttctattttacagctttattaacttttcattttaatttattacctcaaggcaaatagctcatgcttgcgcggtgacacggtatacacacgcacgaacattttcgccttgtgcgggtcttcttccagttgacgcacccgcttcctccatgctcgcgacttgaagtcccaactaaacaccaaaaacattaaatttaataggttctaatttaactcacgtgtagcgatatggcactcggtcgtacgtcaactgagcggcatgcggatctcttgcacaaagtgcaaagaaggccgtaagccgtgtgttttctcgaaccctccaccgtccttcttcttcatgcccttcttcgacgacaattgtttggccgagctcgtcgtggacgctcagagtgtagatctggtgtgacgtacccacgattttgtacgaattcaggcgaaggtatgcttccatggccgtcatgtagcgcactttgaaggtggctgcaatctcgtcgtagtcgtacacttcgtccgcacccgcagtaccatcgtttctacactgttgcgccgatcttcttggctgtgcaacacggacataggccttttcaaaccctgaattttttagaattataaaaaacattaaaagtaataaaataataaccttttaacaggtatttgaagatgtatttgcaggccttttgtccgaacacgtactccacgttgatgtggcatccaaagagagcagaagaaacggattgtatgggatgacgcggct

SEQ ID NO: 21 - DNA, 9000 bp, Heterodera glycines
  unsure (1)..(9000): unsure at all n locations
tttttaaaaaataaaaatttttagaaatttgggggggtagggcagaattcgtgctccagtaccggggaaaaaaacaaaaaagaattttgggctttacccgggaccttttcgggttgaaaaaccgggaatttttggctggaaaaacggggaaaaaaccccccgggactggtcccggtcaaaaccgggacctcggtactcagttgtccgtgttttagtcccggtcccgctctactctagtttaaactcaaaattaaaaaagattcacccatcatttaaatttttcccaatgtgtttaatgattattttttgatgactttggcggccaaaattttttgttctgttgtttttggcgatatgcacccctggtgaaatttttcgggtttcttgcattttcttaaggtttttaggaaaattaaggaaaactaaaaaagagcagctgaacaaccgaaacaggtttttaggcgccaaactaataaaaagtaaaacctaaaaacataatccttgtaaattataattaaaacaatgaaaaacggaccgaacgcaacattcactccattcaaatctgggcactcttttgtcgtgatcataaattcggtgcctaaagggaagggtaatacaataattttttttaattaacgaaatttttgaaattttgcaggccaataaagacacataaggttattgattggtaataaatttttattaaaatttgcaaaatttttccggcagttcatataaatactggcaaagccggacgattaaattcccataaatcattaaatattcaaaaattgacccaaaactgctcaaaattatttttggactgaagaggaatcttcgaataccttatccaaaaattttttggttgcgggttgtgtattgcaactttttaaatcaaaatataaaatcacgttcatttttaaatctttaaagacttaatttaaataaattaatgaattaaacaatagaaaactggaagaattaaaataaaatatttattgttacatcaaatttaatcattacaataatgccatacaatcatgagctattattttaaaaaactgggacaggtttaaaaaactagtttttccgggcttggttttgctcttgtctaccaaaatgattattttcaattaataaaacggaataattataatattcataaaaaattagaaaggttaatttttcaaaaaccaatttaaaagcaaattaactggaaagtggcttaccgttatggtctgggattccgtcgttgaacttaaacaacaaattaggaagacaaattttgtgtgaatgctttcaaggcatgccttgtcacgcttcgtaaattcacaaaaaataggttttttcaggcttagactgggtccgagggtggagggtgaataaaccacaccactcccaggcgacgagaccttcttttattagtagcggtaaaattttttttgttttcttttaaaaaataaaaatcaaccggtgatttaaaaacttgtcatgttgtaaaataatcgaatcctttcggaaatttacgaggcgttctacttccatttcattaccattgaaacaattcccggtgcatcgtgtgccaccgaaaaattttcatctgcaaaataatctccgtacagcgatttgcagccaagaacctgaaaaaatagatataataataattgtgagattgttccaattttgacaaaaaaaatttgtcttaaaatgttatctgtaacgcttttatagggctttaaggcattgatcactaataaacgctccattttacgcgcaaggcattaatcaaaaaccaccaaaaaaaaatattttgcattaaatgaaccattttaaagttctcgacaatcaatcattcgaattttttttcccgaaaaattgggtaattttttttgaattttactgttttcttaataaattcggacaaaaattatctaggttttcctttgtggcgcctaatggcaccgccgaccccaatttaaatttcccgttttctatgacgccgaaaatttaagtaaattaaatcggcaaaaaaatccgaagagcaaaaaaaagcccagtgatcaatgatcaatcactatgagaaaaatcctaaacaagagggtcttgttatcgaaactatttttaccataaagaaattgttttttcgttttatttacctcttcaatttttccgccctttatgtatttgtcctaaaagaatgaaattcattagtgaataaaacttgatttttgtttataaaaattaattttattataataattttttcaatcaaaaatttattatttcaaaaaaaaatatcgaaaaaggcaaaaattgaaattatggacggcgacgtcggagaaaataattttaatttttggcattcacggcaaaaaagaataatttaaaaaaatataaagaaaaacataaattgacatgtaaaattagaatttcatcaaaaagtcagggtcggtttataaccaaatatttaaataaatattaaaatatatttttctaaacatttatttataaattaaaatctacgaggccttacttttacaatccggtcaaaattggttcctcggtatccgtattcaatttgtgcgccattgacgggcaatgtcctaaaacagaattgagtttttataagaatttcaagttttaaaaaaccatttttcaacaaaaaaacaaaaaccataatttttaatgcaaaaaaagtcaattatacgattggataggaataccgaaactttaaactatcgattccaaaatgccataaaactgagaaaatttaagatcattttgccagtattcgagataggaattttaaaatggtaaggaacgaaaaagtaacttggaaaatggacttggacttccgtttttccggggttcccggggtatggccaaagaaaccggaaccgggagttccggcaaaacccatgcggggcccaggttttgtccggtttctaatctgtaaaacagcgaacgagaagtgaccgtaaaaactccgagagaaagtttccaaaacttggtaggtttgtaatttattctaatagcatgaaaatttcgaatataatatttaatttataaaattttaataaaatattacaatgctcctgcacacaattgtttgaaattttccgtcgtctgtggcacagcagcaaccatgaggtcaataattatacgtcctgaaattttatacttttttccaaaaaaatttagtattttattttaagcgccgaactggccacgactcattttttcgaaattaattaaacaaaaaattaccgcaagaagccgagtcactttcaatgtccttaaacataataataaaaaataagagagaaaggaaaaaagaaaaaattaccagaaatacgactgggtctgatggatgagccaacgatgcattaaattccatccatttagtgtactgtggtgacatatctatatgtaaataaattaattaggtgcaaatttgctcgaagaaagggattagcgttacatttatttttccaaatatttttgacaatttaatttaaagaaagaatttttagtgaagccaaacgtattataagtaattaaactgatttcttccgcctcctcttcagtgggggcggtgagagaagcatcgccaccacttttggcattggcatcagaatctgctgaggcggcactgcttttgttgttctccttcctcattttctggcaatgatttttgacgtttgaagttgaaagttgaaaatttacaatatttcttcacttaaaatattggtatttaggaaaataagggttaattaaaacaaatgttttaactctattaaactttatgagtccaacacattgtcaaatatggaaatatggacaaaaatctgaaatatggaaaaatatggaagtaaaacaggatcctagaagcatcaaacaaagctaaaaacactatttacgtggtttgtaggcaaaaaaaaaaatggaaatccatacaaatccagtcccaactgataagcgcaaaaaacaaattttcttcgaacacttttcgatatatagcgcctttttagcaactattttcaactacagaattttcgcttatgaaactttttaataactcttttgacttgtgaatttaaaaaaaaactattttttcaaattattatgaaaatgcaataataaaaaaaatttaaaaaatatatacccctaagaatccacataaattttttcaaaaaatgcacccctaagaattgatttttcaaaaagcaaaaatcctggccatgatttggcggacgatcgaaaactttttacgcttgaaaatcttcaaatgtatttgatttacaattgtgcaaccgaaaaggacaaagatgaaaaaattttggaaaattcacatatttattgacatgtttttccaattgttggcaactttttttagcaactattttggcagtttttagcaactatttaggtatctttagctgatgttggctgttctaattagagtagagcgatactaataatatctgtcggtaattaccggttttttggtatcggtacaggttttttcaaaattagaagcactggtaccggtttttccagtaccgttgccagttaccgctctactctagttctaatagaggctttggaaaaatgtcaaaatagtgacaaaaatggacataatcgcgaataggaaatataactataaatagtaatatttaaatacataaaaccgaaaaatcaaaaaataaagcaaaattaatgtgatatggagaagttcattaacaaacagtaaagttttgagataagattaattaagtaaaaggaccagcagaagatgattatgctgacaggccataatataagaaaaacgaatgtgtgaaagagatgctttaattttgtggataagcagaatgactacaaaaaattgttgagtgaagaagagatatagtgaaagttagagggtgagaaaatgcttaagagagagatagagagagaagaagagaaagagagaaagacaagagaaatagagagagcaaagagagagatagagatgagagagaggaaagagagaaagacaagagagatagggagagaaaagatagagagaaggcaagagaatttaatagaaggggagagaatggatcagcagagcagcagatgggtaaatggtaaatgagataaactttgccgttgggcacgcacggaaagtgtgcataggtggaaaggacaaaacatcggtaacaacaaataattttcagggccataatctttttcaagcacaaccaaatcaacaattgtctagtgtattttaggcgtccaatcttcagtttctttggccataactttttttacttggaatacctacattcttggtatcatatgaaaacttaaaagtgtcaggaattcataaatacaagtaagaacaaatactgttactaagaaaaaattgcaactacaaaacgcgaaactcaactttttcaagtatattcatgataattatttatctgtgttagcttctagcccagcatttaggtgaaaaaaaattctatagactttaagctttcgtttgataccaagaaagtaggcattgaccaagtaagaaaaaagttaaggccaaaaaaatgaagattggacgtctaaagtgcactacagtgatgccgcgggttgatcgggtttcgggtcgggcactcgaaaaatttcgagttcgggttgagaaaaacttcgggtctcgggtttcgggttagcatcactggtgcactagcgccaaaaacattcagagagagagaaagcgagatatatatatagagagagagagagcggcgagagagatagagagagagagcgaaagagagagggagagaaagcgagagaaagagagggagagaaaagagagcgtgagagagagagcgagagagagagagcgagagatatagagagcgaagccatttaaaaaatatttgagataagactttaacaataatatttgaatgaaaaagtactataaattggcaatattataaataattatggcaaaaatatacacattttaagaagtatttatttttatttttcattgaatttttttaaattttctaaattttttcctttttcaaaaaatttcacacttataaaaacaactgcaggctgtgccaaagtaaagcaataagcgatgcaaccaaacaacacaaaaacaaagaattcaattataatttattcaaaagttatgaattgggtgggtccggcaccgccggaatgtgccaaaaaaaaatttcaaccgaaaaataaaatggtggacaccaacaaattcacttatcatcaaaattatagtaagaaatcattcctgaattggaaattttgatcttcttggttggctctccctgctcattagtcggaatctatgaaataattcatgtaaattaggtaaaaggtattttttaaaactcaaagggaactgacttttttgttttattctttaggaaaggatcaaatgggattccactttatataagaaaattatgaaatttaaaaataaatatatactgaaactgaaacaattaagaaaaatcgattttcggccgagaatttcaaatttccttttttggactatttctctgaaattaaaaaaaagaatttgtttgaaaattcatatgaaaccaatcaaattttttgttagggagtttcttcaaaattagaaatatatacaaaaataggcgaaatatgtatttaagcaattttgtagaaagtcttgaaacgtgctggtacatcttaaaatatataaatgtttttgttgaagctaagaaaattcttcaagtggattccctaatgatcagcctacacgtgttaagaaaaacaaattgacagaaccctctttgttttttcgcaagaaaaattttaacgcaaaaatttcacttggcaaatcttctccaagacctcgaagcctcgaatgacttttcctgaaaaaattattatcaaggcttggatttaaagtgtgaatcacaaaataataataaaaatattcgaaaagaattggtgtccttaatttaacttttgcattttgagttgtcattgagctggtcatttatgcctcggatataatttttaaataattatattatttgatttaatcttcatttattcttttttaaaattagaaattttttgaatttgaggggtagggcagattcgtgctcagtaccgtggaaataaccaataagaattttgggcttaaccgggaccttttcgggttgaaaaaccgggaatttttggctgggaaaaccgggaaaaaaccccccgggactggtcccggtcaaaaccgggacctcggtactcagttgtccgtgttttagtcccggtcccgctctactctagtttaaactcaaaattaaaaaagattcacccatcatttaaatttttcccaatgtgtttaatgattattttttgatgactttggcggccaaaattttttgttctgttgtttttggcgatatgcacccctggtgaaatttttcgggtttcttgcattttcttaaggtttttaggaaaattaaggaaaactaaaaaagagcagatgaacaaccgaaacaggtttttaggcgccaaactaataaaaagtaaaacctaaaaacataatccttgtaaattataattaaaacaatgaaaaacggaccgaacgcaacattcactccattcaaatctgggcactcttttgtcgtgatcataaattcggtgcctaaagggaagggtaatacaataattttttttaattaacgaaatttttgaaattttgcaggccaataaagacacataaggttattgattggtaataaatttttattaaaatttgcaaaatttttccggcagttcatataaatactggcaaagccggacgattaaattcccataaatcattaaatattcaaaaattgacccaaaactgctcaaaattatttttggactgaagaggaatcttcgaataccttatccaaaaattttttggttgcgggttgtgtattgcaactttttaaatcaaaatataaaatcacgttcatttttaaatctttaaagacttaatttaaataaattaatgaattaaacaatagaaaactggaagaattaaaataaaatatttattgttacatcaaatttaatcattacaataatgccatacaatcatgagctattattttaaaaaactgggacaggtttaaaaaactagttttggtttaaaaaactagtttttccgggcttggttttgctcttgtctaccaaaatgattattttcaattaataaaacggaataattataatattcataaaaaattagaaaggttaatttttcaaaaaccaatttaaaagcaaattaactggaaagtggcttaccgttatggtctgggattccgtcgttgaacttaaacaacaaattaggaagacaaattttgtgtgaatgctttcaaggcatgccttgtcacgcttcgtaaattcacaaaaaataggttttttcaggcttagactgggtccgagggtggagggtgaataaaccacaccactcccaggcgacgagaccttcttttattagtagcggtaaaattttttttgttttcttttaaaaaataaaaatcaaccggtgatttaaaaacttgtcatgttgtaaaataatcgaatcctttcggaaatttacgaggcgttctacttccatttcattaccattgaaacaattcccggtgcatcgtgtgccaccgaaaaattttcatctgcaaaataatctccgtacagcgatttgcagccaagaaacctgaaaaatagatataataataattgtgagattgtcccaattttgacaaaaaaaatttgtcttaaaatggtatctgtaacgcttttatagggctttaangcattgatcactaataaacgctccattttaccgcgcaagccattaatcaaaaaccaccaaaaaaaatattttgcattaaatgaaccattttaaagttctcgacatcaatctttcgaatttttttcccgaaaaattggggaaattttttt

SEQ ID NO: 22 - DNA, 1628 bp, Heterodera glycines
  unsure (1)..(1628): unsure at all n locations
tgcaaaaaaagtcaatatacgattgggataggaataccgaaactttaaactatcgattccaaaatgccataaaactgagaaaatttaagatcatttgcccagtattcgagataggaattttaaaatggtaaggaacgaaaaagtacnttggaaaatggacttggacttccgtttttccggggttcccggggtatggccaaagaaaccggaaccgggagttccggcaaaacccatgcggggcccaggttttgtccggtttctaatctgtaaaacagcgaacgagaagtgaccgtaaaaactccgagagaaagtttccaaaacttggtaggtttgtaatttattctaatagcatgaaaatttcgaatataatatttaatttataaaattttaataaaatattacaatgctcctgcacacaattgtttgaaattttccgtcgtctgtggcacagcagcaaccatgaggtcaataattatacgtcctgaaattttatacttttttccaaaaaaatttagtattttattttaagcgccgaactggccacgactcattttttcgaaattaattaaacaaaaaattaccgcaagaaaccgagtcactttcaatgtccttaaacataataataaaaaataagagagaaaggaaaaaagaaaaaattaccagaaatacgactgggtctgatggatgagccaacgatgcattaaattccatccatttagtgtactgtggtgacatatctatatgtaaataaattaattaggtgcaaatttgctcgaagaaagggattagcgttacatttatttttccaaatatttttgacaatttaatttaaagaaagaatttttagtgaaaccaaacgtattataataattaaactgatttcttccgcctcctcttcagtgggggcggtgagagaagcatcgccaccacttttggcattggcatcagaatctgctgaggcggcactgcttttgttgttctccttcctcattttctggcaatggtttttgacgtttgaagttgaaagttgaaaatttacaatatttcttcacttaaaatattggtatttaggaaaataagggttaattaaaacaaatgttttaactctattaaactttatgagtccaacacattgtcaaatatggaaatatggacaaaaatctgaaatatggaaaaatatgaagtaaaaaaggatcctagaagcatcaaacaaagctaaaaacactatttacgtggtttgtaggcaaaaaaaaaatggaaatccatacaaatccagtcccaactgataagcgcaaaaaacaaattttcttcgaacacttttcgatatatagcgcctttttagcaactattttcaactacagaattttcgcttatgaaactttttaataactcttttgacttgtgaatttaaaaaaaaaactattttttcaaattattatgaaaatgcaataataaaaaaaatttaaaaaatatatacccctaagaatccacataaattttttcaaaaaatgcacccctaagaattgatttttcaaaaagcaaaaatcctggccatgatttggcggacgatcgaaaactttttacgcttgaaaatcttcaaatgtatttgatttacaattgtgcaaccg

SEQ ID NO: 23 - DNA, 2227 bp, Heterodera glycines
  unsure (1)..(2227): unsure at all n locations
ataccataccataccataccataccataccataccatgcgctaccttaccatgctatgagctaccataccatgcgctaccatactctaccatgcgcttaccataccatgcgataccatatcatatcataccatgcgcttccataccataccatgcgctaccataccatgcgcttaccataccatgcgataccataccatgcgctaccataccataccatgcgctaccataccataccataccatgcgctaccatacccccccccnccccccatttttttgtttcaaaattaaatttatttgtcattttttatccattactctgctcatcgatataaattattatgtttttaggtccagaaatgtctaattttaatcaaaatgattttgccattacttcggtgcaccaaatgcgcaaccgacctcggaatacaattggtgaaatagcggaagtgcgctttgctccacttgaagaagtggaacggcccgatcgtgtgctcgagcgtcttgtacagcggctgtttgacagagtgcttgatggacgtccagcaccgatgttaattggtcttcaactgcatccacctacctttgagaacccatttaccattcctcttcgtccacccgagcaaaacaatccggctgctatcgctgatctgatccaaagactcaatgatcaatctgctgccggaattgatctgactggcgggacaacagtcacaaaagtgcttgcagtttggccaatgcaatcggaccacagtgaatcagggagagcaggttgaactttatttttattttcttttcatattttcttttgctgtataggcgcatgcagccttgaggaagagcaccgattggtgaacactgttcgctcgttgatccgcattaagaatccgaatgatcgactctgtttggccagagctgtgttgctaggtcttcacgattggcgttcacggtcaccaggcggaggcggaccgacagcattcaaaagtttcgcaaatcgccagcacacccacgggcctgaggcacgtaacttattgagacgtgccgcaattccccgcaacaaacacatgtacacaattgatgacgtccaaaaagtacaagattggattgatcaacgatacgggccaggagaaattcgaattgcagtttttgagaaggaacgtgagtaccgaattgtgttcaaggcagcatccggcgaggcagccaagttcaacttgtgtcttttgttcgaaaatcaacacttcaactacattggtcgaattgagcaactgtttcgtgtgcaaggatattgtattgattgtgaacgtcgcgtgacacgctggtaccacccgcaggaatgcaaagtcgtctgccgtctgtgtttacgttttggcgcagggtatccatgtaaacaacaacaacaacagcaatcccgagcagatgggtcaactggcaatcgtctttgccgttattgtcaattcgtttttccaaatgacgactgcttcgcctatcatctgagcaatcaggcacccgcaagcatgtataatcagggaggacgcacttttcgcccaatatgtgaatggagaagagcatgccgacaatgtggagccataacctatgcgaattatccacataaatgtccagcccaaattggccaaacggaatgggtgcgctgtgcacgatgctctggaccccatcaaagtggagacccttgttttattcagcctctcaaagatgaaccaatgaggaggagaaggagaagaagagggcaacaacaacaacaacaaaataataataacgatgacgaagacgatgatgatggtaatgatggtaacgaggagggagacgacgatcacggtcatgatgctgataatgaggaagaagaagaagttggaacaaatcggtcggtcagactttgctttttcgacgctgaaacgtcccaagatttgccacttcaactgcgtacaaaggttgtacagaaacatgttccgatgctcattattgccgaaattatctgcgaagcgtgtataaatgaaggaatttcggttcattctggtgttggacaatacgcaaatgggtgtgtgtgtggtcctcctgcgggaccaagggggcgtcgctggtgttctcctccgtttttgaatgcacctggggatgacaatgctctaccagccaatggccactacaacccacgaaaattgttttcccatagttttgaccacttacccaacaatggacccgggggaccatttt

SEQ ID NO: 24 - DNA, 13813 bp, Heterodera glycines
ctgaatcggcacgatacattcgttattatgaaatgactcatccgggggtacatgttcggtctgcccaatggtcaattggtgaggctaacgtcgaagacactggctaccgccttgatggattagtcacacgtgaaccccctcaacgcaaccttgccattgaatatatgggttgcttttatcatggtaaaaaaaaaaggtcgcccttttcaaccgaacaaaaaaaaatgcttaaaggttgccccaagtgttacgctaacgacagacaacaaaaattggcaggtggaaggacagccgaagacctgtatgaacgaaccaagaggcggctatttgaactgcagaatcagcatggctttgagctggaagttgtctggggatgcgaaatgaagcagcgtctgcgtgctgatccagaatttcgccgggtgtacaatgactcattcgttccaagaccgcttgatccaagagaggatgcactacggggtggacgcactgaaccgtttattcttcattacacatgcagtccagacgaagagataattctcattgacattgtaaaaaaaaagttaggagaaacaaaaaatattttttcattgttaaaggtgagcttatatccatatgtgatgaaggcattctcgtttccggttggtaacccacgcgttctcacgcgagagacacttctatgtgcaccgacatcaccgcttccctggtgttctgtcgacgcgaacacattcaaagggctgttgtttgttcgtgttctgcccccagatccagctgtacacccgctaaaagttcctttgcttccctatcgaactaccgacgggcgcctaacttttccgctttgtgcacgctgtgctgacaaccgacaacaacgggcatgcaaacacattgatgcatcaagggcatgggtttccgcgtaattttgtgaaattaatccatgtcaatttactttttttgtcccggtgtttagatacacccatgttgaattgaacaaagcactggagcttggctataaagttattgatttatttgaggtaaaaataacgtatcgtttattgcacataaacttcaaaaaaataaggtatggcattatgaagaatgggataaccaactgtttcgtgactatatgaacacctttgtgggtcttaaagttcaagcaagcggttggccatccggttgtgataccgatgaacagcgcagagcctatgtagatgaatttaggcgggttgaaggcattcagttggaccacaacaaaatttcaaacaaccctggacttcggatggttgcggtaaaaaaaaatacagaattacaattttttaaacttaaaaaaaaaaaacacacacagaaaattcttgcaaactccctctggggaaaacttgcgcaacgagtcggtggaacggaagttcgttatacccgaactccagctgagtttcatgcactgctcgagaatcgcaacatcgacattattgactttcatcacgtctctcaccatatggacagagtggtagtgaggaaaaaggctgaatttgcaaaagcaccgtcaaccaactgcttaccaattgcaatttttgtcacttcatatgctcgtctacacctttatgactatatggaacaagtgctgcgtcttggtcataagctcctttattgcggtgagccaaaaaaaaaattttttttcacctttattgacctattattcaagataccgattcaatttattacgtgacaaacaacgggagacagcaggtgcctgaaggtgaagcgctgggaaagatgaagagggaacattgctcgaggcgaatatacgaatttgtgtccggtggtccaaagaattatggttttcgccattgtgatcgcataaatggagaggatgagcgtgctgaattgaaagtccgaagttttcgtctctcatattctgcgcagcaactgctcaacttcgagtccatgaagcgcattgttttggaacattacaacattgatggacaaatgttaacacatttttctctcacataataatccagaaaaaatacactaaaattctattccacagagatgatgtgctggacatggaaggtgttcatgttgtcccgggaagcaacgcgtcgataagaatcgaatttccacaaattggccgaactccatgttcggatctgtacacctacgacgctcacaaagactaccaacctcattatgtgaaggggcgcattcgccccagcatggaaactgtaccattcggatttcgtgaagcacaaacggatcaagaacaagctgaacatcaccaacgacagctgaatgattttgataacaacttattaattgttaaccttcccggatgctcaaattggaatcaataaaaaaaaaatgtaacacatagtagaagaagaagaagaaacttgcaagcgtttgtcatacagaaagaaattaataatttacaatatctaagaacaatcgcaaggcatgagacagatgttcctgctttttggatcctgtaaaaatgatttttccagaatgataggctaaacatgtgaccaaagcgtgatgattgtctacaacaatcttacaacgcatagcgggaaaaattgtgggatcatattggatgttacgaaatctgtgtgggtccagtgttggtataaaattcaacagaggcaaacgatggggtaatgtgaatgaaccaactatgtttgtcacacgtatctcatggagttctaactgagagcccaaagcatgctgcacccttcttctgattttttgcgcctcgcgtaccgctctgtttggacaagggacacccgttaacaccgcacgggctgatcgaaatagaagacacgcaagagtgcgttgttgaggcagacgcagtcgtataatgattgcatggaatcgttggggatcgtactccgagttgaatccgttttgagcaattttcaaaaactctgtgtttgtgaagggcgtccgctgtagttgaaatgtcactgtacaattttgaatagttaacatttattttttttaatctgacattaaaaaacgacaatatttgaattaaaaaaaaaacacccgttcatcatgcatcatcatcatcatcactaaatcatggttctttaacaacaacaacactaagacactcaagcgggaacagagagctatgatcaccaccaccaaattgaagaacacatggcagttgggggtaagccagctttataccatgctttacatagtagtagacgcgcacctaaagtgtattgtacacatagattggttaaatttaaataaatcaaagacaaaccgtaatgccaagataaccgcgcatagcatatgcagtttgagctggatgaattgttagttcgttgcaatggacgcgaatgtttttccaggcagggcgcagatgattggtgcgtaaatgaagattggaacgcaacatttccgaaatttctctacgtttgctcagcgtctgcagcagaacgtgaagctcattcattgaacatttgtagtgtttgcagagaaaatcaatcaacggcacactcttctgcttttcattgcaactgcacttggtttgtggttgcgggtgctttggcaactcaatgttgtctaaatttaaaaaactgtttttaatgtctaaaaataactaaataaacctttcacttgttccagttccatttgatcattttgcaattccctcgcccgctcctcctcctcctcgatgattttaagccaactcatttgtccttcctgaaaatttattttatttttttactaatatagttttatttataaacttttttcataaaaaaaatacccgtgttgctttatctttttcttcatttcctgttgtcatcttttgttccgggtacgcattgtggagccaatcggtcgcaagaatcgcgtccatttgtttaatagttaagagattattattatttctgtaaagctttattgtgtatatataatattttttaaacatggataatataagataaaccgttttgcaaaaaaaaaaaaaaatggcagacaattttcaaaaatttgatgaaaaacacttacaactcagacacccgtttacgctgacaatctcagggagcacggggagtggaaaatcggaatgggtgttacgaatgctgaggaatgtgaatgcgctagtttcggaacccatctcggagattttctactgttatggggagttgaatccaaatataatacagcttcagaaaagtggacacatcggcggttgtagggttattgtacatgctggaagcccaaccgaagagcaggttaatcggcgcgcaaaagagtgtgatggaaaactgttgatggtgttggatgatctcatggttggattgggccaacaatttcttgacactgtgttcacccggggatcgcacaattggggggtcagcgttgtgttggtcactcaacatttgttcgcaaaagaactgcgggttgcgcgcaacaactcccactatttggtgctgatgcgtaacccggcaggcgcgctccaagtgcggacgctcgcctctcagctatttccaacgaaaagcaactatttcacggaagcataccgggatgcaactgaaaagcaatttggctacctactaatcgacatgcaccccgagagtccggaattgttgcgcctgaaaacgaatatatatggagagcagggtggtcttcccccattggtttatgttgcaaaatgaagcatgtcaaaagaagaaaaagactaacagataaacatactatgaatgttagcccgctgatgttgaaaaatgctgacttcttacaccactttcgctcaaaatatcgctcaaaaagcagacagcgcaaaatgatagagaacgctttggatgagcagttgctctgttttgtggagatgggtttcaatgtgttgaagggtcgtgttccgttagggaagcgacaaattcaacggttgggtgcattgaagcaccagttgaggcgcttagcacgcgcacgttgcgcaaaaaccgcgcgcagagtactattattgaatcgtcaagaccaacaacaacaacaacaacaccaaaccggtgctggctttccggtggtagccagtatgctgacaagcattctcttaccagtgttaatggacaaattactgccaaaaactaattgataaatagataaaaaataaatatataaaagcgaaacagctaagagagcactcgtttaattaaacatttagaagagcgcaaaaaatgcgtcacgcaatgcgaatgtttctcgtcccggaggacgtctttcagtcggtatttgttcaaccccaagcagcaacagcagcagcagacggtgccgacggtacaccaattgggcttttgcgctcacgcatccaacaaattgagcgtagcagggagctgaacgaagagcagaaggccgcgcaataccatcaggaattcaaacggctcaacaaactggtgcgcgagcaggaggagcagccgatcaatgttcgacttcagcacgaaaaggagagagaaaaaaatgcagcaacgccgccgccgccgccgccgcaaacgataaatcattcaacgccaaaaagattggagaaaaacattgtaccatcagcgtttgggttgaggaggcagagacaccactacacacaaaaggcgggggcattatcaaatcgcagacctgcccaaaaacaacaaagaaaagcagcagcagcagcagcagaaacaccaaacagcagtggaaatggagaaacggaaaaagaagagggtgatgtagatgatggggaacagtgggacgacgcacaatcatcatcatccacggcgtcaacaggtggtgtcgcaccaaaaagaatgctcagagcaagagatggggaagcaggaaaaggaggaggaggagaaacggctgatcgccttcaaacaaaacacaactaccagatgaccaaaaatgcactgatcacacacattcaaaaaaaggggcacagtctgggagtcagtgatcagggaaaggttttgcgcacagatgggtccgagtttaaaacgagcaacgtggaggcaattgtcagccatttgttgaacagggacaagcgaagcgaattcaaagggccgcctgtgggctataaggaatttgctgaaaaggctagagaagatccgttgctaaaaaagtatttgtttccggaacagcctctacaatttggcaaaggcctgactgactttaagcatggaaaaggacataaaaagaagtgcgaagggggaggagggaaaagtgtcttcaggttcaaaccgacactatggtagtcgaccggaagaaagaacagctgttggaccagctgtacaaagatgttaactcatcggtcagctttaccagcgttgagccgcttttacgcgaggcgaaaaaggtgaacaatcaaatgagtagaaaggatgtagtggactatttggccacccaacgcacatacaccattcatagacaagcgaagaggcgctacaaacaactaccaacactcgcttctggactgcacaccgaatggcaagcagacctgtctgtctttgacaaattgtcgcgagagaatcacggctacaagtaccttcttgtctgcatcgacacactgagcagacagctctttgttgagccggtgaaaagcaaaaagagctccgacatggttgctgcttttgaacgcttgtttaaacgctccaaatacataccatggacattgttgaccgaccaagggctcgaatttaaggcaaaagaggttcaggaatatttcaaaaataagaacgtgaaaaacttttttatgtacacctcgccgcgaattcacgcagggatggcagagcgggccaaccgaaccatcaaagaacgcctttatcgctatttcacggaacggggtacccaaaaatgggttgatgtgatacagcaaattgtgcatggaataaaccactcgtacaactcaagcataaaaatgcgcccagttgatgtgaattttgagaatgccgaaaagctcaggaaaaaactcaagcagaacgctattggtgggacagcggaagcagcagcagcaaaacggaaacaaccacaaccacgttttaaggtgggtgaccgtgtgcgcattgagaagtacaaacacgtgttccaaaagggctacaccggacgcttcaccaacgaagtgttcactgttgccgaagtgcacactgaccgctttcccgtcacgtaccgaatacgtgatgacgacggttccctgatcaagggccgtttctatgccaacgatctctgtcgtgtgctagtgcgcaaaaatgatgatgatgatgatgatgatatcctatatgacattgaaaaggtcgtccgaaagaggaaaaagcaaggtgttgaatacgttttggtgaaatggaaaggctacagtcaacggcacaacagctggattcctgcaagctcgatgacatggaaaaatatataaaggggctcttttttttaaatttcaaatgagaatgccttcatccaactcattctatgtgatcgttccttccaacacaaatgttgaaggaaatcgcacaaactcttttcgagttcgactaccaagaaaacttcaatttaattcggaatgggatgtgggcttaggtgtgatcatatacccccattcgtggccctcactcggcacatcagaggaccaatttgttcaaattgaatggaaaattggagagaatgttcaaataccaattccatcctctaacgtgacaaaccccgttgagctttggaaaagtctttacaaactgcttgaagaaggcaacaaaccgttcgcagttaaagtggaaggcgtacagaaaaaatttactgaagcggccaatacagcacgtcaattgggcagagccgagtacatcaataaacaacaacaacaacaaagagacaaaagaaatgttaatgatgatgatgatgatgatgataaaaacgaagaagaattattaaacgcccttttagcgggggttgacacgttgcttgacctttacggagcaaccagtggtggtctacttgagagagaaaaacgtgcagcaacaagcaaggtccccctgcggaattgggatgacactgaagaggaatatcagaaaaagcttgataaatattttttgcgtctacgtggccgtaatttagaacacttagagggactgataacagaaaagttgaatgcggaaattgcactgatggatgacgaagaaaggacaattctcgatcaaaccaaagaattaggcatgacagcgtggataaaaatttttcaatcagcgtactctgcatgtttcctgcattttgacagtgcaacgaacagattttcgttgaaactggacgatcgttatgtgcaaaaaataaaaatttcagaccaattggcctacattttgggttttaactcaaccgatttcactgaaaaagaaacgattgcaaaatttatgccagacatgagtggaggagttgcttcttttcatgtttatgcacctgatctaattgaaccaatgatgattggtgacgtgattgccccagttttgcgtatcgttacgattcggggaaaacctgacgaaattatagaggagcagtttctctccgtccaataccatcgcgtactagtcaaagaaataagtgaaattttcatcgaaatcagaacatccggtggtaacctaatgccatttcaatacggtacatgtacattaaccttacactttagaaaaagttcctacttttaaaaatgaacagtgttcaaataaataaaattcttgctcgaaacccagtcacgcgttcgacctttttagggtgttttccatcagatcaaattccagcagtagcagccacaccagctccttattcaatggtgattaacgttgatccgagcggttcacctggttcacattgggttgccgtgtattgcgagcagcaaaatcgggtggaatactacgattcgacaggaatttggccaccgctaagccctttcatccaaaaatttttaaagagttttgctcaaattcagtttcatcaactttcgctccaagcaccatactcacactcatgcggaaagcatgtgattttctttatatttggacggtgtatggggatgcactttgaagcaattttgcaactgctaaaacgcgcaaaaatatcaccagatttttttgtaaacaaatttatgcaaaaaaatgtgtttaaacaaatataaataactagaaaactcaatttaaaaagcgcaaaaaaaaaaagaaagaaaaatgcacgttgattttgatccttttaaagttgaatggtcagcattaacccaaatttctccagaagtagtcgtccaatacggtggttataatgtgttcagaggggttccataccagcgcggtagtggtatcgggtctgtttttaggagtctattgcgttacctaataccaattgggaaagaaatcgggacagccatcgggcgccaaggacttgaatctggaaatcgagttctatccaatgtattagagggtagggacctcaaagagtcacttgttagtgagggaaaaacggggctcaaaaatttgctagagaaagcagccaacaacataaatgcccaaaaaggtcaagggttcgactttaaacgatacacaaagagaaatgatgcaagagaaggtggtgcaattggtaaagcgaaaaaaggtataaataaactacaatcaaggttgggaccacacgatttcctaccagcaaacaccccagcaggtcggaagaaaaaacacactaaacagaaatcggtcaaacgccttcgtaccgatatacttggaacctattaataaaacaaccccccagaagcacaatcatgagttgttcacaaaaaattagcgaaagtagtccccttgccacaaatagtgctttgaacattttttcagtacctccaacaaatgtgtcggttgtgcgctcatatttccgtgaagtcctccccctagtgacaataacgcaagaatctccgtatctttttcgcctgtacagtgacaatctttggaccgatctttcccggatttatctcttccttgacctttcaatagaaaaaccggatgtggacggcaactgggtgtcaatcgcagctaccgatgctcaagtcggcaccattcagggaattggtcaaacatttgttcaacaactaaaagtctcagttggaaacactgaaatttacgacagcggaaatttgtacccatataaggtttacattacgaacacactttcgtttccgatgaacgtcaaaaaaagcttcctcgcttcaactggtcactatgcgacacgcacacacgacagcgtcgctgatgagggctttaaagctcggtgtaaaatttttgagggtgggaagcgagcccaatttctttcacgtctggactttgacctgggaaaccaagaactttatttgttgaacaatttggatcttttatttacaatttacaaagctcgtgacactttcatcatgcagacattgaaagcaaacgatactaccaaataccgcgttagagtccatgacgtaaaactgtatgctaaaatgattgatgttcagtcatctttgaatttaagcatctacaaaacgcttgaaaaacaaccagccacatatgcagtgcgaaaaactgaaatcaaatcatgctttataagtgaaggtaggtttgaaattgactacaatgtattcagtgcaacaattcctcgacgtatgacaatcgcacttgtcgcaaacggggcatttaacggaaattatgctctctctccatttaattttaaaccgtttgacattcgagacattgcagtgtacgctggaggcatgatttacccaattgttccatacaaacttgactttgccaaagatatttttgtccgtccttttgttgacatgtatgaggcacttggcatggctaattcagagcgttctttcgacatcacaaaagagcaattcaaatctggttggaccttttttgtaattccactcacatcgacgctcgacgatagcacagggtatgaactcttaagaagcgggacaactagcattcgcgcaacatttaatagtgcaattcctgagggcggagttgaaatgatagtgctgggtgaatttgaccaaatgataatgatagactacaaccgtcacattgtttccgattcaaagcttagttaattaactgtataaataagatgcataatgcgaaaaaatgccaccataaaaatggccttcttaaacactacagtcaacgccagtttaaagccagagatacaagtactaacatttgaaaacaaaagcgttcatcctaacctcctcgtgcaacttctattgcttgcccactatctcattgcttttcccgttttcattttatgctggtattctttgataaattttcttaagagaagaggacatatttctcagcgtgatgccaatgagatgatggatgatttgcgaaattaccaattaccaaaaaattcatcagttatttttccaagtttatcaataaagaaatgattaacgcacaaatattcaattttttttcacatgatcccctttcagccgtgatgaagatcaaaactaaatttaggagtgcttttcgttcttttgaaaaattaaggttacgtgacaaacgcatatgggccaagcttttccaacaacgttaattggattgttatgaggagagttgacgatccaccactcggatagagccaactgcaaatctctctgtgctcattacgaaaaattgtcaacgtgcaatcctgtctcatggtgaattcacgaagaaaaaacaaaattgcaatcacatcaaggccattttggagtttgtgtctcatcatcttcaacaataaaatgcatttttaatggatttaaaaaaaaagtaaaggacatgctcaatcttttttttaaagctcacaacaaatgaatcatttttctctctctctctctctatcaatttttcttggccttcttggttgcaatctcatcaacatcatttttttcttttggcacatcactgtcatcattccctgggcacttcttgaaaaggttgacaatccaatcaaatccagtgtacgtctgattgttcgcctagggcgtggtttgtcaaatacataataaatagcaacaaaaaaaaaccttaatgttaacttttgcgatcagcttcacagcaatcaaatcgtccaagtgtttcgcaaggctttccggctccttctccttggcgagcaattcagcagctttcattcccaaaaactcttcggcaacactcgaaaacatggtgacacgttgagcaatgtctgcttgttcaacatcctgcagcagaagacggacaaacaccgtgtggatgggagcaatcgctttttggccgcaagcctcacacatgttatcatcggacaattttcggcggcaaatgagccccttggaacgaaatgggcatgcctaaactagaaaaaattaataatttaattaattaatttaatttggactttgtaaacacggtactgcatatttgtcacttttcccaaaacataaaaaacgccggccgaattgaagttgaccacatcgctgatgtgtttcggttcaactgaatccaactcctcttgctgtcgtgtcccttgctccgggagttgaaagcgtttaagagaattcattgcaggaagatcggaaaaaacgaaggaggatggaattttttaaaaaatggaacacgaatgatttttatttagaaaaactgtgattaaatagaaaaaaaatggggcgggacaaaagaaactaaaagcaaaaaaggcggagtcaacttcttagtaaagcaaaacaaaaatcaatgggtgtgaccaacaagaaaaggggcggagtctttttactttgcatgatgacgtcattttttacaatttaatgaattggagttttttgctaatttacttaaagcttcggatatgatatatgcaataggcttgggtttattgattatttgtgtacagtccttacaataggttttgccttttttttttttgggggggggggggattattttttaacctcctcatagactggggataattggagactgggggataattagagcaaatactgtattttctctctctcgaccccatccaataggtttgggtttgtggaaggggatgtcagagaaaaaaagtagacacactcaaattatcgatcgaaaatcaatcgataatttgattgggaatattatctactgatgtgaaattaaataaattttttaaatccaagatttaattataatttttttgaagtgaatggcgatgctattaatttggacaattatggacaattatttgatggaaaaaacagtgaacaatcgatcactgatcagcaacagtttaaggtggactaaagaacagaaacaattgggagaagtatttgaatttataggagacaaaactgattttttaatttaaatttaggaattccatgaaaagtttgccagaatggaaatcgaattaaaaatggccaaattggaactcgaaaatgtgagatttaccttaaaaaataacgattaaaaatttgtctaaaaatttagaaggaacaaaagttaaagctccacgaactgattggagaacagaaggcattaaaggaaaaattggccaaattggaacagaaaaagggaaaaaatggtaaaaaaaaaagtaattaaatgaaaaaagttacaaattaattttattttattaatccacagattgttgtcaaaattaatttattttcagcaatttttccaaatctgagcacatcggaggaaatgattgttctgattgccagaattgctgagctgaatcgagctaacacagcggaaccatcaatcgcaagttctgctgatttgtttggacaagacggaaacggtaggaaattgggggatactgtatcaaaattatactgtca

SEQ ID NO: 25 - DNA, 2577 bp, Heterodera glycines
cttcggggtcgctgaacatgatttgacattattttgaccaatgttgagtccttaggccgggattcaagcaaaaggtcgaaaattcaaaatttcaagtttcaccctttatatattcgaatctgcttaaaataaccccattttactgttgcattctgaggttttttgtggacgctgatcatgaatatagcattttatgcttgttttaatcaatttaagaatgaaacatggataagctttgaattttcgacgaattcgggtccggttgtccataaccgaaacaggtcaaaataaatgttatattcgtgaacagcttccccaaaacccttagatgcatgttttcgcgccttttaaaacaaaaaaatttctaccaaaaaaagaaggagagcaccatcgcagtattactcaattttaaaataaaagtgcgaaattctgaatcctcgacaattgccaaatcaaattgaatgaatgtgtgtgtgtgtgttaagtgataaaagccactatgctttaatctcataattaagccgaggatttgtaggggcaaaaaatcccaaaaaggggagaaataggagcgaaaatgttggactaaaaatgttaggtgtaaaataaaaaaaaaccatgtttttatgaaaataaattgaaaagtgcttgctattgatttttatagaagtagaaaatcagaattattacaaaaatcaaaaataacaacaaaaaaattgtatgcagatatcttaatgaaaaatggtccgcgatacagtttcttattgaatatggcatatgatataatgaggaataattcaatagacatgtttaaattcatcgccctcccctttcctcattagggatgtgtcaaaactttccaggaagtcgagtccgagaaaaagaattcgaattctgtatccaacccaggcttcaattaacgaatcctaaccatgtaattttataaaaaagcaaattgattattcaatgagtgccatgtcaactactattagcacaaggaaaaaattaattttataattaattttattattaatttaattggattcaatgaaaaaaacattggaacaaattccatggatttcatatttaatttaatctgaaaatttgctatattcgaatagatatttttatttggttacctttttaattgatattgaaaatagtaataaggaaaatagaaaacaaaaataaataaatttagcgacaaaaaatatttaaaaatatgacaatttgaatcgagatttaaattaatattacgatagtgaagctaaattattatttatttttaatattgctatctattttttaaaataatctcaaatataattaacctaaatcaattttcatttttattagtcattaaaattgttgtcgttgataaagattagagacaccattttttgcctatttcggggtttttgtgcttaatgcctatttgcctatttttgtgcctatttcgccatttttggcgcctttttcaggattttcggaaaaaactttaacaaaaatgcaataaaaacgaaaaatacactactaagaatagacccgaaatattttcagaaaatggggctgttagttttcgacagtggtgatatcgacagtgttggtttcgacagttattgatttcgacagtaaagcttatttttaaaaaatttgttccatattgcataagtctcgtaaatttgacaattaaaatgataagaacatggctcttatacattgcagaggggttcgagattttccaatttgtaatggctgatcaaaatagctgtggtagctcaaagtgctgtgggagcaaaagcaacaggggccaaaatgaaggaaagatgactccaaacaacagtcaaccctccagtggtggatgtggtctagtggctaagacaacgggtccacgtaaggggccccgagcagcggttcaaatccggccttccactccaatttttcgcctaaataatatggttacacttggcggacaccccaggtcgtttggtcttcacaccactcgacactccagaaacaacagctggcaatggggcaaaagaaccggaggcgcgccgatccttgcatagagggaacggcccaacgccatctctcgagagagcgtgcacgaatatgagaggaggggaatgtaatagctgacgttgtagacattctcaattacagtccgatcactttcatatatatgtcattggacggacccgtgaggtgttagtattgttcaactttccgtcagaattccaatttttgattcaggcaatttccgattttgggaggcagtgacacttcgatcctggaattaccgatgacagtatagaattcgcaaattagaggggaattggcaagtttatcatcggagaattatcgagaaagcatgtatatttaatatgaattctcactgaacagtcaaaggaatgagtaaatgtaaagcacggtccatacgagaagagaaaaagaggggattcgtttcactgggagatcaatcgagcaatcacgggacaaagggggtgtttgtttgcccattccctcagcattagccaaggagttcctggatcagaaagctgtaggggtgggtattggtta

SEQ ID NO: 26 - DNA, 12023 bp, Heterodera glycines
gagagttagaatagggatgatttaatttttttaaatcgatcttttttatttgtaatggcttttacaaatagctgtggtagctcaataaatgaatattaagtgctgtgggagcaaaagcaacaggggccaaaatgaaggaaagatgactccaaacaacagtcaaccctccagtggtggatgtggtctagtggctaagacaacgggtccacgtaaggggccccgagcagcggttcaaatccggccttccactccaatttttcgcctaaataatatggttacacttggcggacaccccaggtcgtttggtcttcacaccactcgacactccagaaacaacagctggcaatggggcaaaagaaccggaggcgcgccgatccttgcatagagggaacggcccaacgccatctctcgagagagcgtgcacgaatatgagaggaggggaatgtaatagctgacaataaagccattctcaatggccgtccaatcactttcatgtctgatgagagggacggaccccaccctttgtgcccgtcggatttcctttccccccgttcccaaaatttaataattgagccggacgaaccgggagtaccgttccaaccttcttcctctaagaaattggcccatttgtggtgcgccactaatgagtccctccggcgtttttggaaggtttggagccgggagtaccttctaattttgaggggccgcacccaggacacccattccggcccaaggatttccgctccgggccctcccaaaattggggatgttgtgcttgtggaacaggaggaattcccgaggaatcactggccattggggggaattctcgccctgtttccctcggagaagcaacggagtgcaaaaatattaccgggaacgaggagcgaatgggaacggccgactaatcaattggtaccgttagaagtcacaacagaatggaatgatgtcccacccccgctcatgataaccgacaaagaagggagaggcaaaagagaaacggatttaaggggcgaaaagctgaggaaaaatgccccgaggcaattcaacccaggcggaaaatggactcgtctgctgtgagggtgtatgcagcagagaggacactcgaccccttatttgctcccacttccaccagatttgctggctagcggatatgaatgccatattacctattctttggcgggggagagagtttcctcattagtgcaatgtgatccggtggagggggataatttaattaagtgtaatttttgttgggaacggattcttaacccgcactgtgcccccttcttattaccctttgtcctcggaacacttgccggtgcaattgcggtcttatttctcatctgggtttgttgggtactgaagcgggccggttttgatgtccatcgagccgacttgtttgccaatttctccagggctaacactcgacggggaatccccgagtctaccgtaagatggagacgcggacctagtgtaagagaggaaggatcggacgaggaaagcgaaattttattccaccagggtcaattaatggggggtcgcttgggccagggggacgagtcacccaggcctagacgcctgacccgtttgggatacgctttggccccgccaattatcgcatttttattgccatttgttgggttacggcagtaaatgctgggcttgaagtggtgtcggtcactgccggcacataggaatccaccaccgattacggtggaacgacgtgtcactttgacagcgtcagtgctctaacgttgctgccagtcggctaacgagtagagctagtctttcatacccctcacaccgaacccatggccagcctatttttcatacaaattgtttaaatgtcccacttggcagtttcgtttacggctgggactgactcttgagcgtgaaggcttgtcccaatccgaggaagtcaaataataattttactaaccaattttaattaattagatcgacgataatatgctaatttcatttatgaaagttgttcaagaaaccaaaatattgttgaatgagcagagattgaattatgaaataaaatttgaaaatgaacaaaaattgccaatttatgaaatgtttttgcaattagcaattgctcagcaaatgaatggcaaacacatgaaaatttagaaggaataattcggcaaaaatttgacaaaaattttgaggaaatgcaacaaatgatgacaaacatgaaataattgtggattctaaattcgataataaatggacatggatgagacttaaaattcaatgaaacttaaataatttcaaaatttagattgatgatgctttattttgtggatttgtcaaaggattagaaacaaattcagagaaatttttaaaatggctaaagtattttcaaattatttagtcaagtgaaagagaaaggaagttaacgacgatgaattgaattacgatgttaaaaaggagaaatgtgaggaaaatgctttcaaaaaatgaaaccaaaatgaatattgccaaacttcgtaatgaattggatcaaaaaatgaaaattttatccgaaaaagccaaggaagcaaaggggaaattagacaacgcaaaatcagaagcagacgatgataacgaaaatgcagatctggatgatgaatatgatgacaaatttggcacttttgtttcgtcgccattttcataatttttggtattgtcaactaaattcggattcttctgctgattattgcataattctttttcatttaaaattgttttgagtctttttttccccatttttaattattatttttctttaaaaattcatcattttttgaaatagtagattttaaagttggtttactaaaatttcttggacaaaaaaaattaaattttttcatgggaatgatgacaaatcttggtcaaaattgtcaaacacttaggaaaccatcgattattacgaatcgaatcattattataaaccggaattttatcgttaaaggaaaagtacaaaaaaagtgaaaatagaaaagacagaagaagcattacgaaagaataaaggaaaaatacaaaaaaaatcagaaaaagccaatcattttgtagaaagaaggatcttatgtgaaaggtgacgaattaaagtagggttcggaccccgtgggcggggtggtttttagcgggggcgggattgcggggatctgagtcgcgggggcgggggcgggggtgaggccaaaaaacctgtaccgtccccggggacgggggcgggatccgaacactaaattaaagtgtcaaatttgttatcatattctccactcaatttgtgtcttttttgcgtggtgagccgaagtgacaaaagtatcaatgttcgtaatatttaaatttaattataatttttattttaattgtttaataataaaccataatttagcttaaacttatttaaatttatccatcttggtattagaatgtagctctacatattctatattcttatgttatttaaaaaaaattagtaataatttacaaaaagctaattattctgtaatttaattgtccccactcaattcaatctttgcagttccttgcagcatcttgacacaggaagaaattattggcgtttatcagttccattgtcatccgaattttcgagtgtttggacaatacccacttaaatctttgagtcaagaaagggcttggggatcgtcaacaatttttttgtcattgaaaaggtgtccggttttttgaaagagacagtggggagcagccgatacagcaactgtgtgactgtaaggactaaattgaaaatatggaacgaactggaatcaattgaaggatacaatgagaaatgtttgggcttttaccttttgtgcgaggttccaagtaaaagtactacaaaattaatcaatgggtgaaggtgatgaattcactacccgaaacgaaaaataaaaaccaagaaaaatagctattttttaaatgacttaattcttaaaaaatttcacccgaaagtctccgaatcgaaatttagaattttactattaaaacaatagatttatttacattaagttcaaaattggagctgcaaatgttcgacaactttcgaattttttctctactattctgtaaagaagatttcaaacatgaaatcaatcaacgaatttttaacaatgaaaagcgggaattggcttcagaaacttttcggtaggtggcagtctttatgaacaaaatatagataaaatttatcgaaattgttaattttttctttatttttcgtaaatatgtatttttgtgcagaaatttcatgtctaaagaatgagtctctactcatatcgattggtatgcatatgcatctgtaaaaacgcacaatgccgctctctgactgtctgccggctataaaaatagcactgcatttccgggctcacttcttgtctgtctctgttttcttcacctttcacttgatgagattcaatttgattcccttcactgtttttcttcttttgctcttttctatcaaaattgtaatcctattctgatattgaatggtaagcaatgattaagttttattttcattttcaaaaagtcacttcatgccaaggatgatgcattgaatgaggagaacgggatttcgttgaaagtggacaagaaggaaatcgaattggaaaacgtgttgcgttaaaaggaggtggaggatttgaagtttaaataaatttcattgttttaaaagcaggccaaaaaaggatgaaaattggatcttgtccagccaattatcctcttaagtttttaggccaaaatttttattattcagacattcatgataccgatttaaaaaggccttcggggtcgctgaacatgatttgacatttattttgaccaattttgagtccttagcccggattcaagcaaaaggtcgaaaattcaaaatttcaagtttcaccttttatattcgaatctgcttaaaataacccattttactgttgcattctgaggtttttgtggacgctgatcatgaatatagcattttatgcttgttttaatcaatttaagaatgaaacatggataagctttgaattttcgacgaattcgggtccggttgtccataaccgaaacaggtcaaaataaatgttatattcgtgaacagcttccccaaaacccttagatgcatgttttcgcgccttttaaaacaaaaaaatttctaccaaaaaaagaaggagagcaccatcgcagtattactcaattttaaaataaaagtgcgaaattcaaaaattttgagttttcgacttttttgttcaaatcattattcggggctcgaaaatggtcgaaattaacaacaaaatcatgttcagaacttcgaaaaccattagaaacttattttttcagtgacttttaaaagctaaattttattcaaaaatggggtcattccatcggcagtattaccgaaaagagcaaaagtagttagttaccagggcgggtagcgggtagcgggtggtgattgatgggttgcggtttctttgaaggtgccgccgtgattaatgagtgcgggaatgagtctatgcctatggggggggggtaattaattagcgtgggtgcctgagggggtagtttttgcgggaaaatttcccgcatttgtgggggagaaaacttttttttgtgaatttttttaaacgtttattaattatgtggtaattaagggtgtgcctgtgggggtagttttttgcgggaaaatttcgcgcatttgtgagaggtgtcatttggggggggggacgaaattaatatgcattgtgaaggggagggcgccgcagcatgtgtgagagaaaagtcagagagaatataaatcaaagagaatgtgagatagttagagaaaattatgagagagaaggggggggagtaaaaatgtgtccttttcgtgtcatacgccgggggggggggtgaaaaagtaaaaaggtatggagcaaaactttttggccaattacatagatcagataaatattttgtttatgtttttgatcaagaggatgtgtgtttattgggaatggaaaatgaatgaaaaagaaattatgcatgaagttggagggggggggatggtgaagttaggttatcctgtgggccattttcatttctcatcaacaacaaaaaatggagtggctcaactatagctgtacttcttacccggggggggtgctttgcaaccgcccccggggctacacaaaacccgttctctgtgtgcattggtccattggcaatttcacgcaatttctgcgtgagtgcgttcaagtggcggcagcgccaaatgccacggaggcaacgacgacgacgacgacaaattgcccaaatttgtcaaatttgatcatcgccagcgccgctctgattttggtgctcttcattgtccaggtgtgtttttttttattttttgttttatttcaaaaatgcaacccccccttcccatacagatggtgcttttggcgctgaaattgcgccatgccgttgagaatcggcttctgcatcggcggcttgtgcgccgacaaaaaaagagtgagttttttcccatcccaaaataaataaataaataatttttttcaagaccagaaaacgcttcagtctctctgacgccagggtgcgcaggcgaccccattggtcatggccgccaaccgcccctttgtgtcgcctttggctgggacttcgcaggccgacgtgattgttttttttctcaacattaaatttcagcccaatgtgcagcaccgggtgaaatttgcgcaagatgagctcgtgtactatgtgccggcaggctgaacgaattgtctgagggctaaagagagttagaataggatgatttaattttttaaatcgatctttttatttttaataatttttacatttaacttttgtaaagtttaataaatgaatatttggaaataaaaatagtatcaaatgtatttgaacagaaataatttctgtaatcggaatttgctagaggaatgagatttttgatttgtttgagagtccatttggatgattgatgagaatttttgaatttgttttccgttattaatggaataattaattatatgcgccccaaaatgtcggtgaatataaaggaaaattcgccagatgcgcaaattggggtcaagaacacacattaattgttttgatcaaatttgattataaataaggaaattgtacgagcgagattcattcattcattaatacataaaatatttattattattatttctgttttcttaaatatttcacaaatgtctcaacaatgtaatttaatttaatatttttattattcatctaaaaatccgttccctttagccatgaactcatcggactgtcgctcaccgactcccgacatggagctaaacgaattatcgtcctggtacgacattctgcaggatgatgaggacaatgtaaaaatgttttttcatttttcattttcaaaaattattattccagattttaaattggttcacaccggtgacggctcgcgacgtttgccaggaggtgttagcaattgcacaagagcgctgcatgccgtttgaaaagattgttaaatggaagcaaattttggacaaaatttgtgctcagatcgcccaaaaaaaagtgatcattttgtgaggaattcattttaaacgtatgcgcttttttcacactgttaaaataaaagttcattttaaatttatgtgagaattatatcgaattgttggggcggtgggggggggggttcagtgttgaatgtggtacgggactcagtactgaatgcccaatcagcgatgcactcacacggggctctgttaagagtgcccattcttttcaaaattccgtttgcgcaatttgaaacttaaaatgggccgggtttcacagacggctggctgtatataagcagctgatcaatctgacgtcctccatttcattctcaaaaattttttcccaaataaaaatggcaattaatatttgcgacaagaaagcgcttgtgaatcaaatcctcgggcaagcggacattacagtgacaacaagcggcataaccgtgagtgggccacgtctgtccacaccacggtttattccgttcgatgaatgcggccgttgccgcgcatgtaaagcaacagaggttgagatggacacaatggtgaccaaagaggggatcacattgtggtgcagccgggtcagcaagtcccaattcgtcccatttgatgccgtttatgatctacctggtcactgcttcttccgtgtgaaaaacaaggccagggtgttcaacgtgccctacggtgacttgccctccgacacgtgcaccactcccaccactacaacacaaggaacgcaaaccaatatgcagcaggacctgaagcgcaaagctaaggtagcacttgatttagtggaagccgggctaatggccgataccatgcaggacggcgtgcgttggaagaaggccaaaaccgcattcagtgtactcgggaacctacttttagcggaatcgttggacaacaaagtgacaaacagtcctgtggaggaacagaattatgtccaggaagagcccagacgagacgaagaggaaaacaaggaggaccttggcgacattgacaaaacgcttgacgagttttttgctagtattaaagcttcgacctcaaacatgtaaatcattttgtccccaaaaaatgcttaatacacaatcctttaccaataaagatatttgtttcaaactgccatttggcctaatcatttcgggtccctcctcatcgggaaaaactgaatttttgttaaaatttattgctgaatcggaccaactaatcacaccaaagcccgtctcaatgctctattgttttggtgaaatgaattcgacagtgccgccgcttcaaaaggcgggagtcgatgtgtattcgggagtcccaccgtttgagcggaaaatcaaagtggcccgcctgtccgctcagtacctggtgctgatgcgggcccctaattccctgttgtccattcgcaacattggtatccaactctttccgcgtcagctcgactttttccttgatgcttaccgcaaagcgaccgcccgtccctatggctatttgatgattgatatgcacgctgcatcagatccatcgttacggctgcgaaccaacatatttaaggacgagcagcagggtgaagacgaaggaacagttgtattcattcccaaaaatggagcggcataaacagcaaccagtaaagattggagagctgataaaagagaatcgcggttggctctgtgccttggtcaggacaaaatccggaaaaaaatgcaggaaacttatacgaaatgcaaacactgaacaactactatcgctggtcgaaatcgactagccagagtatgataattttttttatttgacagatcgattcactcccaatgcaatattctgatcgctttgtacgcttttttgccatttttctccaaatcggattttgtgtcaaaattgtcattttcatttttggcataaattttataactctcgggacatgcttttggatacaattcatcagccgctcagcttgtgtgatggccataatattgcaattgtgcatcggagtggaacgattaatggccgtttcatttccaatttggtaattttacagcggtcaaattttggcacagaaaaaatgtcgatatttatcgcattttcaggtacaatatgagcggaaagtatttagttttcaaagtgctggtcattatctctacaattaaagtgattgttgataaatgcgtggattattacggcagttccaagcattgggaaaagttgggcaattcggcaaatgacccattttactttaattgatgtttcttttttcacagattagtcagatgcgaactttccgacccggcaaatcaatccgaaatcattggttacacagtttataacatactgattattgaggttgctgaatttttgtgctacgcaatgctttggctgatcagttggtggaatcagtgtcagtgaatgatcatattaattcataggcacaaaaaataaagccgcttggaaaattaccgtttagattttaacaaaaaatgatttttgttgattctttggcaaaatcttacccaaaaatacaaaaaaaatctaaaattttatataaattttttaatggaatttctcaaaaacctctgcattattaatatataaaaagtcccagaataattatgacaaattcatttaccaaattgacatttagctttaacggacgtacaaagcaaacggttgcttcgttcagtcagtttaattatgtccatcaatctcatctttcatatcggagtttgtttatttgaatttcctcaatattataagcagggaacggatttatatgtttttacatattttttgcgcatatgtcatcgcatgaaaagctcaaaactagcatttttacctgttttcatagcaatcaagttagctaaacatattttgggctttttgctcataaaaacaattttgggtttttgatagtttttatcatatattttggcgatttttttttaattttgattttttttcacttttatggcaaaatttgaattttctcgaaaatctggaaaaataagtcaatcttagaaagcgaaaagaagttttcaccaaaagcattgaaatgattttgtttgcatttatgctagcgaaataataaaaaaattgagacttatctgagaaatcacttatttttgagcatttttttattcaatttttagcacatattttggccttttttgggctttttagcacatattttggagtttttcagcacatataaatccgttacctgattataatatttttaattatttcattgtttttaagacagctttttgcttccaatttgtctttgggtggttcaatttgagtgcatttactctttcgcacattgctcgtcccgttgcttatgccttttttgtggtgggccattgcagcagtgcgccggttcttttcattaccaggtccaaattgtatttaaaaatttatttaaattttagtttggcaaataaattagctaatttaattgcctacagttctgtgtaccgacaagcataccaatccgtgctttggccaaattataaccacttgacacctgtacagaatttgcagcgtcaaccaaacataacgaacaatgttcgcaccatatgaatcctcgacaattgccaaatcaaattgaatgaatgtgtgtgtgtgtgttaagtgataaaagccactatgctttaatctcataattaagccgaggatttgtaggggcaaaaaatcccaaaaaggggagaaataggagcgcaaatgttggactaaaaatgttaggtgtaaaattaaaaaaaccatgtttttatgaaaataaattgaaaagtgcttgctattgatttttatagaagtagaaaatcagaattattacaaaaatcaaaaataacaacaaaaaaattgtatgcagatatcttaatgaaaaatggtccgcgatacagtttcttattgaatatggcatatgatataatgaggaataattcaatagacatgtttaaattcatcgccctcccctttcctcattagggatgtgtcaaaactttccaggaagtcgagtccgagaaaaataattcgaattctgtatccaacccaggcttcaattaacgaatcctaaccatgtaattttataaaaaagcaaattgattattcaatgagtgccatgtcaactactattagcacaaggaaaaaattaattttattattaatttaattggattcaatgaaaaaaacattggaacaaattccatggatttcatatttaatttaatctgaaaatttgctatattcgaatagatatttttatttggttacctttttaattgatattgaaaatagtaataaggaaaatagaaaacaaaaataaataaatttagcgacaaaaaatatttaaaaatatgacaatttgaacaagatttaaattaatattactatagtgaagctaaattattatttatttttaatattgctatctattttttaaaataatctcaaatataattaacctaaatcaattttcatttttgttagtcattaaaattgttgttgttgata

SEQ ID NO: 27 - DNA, 9888 bp, Heterodera glycines
gaaatgggcccaaaaagtatgcaatttttagccagtttttccggaaaaactgacaagaccttggagttcggtcaagaaacaaaaaaaatccaaaaaagtccaacttaaaatcctatcgaggccgatttttcatttaggcctttaaaaaatttttgaatccaaaaaacagcaaaaaaaatttttaaaaagtgacttttcggcgcctggcactcagttggccctcggatcggaaaatctatagttttcctgaatgcgccgtcaaaagttacccccaaggtcgaaatttcgaatccctcccggcaaaccgtaaggagattttgtttttggaaacgaaactccttgtttctttagtagtatataaactagggtggacagtcggcttctggtgctgaggggaaagcgcttcgcgctcagggacgcggctgcgccgcgtctctagggttcgcaccgccgtttgtttgttggatatggctgttttttgttccgcatctccgacatcttcgcttacagcagcagctgctgcagttgcaaacgacagacgtacagggacccgccacgtgaagccgcacggtggcaaaaacagcgaaaaaccatgggtccccttttttattttatacagaaaaaggcaaaaaaggtttacaattatgatgacatattaaatgattaagatcacaaaataaagagagttaaaattaagtataattaatgaaagacttaataaaatatatttacaataagaccaaaacgaaatattaaaccaacctaacgataagcgttcaggtcatgattaactatttcgtactggcgaacaaagaaaatagggggcaaaacaataaataattcctaaatatcattcaaaataaatcaacaaaattggttggcatccatcctccatgcataaaattcaaaatcattcgtctttttattttcacaataacataacttcagtcaaatcggattccgtcggctacaatattacgcaccaaaacatttccgtctgcatcaactggcttattcggggcatacacccgaatggaatcagagcttgtagctcgtgaaaaagcagtgtatgtctgaccgtgggcaaatgcctcttcggtgaagtcgatgcccagccgctcgcatgtttgtccttgggccttagtcacagtcattgtgaaagccacccgaacggggaactggaatctttcgaagttaactccgtttggctgtttgtctttgtaagttgctgcaacttttggtattgctacttcaattccactttgagctgttgcaccagttattgcttcggcaacaatcaaataatcggtcaattttttgacaatcaatcgagtaccattgcacagtgatttggccgtgtttaaatttatcaacaacacaattatcgagccaacttttagccgaagatgatgcgccggaatgccagcagggttcagcaaattgaggtgtgcaacatcctggtcagcagcattaagtgccattgggttcgcgtcaattggtctgtcatcagagaagtagtcggtgtaatcggaattgatatttctcaatatggcatcattattcatgtccacaattcggttggttgttgccagcattaatcgcttcagcatttcatttgctggctgtaaaaagccttgatcaaatacagaagaaacgacttcgtcgcgtgaataaaccacccactcctttggaattggcactgtgtcaccgaatgcacctgtaccaaccttcttcaaccattcaatgaattcaatgtcctgagaattaacacgcatgttctgtacgagccttatctttgtgaagagctggtagagcggtgaagattgaatacatgctgcgacttgaggttcagtgccatatgcttcagtaacaactggcagcgactgtttccaatcacccgaaagtataacaacttttcctgcaaagggaagttggccgaagcgaggaaccatttgcctgcacaacaaatccacattttccaagacagttttttccaacatcgtgatttcatcaataataatgacctcagcttcgataattctgcgtccgaaatagctttccattggtattgagggaatttttccggcttcaacctgaatgccaaggcgaaaagcagaatgcactgttgtgccacctgcgtaaaagcgtgtggaggccatgcctgttgaggcggtggcaatcacttttttaccaattctgcgcaattgatacaatagataattgagaaggaaagtttttccggtgcctccgtcaccagacaaaaagaatagacggttttctgcagtggttggtcgagttgaggcgatctttctgaccatttggaaaaatttctcctgctcgggattcattcttgccgaatcaaactgtcgtgtatcaactgtttcgtcaacgtcatcatcagccagatggcctgggaaaaagaaatcgttcacaccacgtgttgggtcgttgacaattgagttcataggcgccggaagtccaaaatcttcacaagtttttccttgtctaaccaaaagtcgttcaagaagggcgagtgcctgatcaattcgaattggtcgttctgcatcactacaacgtatatcgtacatatgcggcaaaaattggttccaaagtgccaatgcatcaatgagacaatcttccgtgttgccaaaaagaagaatactggcgaacaactggcgcatttgggctggattgagataattggctccttcctgtagggttcgtatccatacatttgaatccttgatgagaccacgaagtcgggctgcttccaggaagctttcgcattgatgtccattaaccaatttcaaatgctcagggtcaccagcaaaatgcttggtgagaatgaataatgcgaacttctcatgagaacgtggcagaattggataaatccgtcccaatatttgttttcgttgggcatttcgtattcttggcttccaaacttttttctgtttgtcgaaataatatttttcaggcatattttcaaataaaatgttcttcaacgcagggtcattacgccattgttgccaatacgcagagaggggagtgaccggaagctccatttgtcctgccagaatttgctgtgcgagctcctgtgcgttttgtcccggccgtaaatacattttttgctgtccgggaagatgaattgaaagtgccatgacagtgtgtgacatgaatgtgtatctgtatgacataatccttgaaaaagcctcaactggggatctgtacaatactctcgcgtaggatgctggctcatcaatgttcgttttgttggtatgttcacttcttatatatgaataagatggtcccttgagcggatatttaagtggatacttcatatttgttgattttccatatgcgaactccaagttgtgatgtgtctcgtatagaaccaaaatgaatggattgtaaggaataactcgtgaattatcataagttatttcggaaagcccccgctttacagtcagtgtttcgcctccgtccgttggttgtagtcgtttatagactgcgggcttgtcatcaaaaaggattgtgaatttgctgaatggttttgggaagccttttgagcagcgtccacgagcgttttggcaatgaattccacaatcatggaattgatactttggcagaaggttcctcactttgcgaataaagttcgcccatgaagattggtcttgtgcattaggttcagcaggaatatgagcccaaatcaaattttccacgcattccgggatggccaaaatatccgattgaaaaagtcgatgtaaatgtggtcctccaattcttttctgaaattctcgcccctcaccatatccaatctgtgttccaaggatttttttatcctccaaaaggtggtgtaaatgccttcgtttgtcttcatagacccggcacagaatgtcaaagcggtctaccattttttggtcagcacgcatgaagttccgcttgatttcaggccaccgtgggttacaagtccacgtgagcatgaagcaagctcgatcaggtttcctgatgcgtgccattatagtggtagcatcatagtatttgttttggaagtaggcaagtgtgcctggttgtgtttttcggaacaaaacaattgaaccaatttcttctggcgaggtgagacctgcattgcgcgcgaaccatcgaagcaagtgttctggcatggtgccacgaaggtcaaattcaggacgacgaagatactcggcaacatctgcatcaattctggcagcataatccaacacaattttttggctgagtccaccggcgacgatccaaatgtgatgatacgtttcgtcaaccctgattgccaatcgatatcgaacatattctcttaaagacatttttctgaaaggccttacttctccatcgctttcgtgcgaagccaagctggtccggtctgactggctttctgtgtcgtttgttgattcataattagattcaacatcaacatcaatatccaatattgtttctccttctctttgttcgttgtgccgttcctcgatatgcaaagtgcttttatacagttttttgtgatatccgtcgtctccacttggaaaaaccaatggataacacagtgtgtcagttgacggatgatatggtggaaattgctgaagttggccttgttctgtagtgatccaaatgcctctttccattggtgggcggtccgattctgtccatacagcaaataatgtaccttcagttggaagattggtctgtcgtgggtgcagatttggatcccgtattccagttggtgccattcgtgcttcaagaagtgtgagacggaagttatgtacggcatccgggccaccctctgcaagctttgattgatattgttgatgaaaattcatgagttgatttgccagtggatggtgttgacgtagtattgcatccaattttttcagagtgtttgggtttacacgatcgccaccatatcgtgtgttcttttttcggtgctccagtgcctgttcagggtctaacacaaataattgcgcgaaatttggtgccatttgtccagaaaaaagcgaactgatccggcggacaaacatcccattcagcatgaaacacacatcgccacccacagagttttctttgtatccaacagaaacagacgcaaacgcaagcaatgaattgtaggcattttgattcttccgaaattctttagcttctgctgagttttcagttgaaagagcatataattcagcaggcaaatcgctaagttttggcaagcagatttttccaaaattgcagcaaattgctgaagaagtcttgccatgttttgctgtggcttcactgttgaagagcttcgccttgcaaaaagcgcatattttatcaccaatatttccagagtcataatatggttgataatggttggctcgaatatcggcacacggaattcccttgtgtcttacatgacaacggcgagttaattgattgattgatatggttgtagattcgtcaacaatagaagattctcggcttgattgatggctcgcaatacgtgaagaacgtcgggatgatgaaacggaattggttgatggctcccggctattaaaatgagtttccatgatgggcgtagaacatctttgatgtggtatttgtgcacctcgtaagaaaatatttctttgtccaagattttgttgtccatttgtattcctcggaaaatattcaactgtgtctgatagaagtaattttgcgagttgtgaaataattctttttctctcagtattgatgtcaaggttgggcaaaaaaaggcagcggttgttcatcaaataagattcagcgtacaaaattgtaaaaaaaccacaattaattccatctaactggtatgtgtattgatttggcggaagaatttgaatttcaaaggcagatggttcgagaccttgagtcaattgacaaataatttggttcaggagaatgattcggttttggtcaaatcccggaaatctgctatcattaagacggttgttaaaatcagcggtcaagtttcgagtaggcggcaatgaatcaatgaaccaacaacgtaattcttctctgttggagcggtcaaatatcatgagcgtaaaatgtccaggaaaaacgacaggcacgagcaggacatcatagtctactgagtggttgtagcagtgatcattaagttccaaatggattgctccagggccgtagtgtacgtttgggtcggtgtaagatggcgcaacaactgcaacacgtttgtcattattaatacttgccagataacgcatgtaggcgtaaatgacacggtcatcgcacatctcgttttgattattccacaaatttaataactcatttcggcttgcaaataactctggttgcgcaacatgtccatcacttgacataagtggtccttcttcgatcattagtggttcagaattcgactcagtgtgaggcatctcttcatttggtggtaaagcttgtagattagaaacaggtgctggtgtattatgacacgaagatgagctgctgcgatgcccacgacccgggcccgcaattcgtgttcgtttttttggtcttcctctgtttctttttggcgtttcagagcaagaatttgtatgaattaaagtcgagttcgatgaaggtgttgcggttgcattgtacaaacgttttcttgggcgcactattggtgatgctgatgataactgcgaaaatgttgacaagcatgattgtggagtcgatatggctaatatagacatctgattgatcggagtagtttcagcagcgaaatcattccttccacgtcgagcggctctctcttttttcttctttgacggcattgcaattcaattgtaatacctaaatgggaagggaaacattaatatattgtccataaaatattaaattatttatgctgcgcgttgatggcacgcaataataaataattggaacccttgagttatcgtagcgtttaccacaacctgaaaggtgtgtttcggcccatcaagccgtatacacggtttgataatttattctatgagcgggcctcgtcagtacggcactcatagatttattggagcgatttgaatttatcagtctttaaagccactggttattcctcaatgtcacttcatttcattttcacttcactcaatggcacttcacttcatggaatggcactttacttaacttaatggcacttcacttcactcaatggcacttcacttcactaaatggcacttcatttcactcaatggcacttcatttcactcaatggcactcaattacagcgaatggcacttcatttcactcaatggcactcaattacagcgaatggcacttcacttcactcaatggcactcaattacagcgaatggcacttcacttcactcaatggcacttcacttcactcaatggcacttcatttcagtcaatggcacttagttcactcaatggcacttcatttcactcaatggcacttcatttctgtcaatggcacttcacttcactcaatggcacttcacttcactcaatggcacttcatttctgtcaatggcacttcacttcactcaatggcactcaatttcagcgagtggcactttacttcactcaatgacacttcatttctgtcaatggcacttcacttcatggaatggcacttcacttcactcaatggcacttcacttcactaaatggcacttcatttcactcaatggcactcatttacagcgaatggcacttcacttcactcaatggcactcaattacagcgaatggcacttcacttcactcaatggcacttcacttcactcaatggcactcaattacagcgaatggcacttcacttcactcaatggcacttcatttcagtcaatggcacttcacttcactcaatggcacttcatttcactcaatggcacttcatttctgtcaatggcacttcacttcactcaatggcacttcacttcactcaatggcacttcatttctgtcaatggcacttcacttcactcaatggcactcaatttcagcgagtggcactttacttcactcaatgacacttcatttctgtcaatggcacttcacttcatggaatggcactcaattacagcgaatggcacttcatttcactcaatggcactcaattacagcgaatggcacttcacttcactcaatggcactcaattacagcgaatggcacttcatttctgtcaatggcacttcacttcactcaatggcactcaattttagcgagtggcactttacttcactcaatagcacttcatttctgtcaatggcacttcacttcactcaatggcactcaatttcagcgagtggcactttacttcactcaatggcacttcatttctgtcaatggcacttcatttcactcaatggcactcaattacagcgaatggcacttcacttcactcaatgacacttcatttcagtcagtggcacttcacttcactcaatggcacttcatttccctcaatggcacttcatttctgtcaatggtacttcacttcactcaatggcacttcacttcactcaatggcccttcatttggggcaatccctcttcacgacggggaacggtgtaaaagaggggggggggaatcgccgacgaaggggaaaagagggaaatttctgaaaaatttgcctattttattaagaaaattcattaaaattcttttcatggacggacaccccttcgcaaaaatttcagtttacccacccgcccccttttcatgtatgctcttgctggtcctgccaaaattgctgggaaagtatgtagatactatcgtcatgtccgtactttatacaaaagtaaggcctttgctgctcaccgaatgatagtatgacggaagaagactccgttcaaatgatccaaattttcgtcgttttcccattgaagcgccgccgtctcctcaattattggacaccgtttcatcagaaaatcacagatttcatcaccgcactctttctccttcgtcagtgtcagcttctcattcgtccgttcgttcaccaattcaaatggaattggccttgttttcttataaaaagtaattcgcatattgtaactgaccgaagtggtggcacggagaaatgcctaaacacaaaaattggtaaaacaaaaacaaagtgtttagtctcgaaatccttgtcgataaaagcacaaattgtgagagaaaatgtgtcgaccacctgcttgtgattgtggaaccaattgtttattttcataaaagcaaaatgcgagcaacgcaattccttcggttgaccattttttgtcggagttcgtaaccatttggccaacgcttgaccagcagttgaattcggagcattttcatcggggaatagataaccagaatcgattgaattcaattgatcaagatcggagagaagggtctcttgagcgtgttaatgcatggtgtatttttgtgcgccaatctaagtgattttcatctatgagttaacaaaaatctgcaggtggtacgaacaaaaatttgaaaatatttaacaaaattaataaaatttaaatttttaataattttaacataaaaattatcattttctcattacgcactatttgctgaggtgtacagccttgttagcgtgatcaaattcctcgctgaacaagcagctttccccatgggtgtgagtcaccgcagcttgacgacgtccaaaacagtcggttacggaaggattgtgcgcgtacaacgttacggtatgcgtcactgagtgtccaactctcgcgctcgtcccttaccgtaccgttgatcagatcgcgacctgtcatcataatttatgtttgtacttaatatgctaggatatggtaatttcagttactggtattccctttttgaaacctatatttgataaagaaccctgaaaaatacaaaaaatttttattggaaaaagtttttgaaattattttttaaaaaa

SEQ ID NO: 28 - DNA, 8098 bp, Heterodera glycines
actcaattacagcgaatggcacttcacttcactcaatggcactcaattacagcgaatggcacttcatttctgtcaatggcacttcacttcactcaatggcactcaattttagcgagtggcactttacttcactcaatagcacttcatttctgtcaatggcacttcacttcactcaatggcactcaatttcagcgagtggcactttacttcactcaatggcacttcatttctgtcaatggcacttcatttcactcaatggcactcaattacagcgaatggcacttcacttcactcaatgacacttcatttcagtcagtggcacttcacttcactcaatggcacttcatttcactcaatggcacttcatttctgtcaatggtacttcacttcactcaatggcacttcacttcactcaatggcacttcatttctgtcaatggcacttcacttcactcaatggcactcaatgtcagcgagtggcactttacttcactcaatggcacttcatttctgtcaatggcacttcacttcatggaatggcacttcacttcactcaatggcacttcatttctgtcaatggcacttcacttcactcaatggcacttcacttcactcaatggcacttcatttctgtcaatggcacttcttcactcaatggcactcaatttcagcgagtggcactttacttcactcaatgacacttcatttctgtcaatggcacttcacttcatggaatggcacttcacttcactcaatggcacttcacttcactaaatggcacttcatttcactcaatggcacttcatttcactcaatggcactcaattacagcgaatggcacttcatttcactcaatggcactcaattacagcgaatggcacttcacttcactcaatggcactcaattacagcgaatggcacttcatttctgtcaatggcacttcacttcactcaatggcactcaattttagcgagtggcactttacttcactcaatagcacttcatttctgtcaatggcacttcacttcactcaatggcactcaatttcagcgagtggcactttacttcactcaatggcacttcatttctgtcaatggcacttcacttcatggaatggcacttcacttcactcaattgcacttcatttctgtcaatggcacttcacttcactcaatggcacttcacttcactcaatggcacttcatttctgtcaatgcacttcacttcactcaatggcacttcatttctgtcaatggcacttcatttcactcaatggcactcaattacagcgaatggcacttcacttcgctcaatggcacttcatttcagtcaatggcacttcacttcactcaatgtcacttcatttcactcaatggcacttcatctctgtcaatggcacttcacttcactcaatggcactcaatttcagcgagtggcactttacttcactcaatggcacttcatttctgtcaatggcacttcacttcactcaatgacacttcatttctgtcaatggcacttcacttcatggaatggcacttcacttcactcaatgtcacttcacttcactaaatggcactttatttcactcaatggcactaatttacagcgaatggcacttcacttcactcaatggcactcaattacagcgaatggcacttcacttcactcaatggaacttcgcttcatggaatggcacttcacttcactcaatggcacttcacttcactcaatggcactcaattacagcgaatggcacttcatttcactcaattcacttcactcaatggcacttcatttctgtcaatggcacttcatttcactcaatggcactcaattacagcgaatggcacttcacttcactcaatgacacttcatttcagtcaatggcacttcacttcactcaatggcacttcatttcactcaatggcacttcatttctgtcaatggcacttcacttcactcaatggcacttcacttcactcaatggcacttcatttctgtcaatggtacttcacttcactcaatggcactcaatttcagcgagtggcacttcacttcactcaatggcacttcatttcactcaatggcacttcatttctgtcaatggcacttcacttcactcaatggcacttcacttcactcaatggcacttcatttctgtcaatggtacttcacttcactcaatggcactcaatgtcagcgagtggcactttacttcactcaatggcacttcatttctgtcaatggcacttcacttcatggaatggcacttcacttcactcaatggcacttcacttcacttaatggcacttacatttcactcaatggcacttcattttcatctaattatttacaaaagttaaacacttatgccatttattttacgaaccacatccctttgtaaaaaagggttcgcaatccgtgccaatggcaccgggattcccagcacacaccgcgaggaggtttgtggtggaaaatggacgaaaaccatgtgcaccaaaaaaaaatcgggcatgacccctctcctagccgatggtttgggccatttttggagggccaaaaacacgctagggcgccccctttacgcattttctacccgccgacccaaggccaacggatgggagggcatgcccgccacctgtgaccatcatagcaagcgattatggaaccgctcatggaactcaaagtgtgtggcactaccatcccaaagtgcaaggtttggtgtaggcctccctatgttgggtaattactcccttcataaggcacttgtgccaacgcccacagcacatatgagttccgtcaacgcggattttaatccggggtgttaagtttgagcagctgcgcgttcgacactgctcagtgactcacggtcctccgggccagccagtcccggttattctctcgctgtacgaatgcagcccgaaggcaggacacattacggctaggaaccgccacccccgctgctaggtgcaagctcaccttcaccccaaagcgcagggatgaagggccaccgtccacaccagaccgactatctggctggtccttcagatcgctgtgacacccggcgggctcaggaaggaacttggttccatccgtccaggccgcagccctggataccagcgcaaaaggaccagtggaaagcgaacgcccacgcccacccaactgggaagaaaacccagtaccaggcaggactccacggttttcatggatggcccccagggtattcgaaaaagcgtatcaaacatcctataggggtttactaccgcgtcaaccaaatatgcaaatgtttcggcccttcaaagccgtagacacggtttgaatttcaaaaaaatacgagcgggcctcgtcagtacggcactcgtattttattttttttgttgctaagctcaccagtcagcctttggcgtcaccccggattgttgctccctaatggtcaaaatgtttttgaaaaaaaaaaaaaaaatttaaatgtttaaatatttgttcattaaaaaggaaaaaaacaattttagggagtaaaaacatttttgttcggaaatgaaatgaaaaagagatgtttggggggacaaaaatatttgttgttcggaaattaaatgaaaaagtgatgtttggggggacaaaaatatttgttgttcggaaattaaatgaaaaagtgatgtttggggggacaaaaatatttgttgttcggaatgcggaaagaacaaatgaataatatgtgcaaaaacatttaattatataggcataaacaggaaaaaacggcccacgtaatgtctgaacatttgtttttgcaaggaaacaaatggaaaaacacaaatgcgcatgtttaaacatttgtttatgcaaagaaacaaatggaaaaacacaaatgcgtatgtttaaacatttgtttatgcaaagaaacaaatggaaaaacacaaatgcgcatgtttaaacatttgtttatgcaaagaaacaaatggaaaaacacaaatgcgcatgtttaaacatttgtttatgcaaagaaacaaatggaaaaacacaaatgcgcatgtttaaacatttgtttatgcaaagaaacaaatggaaaacacaaatgcgcatgtttaaacatttgtttatgcaaagaaacaaatggaaaaacacaaatgcgcatgtttaaacatttgtttatgcaaagaaacaaatggagaaacacaatgcgcatatgtgttcacagtttgaatagataacgatacatagttggctgttttttttggtttggtaaaaccaaacattgttttgataattttagtaaaaaccaatttgttttttattgtatgttcaatttaaatattaattttttttattgttttttatatatttttatttgttttgttattttaaaaaatttatttaatatattattattctttctgagtgaatctttgcaattaatttggttctggtaattaaacaaatattttcattaaatggttaaaaatttacaaatttttttttggtaaaattcaattggattttatgacaagaaatttcgatttttgttaataaaatacaattattttaaatattattatttttttgaattcatttaaacatttttaaagataaaatttgctaattataacattggcagaatgtaatttttgcgtcttcgaaactgtctatcagaatcccgagaagcagggattctgactccttacgatgccttggttgtaaattaattaaattcgtgttgaaatttaacaatcaatgcattaaagaattattttttggtctttaagttaatttttttatgtaggcacagatagccttaaaatgatttgaatttgttttaaaaaaacaaacttggaaaattaattacaatttgttacgaataaaatttatctgtttttggtgggccatttttgaggatttttcaaaaaattagataaatcagcaaaactttctcaaaaaaatcactacaaatcagcttctcaaaaaataatcatgcatacccctttaaaatcagcaaaaagatgacaaatcagcatatttgtttagtttgtgttttttctttctttctatgttttgtccattttattttgatgggttggaatagcatatcttgagatttctcttaatttgaccttttggctatttctaaaaatcagttaccaaatctcaaaaataagttccggcaagctgtcggtttccacaatcttaaggcatttcaggattataatcacaaaaactcaaaaagtaaaaaatattttatattcttctgggtttttacgacaaaataaattttaaaaattcatttttttgtgaaataaaatggtttttattaaattaataaactaagctttttgttggttaacatcaagattttgctaagtgatcatgaattttggtaataaaatataaatttttttcttgttaaatggttaaaaaaaacgatttttggtgactaaaaaatgatggttattgctaaagcatcaaaatttttgttgtttatttgttaattttctttattggataaatatttgtaatgtaattgtttgtattttgtgtaattttatcaaaattatacattttcataccaaaagaaaatattgttttgatcagggatgtgtcgtaatgtgatttcctattaccgtttttctatttgaataaaactcaaaattgtttagtgattaataaatgaattaaacatattttttataaagtgttataaaataatgcttaataaattcattcataattattgaccgggtttttgggttttttatgagagaagctgaattactttaaaaatttattatttattttcttaacaatttgtcattgtgtgcgcgaaattgatcaaaaaatgagtcactttttaaattttttgtgcataaatatactcaatttttccaacctattttgcactttttttagcattattttagcgtggctgttaatttcgaaactgggtaaattcgacactgagaattttcgacactaagtaatttcgacactacattttcgatacagagaaattttgacactgagccaatagcctaattttgggcgctaattcaaaaaatatactggtcagtgatcactgtcttttttgcattggttgttttgctcatccataactcgcagcatccccaactaaacagaacaaaatttgtttttttttgaaaagaagcgagtgcaaaactatttgaaatctaaaaaagttgtaagaatttgaatctatttttgtagacacattttgtcctcatcaatcatttacgcgaaaatgcactattgtatgttttatacaagccgtgcgcaacaatttcaaccatgttccatagtgaatagatgccacctttgtcggaaaagataatgcataaacctttttggttgcatactgaattataccaaattaaaaaattaggtatttgtactgttgctcttcctaggcaatacggcgtatgtttagaatatttttattagctttagttcaaacgtttagaatgagatggagtttagttttaaattacgaattggtaaatgaaatagagaaaatttatcataaaaactaacatttttgaattttaatattattttttaaaaattttgatagtgtcgaatttactcaatttcgaaataaatagagtgcttattaaatgaacagataaaagaatcgatttggttttataaaaggatttttatagtaaaatgcaaatgtttttcattaaatggttaactttttttaattaaatagtcaaaatttatgatttttaatcgtctcatttttgtgcatatggagatttacaggttcaaaggggaggtttatttaatggtaaatcctaatctttcatagaaaatcaattaaaatttgtaaatgatcagaaaaacgattaaaataagggttttgttttaccattaaaatgaaattttttttaaaaattaaaaaaaaatgtttatatgagggatgtgtcagaatagcgattttctaatgtgtaagtatttcagaagtatgtttttaattatttttgataccaacaatcagttgtattttttcaccttttacagtacttaatttattttgatttattaaattgttttttttaaattaaaatttattttgaaaattaatagcaataatgtaatttttttatttaattaattcaacgaaaataagttaatttataattaaataatgcacaacaattaaaaacacgtataaaaagcgcttcgcgcccgttgtttaattttactggctacagtcgggcgctatgagtaatttattaattattaaaaaaacaaaaggaaattttaattaattaataacatcgaaaaaactaaaaaataaattacaaaataataaacacggcccggatccgaatctgccgccccacccctcagaatccccaatcacacggggattctgaggtcttagccatgtctaaagtaaaatctgattacatattcgtgatcagcggcccaaataacccctaaaatcatatttttggaagttttttggtgaaaaaaattttccactcaaaaatcatggtcacacccctgtggtcccaaattccaaaatcacttttatttctataacttttttccaaaaagtgataaaaagctaaaataaaatttataaaatagagcaaaaaattgcggattttttgagtatattatttttataaaatactttttcagaagggagttaggaatttttttctgaaaaatcgaaaatttccagattttctggaataatttttttaatttgaaagatataaatccccaataaatcccataaaattttcccaatttttctctatttttaaagctttattctactaaatttaaccaaaagcgaagtgagttatgaattttcaaaatttcactggattttccggggcccaaattgtgacgatttttcaaaaatttttaaccaccttccaaaaagtctgaaacccaaaataaagtatatattcgtgttcagcaccataaattaggccataaaaatgcattttggctaatttaggagcaaaaaaatttttcataaaatgcaaaaccatggagtcccccctatggtttttaatttcaaaataatatttaatttcataactttttttaagctcatgataaaaat

SEQ ID NO: 29 - DNA, 4114 bp, Heterodera glycines
ggccgcttcgcggcctcaggacgggcgcttcgcgcccgttttttaatttttttggggacattcgaccgcttcgcggcctcaggacgggcgcttcgcgcccgtttattaattttgttgggaacattcggccgctgcgcggcctcagtacgggcgcttcgcgccatttttaattttttggggaaattcggccgcttcgcggcctcaggacgggagcttcgcgcccgttttttaattttgtggggaacattcggccgcttcgcggcctcaggacgggcgcttcgcgcccgtttttaatttttttggaaacattcggccgcttcgcggcctaaggacgggcgctcccacccctaagaatccccaataacactgggattctgaggtcttaaccatgtctaaagtaaaatctgattacatattcgtgatcagcggcccaaataacccctaaaatcatatttttggaagatttttggtgaaaaaaattttccactcaaaaatcatggtcacacccctgtggtcccaaattccaaaatcacttttatttctataacttttttccaaaaagtgataaaaagctaaaataaaatttataaaatagagcaaaaaattgcggattttttgagtatattatttttataaaatactttttcagaagggagttaggaatttttttctgaaaaatcgaaaatttccagattttctggaataatttttttaatttgaaagatataaatccccaataaatcccataaaattttcccaatttttctctatttttaaagctttattctactaaatttaaccaaaagcgaagtgagttatgaattttcaaaatttcactggattttccggggcccaaattgtgacgatttttcaaaaatttttaaccaccttccaaaaagtctgaaacccaaaataaagtatatattcgtgttcagcaccataaattaggccataaaaatgcattttggctaatttaggagcaaaaaaatttttcataaaatgcaaaaccatggagtcccccctatggtttttaatttcaaaataatatttaatttcataactttttttaagctcatgataaaaatatgggataaggcataatagatagagtttaaaattctctacaaaaaagttcttggaagatttttcgctaaaatcaacccctgcatagttataagtcataaactgaaataggcgccaaatttcggaaaattttctatttccaaaaaaattttgaaaaatttttctgaaaatgccaccaatcgatagagcatgaaaaacgattgcttgaaagtggtcttggttttcccgagaaaaatctgcaaaaaataataaaattcaaaaacggaaaattttcgagggggcctagctcgaaaatttctgaaaattttcaaaatccgaaaacatggatggatgcagctcgtcgagctgcacaaaaaagtaattatcaccatcccgctcagatcaaaacacagcgagttattcgcgaaattcaaaaaatgccaaaattggttttcaaaattcgccgaagtgtacaggccaggcctttgatgctagggcctcgcccaagaagaaaaaaatttcccaaacattccaacttagggccctctcagcagacatttttggctccggcttccctgaaaaaagttttggcccaaaaactgcatgcatttttccccaaaaagccatttcagcgccgctggcgctcagttggcctccggaccggaatgccattatttttcctggatgcgcctcaaaaagttgcttaagcaatgtcaacatttcaggtccccccgattagccgttcccgagattttagttttagcaatgaaactcgatgttgctttagttatatataaactagcgtgtggcgcagtaattgctcggtgtagacagtatgcttttggagtatatgggcgggcgctgacatgagcgcttcgcgcaaaggacttcgttgctagtgcatgcgcggttttgaaatgaatttatggatgtgataagggattttggtctacaggcatcgcgaggacgcattcataattttctggaggactttcggccgcttcgcgacctcaaagggtgctccgcgccggtttttaaactttgtggggaacattcggccgcttcgcggcctcagacgggcgcttttgcgtccgtttcttaattttgttgggcttagacgggcgcttcacacccgttttttaatttgttgggatttttcggcagcttcgtggccttgggacgggcgctttgcgcccgttttttaattttgtggggaacattcggccgcttcgcggccgaagaacgggcgcttcgcgcccgtttttagactttttggggccagacgggcgcttcgcgaccgtttctaaattttgttgggcttagacgggcgcttcgcacccatttaaattttgttggggccaaacgggcgcttcgcgcccgttttttaaaatctattcatcaaaaaataatttatataaatacacgaaattctttatttaaaaatagtaattaatttttaaattaaacttttattcatcaaaaaataatttataatttacaaaaggtttttcatttaattaaaaacatttaaaataagccaaaaataaatataaaaataatgtgttaccgtccgggttcgaacttgccctatttaaaaaattctgaattttggcccaaaaaaacagcgatttgaagaggtacaacaaatggtagaagaggtacaaaaatgctttaataattttttaaaattgtaaaataaatgcctatttttattattaaaaaaactttgaagcttataataatttaaatttatttagattgaactgaaattaaattgaatatttatttagtttgaaatgaaattaatttttttgcaaattcaaaaaataaataatgaaaatttttaattaaaaaaaattaatttaaataatttacaaccaaaatattttaaattaattaaaatcattaaaaataacgtaaaatgcacagaaaaataatgttacaccgtccggatccgaacctgccccctcccccctcaaaatgatgcctcagaatccccaatcacacagggattctgaggtcttatcgatgttaaaagtaaaatctgatcacgtattcgtgatcagcgtcataaaatagccctaatgacatgtttttggaggattttgggtgaaaaaatttttccactcaaaaatcatggtcacccctttggtcccgaatctcaaaatcacttttatttttgtaacatctctcaaaaaagagataaaattgccaaataaaatttatattatagagaaaaaaattgcggatttttgtagtattttacttttccagaatatcttttcagaaccgagttatgaatttttttctgaaaattcgaatttttccagaaattctggaataacttttttcttttttgtgaaaaaaaactcaaataaatcccataaaattctccttatttttctctatttttaaagctttattatagttaaatcgatgaaaccatcaccgagttatgaattttcaaatattaggccaaaatcccgagggccaaaaaattgccaaaaaataaagaatttttaaaaaattccaaaaatcatgaaacgaaaaacaaaggtcaaattcgtgctcagcacctcaaaataccccagaaaaaaatttttcaccacccttttcaagcctaaaaaaaatttcgaaaatttctagggggcctagctcgaaaatttttgaaattttccgggcatatagcacaccgttcgatagagcttaaaattctctacaaaaatgttctaagacgatttttggctaaaaccaatccctgacgagttatgggcccaggactcaaatgtcccgctgaggccaaaatttttttctatttccgggaaaaaatcgaaaattttccgaaaaaaataccagtcgatagagctcgaaaaactatgttttggaagtggtcttcgtttttctgggaaaattcgttaaaaaatcctaaaattcaaaaacccgaaaaccgttttttaggcctagctcgaaaatttttgaaaattttcgaaatttttaaaattcagaaaatagagcttccaaaactctacaataagtctgctgggcacctttc

SEQ ID NO: 30 - DNA, 4370 bp, Heterodera glycines
cccgtttttagacttcgtggggccagacgggcgcttcgcgcccgtttctaaattttgttgggaattttcggcagcttcaaacccgttttttaatttgttgggggacattcggccgcttcgcggcctcaggacgggcgcttcgcgcccgtttttagactttttggggccagacgggcgcttcgcgcccgtttctaaattttgttgggcttagacgggctcttcgcacccatttaaattttgttggggccaaacgggcgcttcgcgcccgttttttaattttgtagtaatcattcagccgcttcgcggcctcaggacgggcgcttcgcgcccgtttttaaattttatggtggatattcggccgtttcgcggcctcaggacgggcgcttagcgctctttttaaatttggtgggggacattcggccgcttcgcggccccaggacgggcgcgaagcgcccgttttcaagtacaacagtgattagaagaggtacaaaagcgattagaagagtgattagaagaggttcaacagtgattagatgagtcacacagtgatcagaagaggtacaacagcgattagaagagtgattagaagaggttcaacagtgattagaagtggtacaacagtgattagaagaggtacaacagcgattagaatagtgattagaagaggttcaacagtgattagaagaggtacaactgtgaatagaagaggtacaacagtgattagaagaggtacaacattggtcagaagaggttcaacagtgattagaagaggtacaacagtgattagaagaggtacaacattggtcagaagaggttcaacagtgattagaaaagtacaaaaattgtgaaatggtacaacaatggttaaaaggtaaaataatgattttaaaattaaacaaataagtaaatggtttatgaaaatagaattaaaaaatgtattaataatttttaaaaaattattaaaaaatgctttcttttattaattaaaaataaactttgaatttacaatgattaagtattattgtattgaaataatttttttgacaatttcaaattttaaaaaaacattaaattctttaatttaaaaaaaataattatttttaataaaattttcaccaaaaaataatttaattcaaatgaaaaatttttatttattattaataaaattaaaaatattttaaatgaacaaaaattgaaaaaccgaaaataaatggtagaaaattaatgtacaccgtccggatccgaacctgccccctccccctcaaaatgatgcctcagaatccccaatcacacagggattctgagggcttaacgttgtaataactgaaatctgatgtcagattagtgatcagcggcccaaataacccctaaagacaagtttttggaagatttttgtcgaaaaaattttccactaaaaaatcctatgctcacccctttggtcccgaatctcaaaatcacttttatttttgtaacatctctcaaaaaagagataaaattgccaaataaaatttctataatagagaaaaaaattgcggattttttcattatttaaaatttcaaaaacacctttacagaaccgagttctgaatttttttctggaaaatcgaaaatttccagaatttctggaataactttttttcttttgaatattataaaaccaaataaatctcattaaattctcccgattttttgctatttttaaagctttaattcatttaaattgaccagtcctccattgagttatgaattttcaaatattaggtcaaaatcccgagggccaaaaaattgccaaaaaataaagaatttttaaaaaattccaaaaattctggaactgaaaacaaacaccatattcgtgctcagcacctcaaaatagcccagaaaaatatttttcacccccatttttgacccaaaaaaaaattctgaaaatttctagggggcctagctcgaaaatttttgaaattttccgggcatatagcacaccgttcgatagagcttaaaattctctacaaaaatgttctaagacgatttttggctaaaaccaatccctgacgagttatgggcccgggactcaaatgtcccgctcaggccaaaaaatttttctatttccgggaaaaaatcgaaatttttccgaaaaaaataccagtcgatagagctcgaaaaacggttgcttgaaagtggtctatttgtttgggccagacgggcgcttcgcgcccgtttttaaaatttgtttgggccagacgggcgcttcgcgcccgttttttaaatttgtttgggccagacgggcgcttcgcgcccgttttttaatttggtgatttttaggccgctcgcggcctcgtacgggcgcttcgcgcccgttttttaaatttagttggggccagacgggcgcttcgcgcccgttttttaggggtacaacagtgattagaagaggtgcaacagtgattattaaattcattaaattaaaatgaaaatttttttaacaaatttaattaagaaaatacatgaaatactattaattaaaaaataattaatttaaacttttaaaatttattcatcaaaaaaaaattaatttgaatataattttttatttattaaatcattgaaaataacgtaaaaataaatagaaaaataatgtacaccgtccggatccgaacctgcccccccccctcaaaatgatgcctcagaatccccaatcacacagggattctgaggtcttgacgatgtcaaaagtaaaatctgatcacgtattcgtgatcagcggcccaaataacccctaaagacatgtttttggaagactttgtgtgaaaaaaatttttcactcaaaaatcctaagctcacccctttggtcacgaaccccaaaatcacttttatttttataaaaattcttaaaaaagtgataaaaatgccaaataaaatttatataatagagcaaaaaactgcggatttttgtagtattttacttttcccgaatagcttttcagaaggcagctacgaatttttttctgaaaaatcgaaaatttccagaaattctggaataacttttttcttttttgtgataaaaaactcaaataaatcccataaaattctccttatttttctctattttttatgctttaaatgagctgaattggaccattttgaggcgagttatgaattttcaaagaatcacttaaattcccaaatccaaaaaattgacgatttttcaaaatttttttacctccctccaaaaaatccaaaacgcaatataaagtgcatattcgtgttcagcacctcaaactaccccagaaaagtattttttggcaattttaggagcaaaattatttttcataaaatgcaaaaccatggggtcccccctttggttttgcattttaaaatttatttttattttataactttttttatattaaagataaaaataccggataaagcacatttgatagagcttaaaattctctacaaaaatgctctaagacaaatttccgctaaaatcaacccctgacgagttataggcccgggactgaaatgtcccggtcaggccaaaaaatttttctatttccggaaaattttgaaattttttcaaaaatgccaccaatcgatagagctcgaaaaacggttgcttgaaagtggtctccgttttcctgggaaaaatcggcaaaaaataataaaattcaaaaacgaaaaattttcgagggggcctagctcgaaaaattttgaaaattttcaaaatctgaaaacgccatcggatgcagctttaaaaactgcacaaatgctcaagcggcgccaacccgctccgcttaaaccccagcgagttattcccgaaaaacggaaaatgccgaaattgggtgccaaattttgccattttctgcagcattggcatttacagatagccccgccaaataagcgccaagttttcccaaacagtccaacttaaaatcctacctccaagcattttccgctcccgcttcttcccgcaaagttacaggccaccaaagacggacaaaaaaaatttcacgccgtttcagcgccgccggcgctgaaccgtccaccggatcggaatgccgatagttttcctgaatgcgcctcaaaaagttgtaagacccttccaccactttcagacccatcccgacagccgttcgactcaaattagtttttaagacgaactgcaacgtttctctatatatgtataaactagcgtgttgtggcacagtaattgctcggtgtaggcagttggctttgcacagtaattgctcggtgtagacagtatgctttgcacagtaattgctcggtgtagacagtatacttgtgagagatgaaaagaatatgcattacatgagcgcttcgcgcaaaggacttcgttgctagtgcatgcgcgg

SEQ ID NO: 31 - DNA, 18217 bp, Heterodera glycines
tcatattcgtgctcagcacctcaaaataccccagaaaaatatttttcacccccattttggacccaaaaaaaaattttcgaaaatttctagggggcctagctcggaaatttttgaaattttccagacttatagtacaccattcgatagaactttaaaagctctacaattttgccctaaggcaatttttggctagaaccaacccccgacgagttatgggcccgggactcaaatgtcccgcttaggccaaaaaatttttctatttcctggaaaaaatcgaaaattttctaaaaacatcactaatcgatagagctcgaaaaacgatgttttggaagtggtctccgtttttccgggaaaaatcgttaaaaaatcttaaaattcaaaaaccaaaaaatcgttttttaggcctagctcgaaaatttttgaaaattttcgaaattttaaaatttgcaaaaatcgagctcattgagctctacaataagtctgctggcgccccctggcttagatcaaacccgggcgtgctattcgcctggtactgaagtgtccaaaaaaagtgattcttacgttgcctaacctacaggtcaggcctttgatctgatcgaaaaatttttgctggcaaagttgtaggccacagttggggcatttcgcttttgtggtcctctatgttctgaaagcaaaagcaaaaaatttcgtaacagtgaaactgtcagcaaagtcagttttcgcgccgctgggactcagttggcgaccggaccggaaaatccgtatttttcccagatgccccgtctcgagctaccccttggtgcaaaatttcagccccctatctgttcccgttcttgagattttgtttttgcaaacgaaactccttgtcaatataacatatatagtaatagatattttgttttctaaaatttaaataaataaaataaatgcaaatgtgaattttcgcgtggatgtctgcggggagggacgcgagctgggaggggagggctgtaaaatcaattaacgtgtgcgaattgtttatcggtggaaaagtaaaggataagcggaaatggtataatttaggaggtaattaagagcacattggttggtgtttgatcggatagaaagacataggaatggtgtgatgagtgggagtattggaattgattgtggggagggaggtcatttcaaaaattgctcgcacgcctgacagctcgggtcgcatttttgtccaacgtgacggattatttctatcatttttttctctctgtctgatcgcttcccggacgtggacgatgtcctggaaaaggaagacgacgacgacgacgacgaggaacacgaactggcggttccaggccgcgacaactcacaacgcgcttgcacctttcgttcggtgctgatcagtttgtatgctcggcggacgcaatcgcggggcacacgcaacgaggtggaggaggagcacggttggtccgcggccgtcttattagggaaagttttttacatttctagttaaaaaaggggggaggggcaaccgtaagcacaacatcgcacaacggcagaggcgccggggcatcatcgagcgggacaatttggagtgccggaggcgcaaattgctgctgctgctgctgctgctgctggtgttgcagatgcggttgaaaagcgaactgtagcggaggaagtaccaaaggcattgcgaatggtgggaagacgggcagtggtggcatgcgcatttgcaaagtgctgatcgcctgttggacggcagctgaaagcatcggcggcggttgttggtgctgtgttgccggggcgcaatgtgtcaattgttgctgctggtgctgctgctgttcgttggtgtcctcctcatccatgctcacaacgacggttgtttccacctcaacctcaaccaccggtgaggggacgggggtggggtccggagtggcgacgggagtggcaaataggcgattctgaacatgtgagtgagcactcattttgcgctaaattttttggcacattaccacatcaacacgctggccatcaattattccaaataaggaaaagtcctcattcccacgtccattttttgcaaaaacgctaaatttttgtaaattatcgaatttatgcctaattttctcctacacttggcgcgctttttgcgcgttaagccggttgccatccattgcgaaggcgttcacaaaggtgagcagtctgccgaggcagaagccggcctagaaattatgcttattattaatttatggctttatcaggaattttacatgcgttaggacattttcgtcctttaagtaggacccgccccacttcgtaacgacgtgtggcgtagcgtagtcgatcagataaaagaatctgatacgtccacagagcatacacgcgcagtggtcgtacaacatgatggatgatatctcgaattcctcgctgccgtcatcctcttcagcgatgtcggcgaagtccatgtctcggtgacggtgccggcactaataaacaaatcaaattatttaagtcaactaaaaatgaggtagctatgaattgatctgtcccatttttcacgcaaaattatcggaatatttgggttcagattgttttacttatgttgcagaattataaattactttagaatgactcttaatacataaaatttccccgaccgtcccctaatcacaatttcaacaaattttataacacattcattaaattcaaattttgccgccgccaaatcatgtcagtggggcgcctaaagttacttattcttttgtgtccaatattcctagtactaatctttgttgatcactccccgagccaaacaaaggaagataacatctgtatggccatttggacaatgaaaagacgacaaattgacaaaagaaacaaaaatttggagaactaaagtggatgggaaagggggggggggttaagcgatcgggccatactccgctggtcatttctctgaatattcgcgccatgcagtggattaaatttaactgcacgctttgtccgatcggtctgcattgtttttatccgcgcaagtacgcaaagcctgtgctttgtgcgcatcccagcgtccgtaacatcacggactttttgagcaccggtcagcttgacgaagcggcaacgacaacaacaacaacaaccgcacttccgacaactgcggaggtgtcggcggcggcggcagaatgcgcacctccgcccgcgcatttgaccgcgtggatcgcggtgtgcacagcgctggtggcgcttttggtgattgcggaggtctgttattaattttggtcatttatccgctaaacccctattcctcaattaagcttgtgcgcgccggattcaaagtgcgcaaatttttgaaggaccgcgccttcaaaaaggggatgctgcgccgacatcgccagcgtgagtttctcgctattacattttagcaaattgtaattaacaatttgtacaggaatgagcgccgcaaggcgcaaccgccagccggcaagcgcgccgactccgctgattttgccggctatgttggccggcgtttctctgcgcccaacgggcgtcaatttgactgtggaccgggtgggcaattttaattaaattaaaatctttatatattttaatttctcactcattaaaattacaatttaaatttaaaggcagcggggcagcgccgcgcggatggtacggacgaagagcccgtgtacgatgaggtgccgcttgacaccgtggaacaaaggcgtgatgaagaaaatggggaggaggatgaggaagatgatgacagtgatttttagtgattcggcaagcgatcactcaccatttaactaatcgatcgatttttcactttaaaataaaattttaaaaatgtttgaaaataggatcgctcactcaaaaaatgggtcataaaaagtttaaaaaataggtataaatccagcaaataaaattctaagtaaggatttagagtaatttaaaaatgtgggtgggcgctcgcgctatataaataagtgcgcgtgtccccatcggcccatttcaatttattcctgtcaaacatttggccatcagtttttcatgtcggataaaaaagcattgtttaagcgtgttatcgcagaggtggacctcactataagcacgggcggcataactttgagcggcccccgcctgtctgttccccgtttcattccgtttgaggaaaacgggcgttgccgagcatgtaaaggaactgaggctgaggtggacacaatggtcaccaaggagggaatcaccttatggtgcacacgcatagaaaaagctcagtttgtcccttttgatgttgtctacgagcttcccggtcattgttttttccgcgtgaagaataaggcaagggtgttcagcgttccatacagcgaactgtcgtcctcagacaggtgcgcccagcctctaccaccaccaccaccaccaccaatgacaacagcaaaacatcaacggacaccggacgacgaggaggagaagaatttgagacgtaaggcaaaggtggcgcttgacttagtggaagctggtctagcggcagacgcaatgatgcaggatgggacgcgttggaagaaagccaaaaccgcgatcaatgtgctggccaatttgcttttggcggaatcattaacagatgtctcgccaacttttgagcaacaacaacaacaacagctatcgtcaaaagaggaggagaagagggaggaatgcacaaacaacagcagtgctgcagcaacaactgaatctgctcccgatggtgatgtaatggacgatttcgtcaatagcattcaagcggcgacaagcaatatgcaatagcaaaaaaagcgcaaaactcgctctgccctatatataaaagttgattactgctcgatttgtcataattttttgaaaatgttaaattctcaatcgttcagtaataaagatatttgtttcaaattgccttgcggtataattatttccgggccatcctcgtcgggcaaaacggaattcctactaaaatttattgctgagtgcaatgaactgatcgcacccagtcccatctcaattctgtactgttttggtgagatgaattcggcggttccgctactgcaaaaggcgggagttgaggtgtattcgggcgtaccttcggaggaactgattaggcgccttcccaaaccgatgctgctcattctcgacgatctgatgctgtcaatagaggagcgctatctgtccgatttgttcaccaaaaaatcccatcaccatcagtttgcggtagtgttcatcactcagaatctgtttgagcggaagatcaaggtggctcgcctttcggcgcagtatttggtgctaatgcgcgcgcccaactcgctgctgtccattcgaaatattggagttcagctttttccgcgtcaactcgattttttccttgacgcctaccgcaaggcgaccgcccgcccctatggctatttgctaatcgatatgcacgcatcatctgatccggcgcttcgcctccgcaccaacatatttaaagaggagcaggaggaggacgagggaacagttgtgttcatccccaaaaatggagcggtataaacgtcaacaacaacgacaacaacaacaacaacaagctaaagttagtcaactaataaaagataatgccaactggctttgtgcactgtcgaaggcaaaatgtgtgaaacgatgcgggagactgatcagaaaggcgaacactgatcagctgctgtcactggtggaagtgtgcttgaacattgttgcttcccgattccgactgacaactcggcagaagaaacgactaatgccctacgtggacacggtgcgccgcgtgagcagagcgaggagcgagaggggcgctaagcgagcgcttgtcatccagaaaggagaggggtttggcggactatttgcagcccttttaacccccgtcttaattgaattggccaaatcggttgtgactcgaaacacataaataccctcgtaaaattgtctcacaccgcattcattcattaataaaaatggcaaacaaattcattctcgtaccacaagaaatttatcggggtctcacctccgtctcgcagacgggagacctcaatttggacgcggttcgccacgacctggaccgggccaggggtggacagacaaatccttcggcaaaaaatgtgcattataaccagcagctccgacgttatttacagatgagaaaggaacatgcggacagaccaaccaaagttgagctgaccaagggaataagtgtactgatgaatagaggtggcgaagaaggcgaggtggttgataccccacgccgtcctcccgctcctccaccaccacctccgccgcctggaagacctcctcgtcgtccaccgcccagtcctccgggtggtcccgggggtccttcgccaccaacaagtcctccgcctcgtccacaacgccccccgagaccgggcaggacttctcggagaggaggtcttatggagcaatggcggaaaaggcgatacgatatacaacaacagcaacggcagccgccgccgctagtggtgcgggacctccttgcggaagcagctgcggcgccactgcccgaaagtgatgatgatgatgagtatatgctagagaatggattcgcgctaccagcaccatcacaatactatggcgatttgcctgtgctgcccgacaatgcggaagaaattgaggaaatggacacagctcagcgcaggattgccatcagaagaaaattgaaaaaggacgaggctgatgctgatgatgatttgcaacgcaaaaaatatatgatgatttatcaacctccaccactgcctcgcgcaaaagtaaaagttgagcagccgaggtctcctacaccccggccgcgtcctaacgtcaagagagaacaacaacaaaagccaaagtcagaattcaaaccgccgtcgacatcaaagaaaaccggtcaccctactccggcaaaaagagtgccagagtttgttgatctcgatccacgaccatccacatcaaggcaggccgggtataacccgcctcccccgacgcccaaaataaaacatgagccgacaacaaagagacccatgccataccgtatcccaaaaagggaaccaaaagtcgaggaagcgccacaacagcaacaacctcttcctgctgccgctgttgtcgtcgaagaaatgcccgttgttcctccgcctaggaggggggccaaacgtcgctaccccgtatatgaagatgatgaggtgcagataagaaaacgagtgagacagccgagaagggtaagggtacagtactcacccgagccaggcccatcgacatctgcacaaagtgatgaacaacaacaacgacaacaagaacgcgaactgtttgccattccatcaaatcagctgaccatgactcagcgggttgaacggctatacatcaaatgcaaccattacgctgatcgtatgggcgttcgtggaaatacaattaacaccgcaaacggcaagccgttggtgcataccaatttgcgaatggccatccgctatataatagacagaagagcgggccgccccaccattagaccaccaggagcggccatattggaagaaaggcttcagcaggacccaattctgtattcatggacggctccaccaaagagaccgtcacagagcaaaaccacgcggacggcaccaaaaatcaaaaaggaatttcgtccgaaaaaatggagctgatcaacgcaacgcttgacaagctgtataacagtccatcgtcgcccgcggcgttcgcgggcgttaccgcgctgtggaaagaggcgcgaaaaagtatcaagcatttacgcaaaaaggacgtccagcattatctggaggggcaccgcacatacactctgatgcgcccccgtagggtgcgctttccaagggccagcactgtagcggcagggttcatgaccgatgtccaggtggatttggccgattttcaagcgctatcgcgacacaaccggggtcaccgctatctgcttgtcgcggtggatgtgctctcaaaacgcctgtttgttgttccactcaaaaataagagagccgaggagatgctggaggcattcaagctgctcatcgatcaaatgcccatggccccccaccgcattttctccgataagggaaccgagtttaagaacagattgctgaaggacttttttgagcagcgagaaattgagaagcatgaacccgtgcattcatcggtcaaggcgtcggtcgccgagcgggccatccgcaatgtgaaacagcgtctgtaccggtattttgcggaaacggagacgctgaactgggtggatgcagcacagaaaattgtggacgggattaaccgctccccgtcacgtgcccacggaatgcgtccgattgatgtgggtttttccaatgctcagagggtgtggaagcgattatatgatgatggacaccgtgcgccccaaaaacgacgaccgacccgcttccgcaaagacgattttgtgcgcatgagcagagagaagagacagtttgagaagggctatttgccaaattatggcgacgaaattttggaggttgacgaggtgctgaaagcggttcgccccgttcggtacaagctacgggatgagcgcggggagaaattcaagggcagcttctatgagcaggagttggcgcgtgtaagaaaggatgcagagacgagctatcgtattgaaaaggtgtacagaaagagaaagagggcggatgggtccactgagatgcttgtcaagttcataggataccccgagcgcgaatgggttcacgagtcacaatttgttgtataaaagccccacccatataacaacatatcacattttcataaattttacgtgaaataaaaaaatgtcatcgaacagcttctttgtgtttttgcctagcaatgtgacggattacccggacaatcagcccaataagtttcgggtccggctcccaaagccgttgcattttaacggctcttgggtttgtgggctgcatagcataagctacccatactcatggtcaaccattggcacattggatgcacaatggattgacattcacttcacacagcgtagcacaatggatgaggacaggccgagagtgatccgggtgccggtgcccaagacatcacataacagggttgagcagctgagagacttcattgccgctacactgaggaaccatatcggtgcaaaaatgttgccgctccctcatgaagaggaggccgatcggaatcggacaaagccgcttggctctccaccgccacggaagagagacagaagagatgtgaacaacaccactcctccccaatcccccgtgctgtttgatgagcacggaaagcgactcggctctcccccgttgtacgatccgaatgctggcgaagagcaacacatgagcgatgatgatgacatgcgagcacaaaaagggacactaattattgatccaaaaagcccgtcgcctatagcgacacccccagttccggcggttaaaccgctaacaacaacaacaacaccgactcctccagccgtaaaaccggtaacaacaacaacaccggccccccagtcgtccgcaaagccatcagcacaacagcaaaagccaacaccggtcccgccaaaaccatctgccccacagacgtccgaaccaaaaatagcaacaacaacaacaacacccgcccctacaataaagccagcaacgccaccgctacctaagcctaaaacgacagttgctctacagccaaagcaaacaacaccgactcgaccacaacaaccaataacaacgccaacccctcaaacaacaacaacaactacaacaccaaagattccatcgcctaagccgcctgctgttaaacttcctcctcccacttctacaacacatccgcctcagccagagccaacaacaacaacaacaactgctcctaccaaaactttcacttcctctcctacgacgggggctgttatcggattaccttcaaaaaaaaaacaacttccaaccgtcgacgaacctgtctcggctgcgttaactctagaagagttagatttaccagtaaacagcttcatagttgaaatagactcgctccaatttgtgcccaactcggtgttagtccaatatctcgatgatgtggaacggttcaaagtggtgttcaagaacgatattatcagccacttgtccttctcgcctcagctgggctatgttctgggcttcgaaaaccctcaacatgtcgtgtcaaatgaactgtcaaagtatccggttgatttacggggcggcatctcaagctttgcggtctactcaaaaggattgaccgaaaatatgataatcggtaatacgctgagctcgttgctcagggttgtgtctatcagtggtgccatccctggggattataatgagaagatttatgactcgccaatatttgcgcgagtactgccgcgggagatcaatgagattgatattgagctgcgcacaatggacaaaggccgtctggtgccattcgcgtatgggacgacgatggtcgtgttgatatttaagaaagtgataaatttctgatttattcactcgtcattcattttgtattttatttgaataaaaatggttcatatcgtgtttgacccaagcattgcgcagtatgacgattacatgatgatgcaatacggtggcggatcggaaaaagacgatttcgactactttcggggctccaccccctttcaaaggggctatggtgcagcacagcggggagcgggcgttggtgacgtgtttcgaggactttggcgcttctttctgcccattttacgtcgtgtgggcaccacagtagggtcagaggcgctgagcactgggcaacgagtgctggagcgcgttggaaacgagggaatgccgattaaggaggcgctggtcaccgagggaaagcgaggaatagacaccgtgctggacaaaggaggactgcctaagcagtttggtactggacagaagggtataaaaagaagacgaatacgtgcgccaagtcatcaaacaataattcgcggacccccaatcgccgtaaaacagacaacaagaaagcgtgttcggtcggacgcctttggactctactgattagcagcgaccagcaggatgtcatttcataaaatcgacaatgactccgtgaactcaatcaccaatgcgctggactttttccgcattccgccgacaaatgtcagcgtctcttcatcaaaggtgtttgaactgcttcccagcaaccctctgaccgacaccccctaccatttcaaacttcattcaagtcaaaattacattgacctctccaaatgctatttgctcaccgagttccgaatccggaaggaaaatgcgaatggtcaacttatggacctgaccattgacgacgaaaacattgcgccaatccagatgattgggcaaacattcatccgaaacatcaaaatgagcatcaacgggcgtgaagtgttcaacgcaaatgcactgatggcctacaaaacctatttttcacatgaactctcctactcaacaactgcaaaggactcgcacttgaatgctgcaggctattaccgggatacgggtgagacactggagacggggccgggctacattcaacgcaggaatttgtttgccgaaagcaaaacggcccaatttattgccaaaattgataccgacctattcaaccagccgctgtacttgattaacttttgtgaattggatgtcgaaattttaccaaatgacaacgattttgtgctaattgcacccgccatcggcggtgttgttcctcgttaccgtttcgaggtgatggggctcaaaatgtatgtgaagaaggtgtcattaatggacggattagcgctggacattgcgcgaaagcttgagataaagcctgcacgttatgcagtaaggaaaactatgatgaaatcgatgttcatcagtcagggtcggctcgagtttaccgccaatctgttcatggaccaaattccccgccgcatcacaatggggcttgtttcaaattccgactactcgggcacaatcacgcggagcccgttcaatttccaaccgtttaatgtgcgggaaattgcgatcatcgccaacggccgttcctacccccaggccccttacgatttggactacccgcatggtaaatatgtgcgcgctttcaacgatatgaatgaggcggtcgggttcgcaaactcgtcggaaagcaacggaataacctttccccaattcgggaaaacgcattgtatctacgtgttcaacttgacaagcagcggtgacgaccaagccgcgctctttgatctgataaagaacggaacaaccgcggtgagcataaaattcaatcgtgcggtaccagtggggggactgatgctggtcgtaatgggcgaatgcgactcgctggtaatgctggacaagaaccgatcgataagcaccgataccactatataaaaggcgccgatttagtgtatttctctcacatttgttacattcactgttcaccaaaaattaaaaaatgtattttaaaagcgctactgctgatattttattctttttggttgtttttattggtattggaaaatgtgcatcggctaattcaaacaaaaccaaatcccgaggggcagtaagcacccccgtcaccaccaccaccaccaccacaactgtcaatccacagaagattgatgtgtctcgtttggcatcagcaactcgaatggggaaaagcagcgtgactggcaaaccattaaaaattgtcaccaccaccgccaacaccaacaggaacataaccaccgccaacaccaataccaacatgaacataaccaccgccaacaaaaacaacaacaacaacagcagcaaaatcaccacccctacaacaaaaactgcaaaattggttgtggatgagcagttgccagtcgcaacactcctcccaacattgattcaccaaatgtgcaaggatcgtaccggggaagaaaacttttatcagcaagccatctgttgggcactttttgcgctctatttaatggtgattgtcagtctggtacttcatcagctttgttctatctgttggttaaagaagaaaaaggagtatggacagcgcgcagatttcgactattttgaggcaaagtcgggaaaccgcacgagttttccggggctgtttcccaagtgaccagctcccagcgccggacacgctacggtacccagcggcgctagttgtgaacaatgacccacactacaaacaaggatcccattggtgcgcgatttatgccccttcaaagacggaggaagcggtcatttactttgatagtctcacaaaaacaattcctactattgtaaaaacatcatttctggataaatttccaaaaggttttgttacaaataagcacccgtaccagtccccactgactaccacatgtgcaattcactgtatagtgttcatttatcatatggccttaggtcacccatttgatgcatttctgcgcatattagacgctagtgaaagccccgacatgtattctttgtgcattttgaataaaatgattaatccgtatttgtgtgtgcgtgccaatttttatctccctagggcaaagcgcataagggaaatgattgattagtttattacacaacggcgcacggtgcgcgctgttggtgccgccgcatatatacagcgaactcacgcgggaaaggctcacttttttcacaaaaataaataaaatattaataaataataataatgtcgttggaagatcacaattattgcggcgagttgggccgcaacgaagaaacgcccacaaagagaagaaaaagaaatgatgatgatagggaacagaaatttcaaaaaaactgcattcgcactctgagcgccgacaaacagtacaaccaaaagttcaaagtgcagagcgtaaagtcgacttttgtcatcgaaaatttgcccgccaaccccgagtcaatgctgcgcgcattgttcgctcactgcatgtcaaccgccctggacgagtcacagcagaacgggatcacaccggatcaattgggcgctacaatctcttcagatctgctaaatccgagcatatggattcccatacgccgcatttccgacaacaccgccgactcaattatgaaccgcttccttgaggtggcacagtcaaaatcgcgggagggctctctgtggggctcgccgttcactgtgaccatcacaacgttggatgttgcgcagctacctcatcggcaacaggtgcgtggcagtgggaaaaggacagcaaattcagtacaacatatcatcaaagaaagtgctcttctgcggatcaacaacaacgatgatgcatattgtcttttttacgctttggagacaagcaggaagtaccacatcaaagagatgagccgacagaccttttctaaatatattaatcggcagaatgggcgacgactggaagacgtgtttggactgatgagcagcgcaaacattcgcaccgatctgagagaatatgacgcggttgtctatgtgccaattgtcgtggactattggaatcggaaatacgccacagcaaaccagcgatttaaggtgttcatttttggcgctacaggcagctatcggccaaaatttcaatatgggccggacaattacaacgtcgaaatcccgctctaccatcacaacggccatttcgacggaattcgaagcggggtgggcaaagcggtgtttgggcgtgactactactgcttttcgtgcgagtgcccctacgataatgccaatgatcattcactgcagtgtaaagcaaagtgcataaactgcggtcgcataggagtggggcgaccgtgccgagcggatgacaacaacgacaattattacagagaatgcacagcatgcggcaaggatttcatgagccaagactgcttcagtcaccatttgtcgagcaatgtgtgccgacaattcaagaaatgcaaacagtgcggagttgtgtggaatgtcaaacaaaaccgacgaaaaggacgcagcggacacgtttgcggtgagaaattctgctacacctgcaaatgttaccataagccggagcggggctgcttcatacagcagttgaaggcgcgccgccccacaaagtacagactgatcgcctttgactgtgaaacaacacagaacacgcgaattgagggcgaccgcagacttcattccgtcaacttcatctcatgctatgtcgtctgcaccaagtgcataaacgaaaatttatggcgaaattccctacaagcgccatgtggcatttgcggtcggcagcgcaccgtcacattctcccaccgcgcctatgaacgcacacaaaccgatgcccaattcatcactccttgtccaatggcggcctttgctcaatggctgctcagcgaattcgatccgcgctatcccacaatgctcttcgcccatttcgggggtcgctttgacaacattatgctgtttcggcagttcttcctcaacgggttttgcccgcaaatgatccgccgtggtaacaaattatacgaaatgaaaattgcgaggggcgaaaaaaacccggaaatcatcgtaagagacagctggaaccttatgccggtgccactcggcgctctgcccggagcgtttggactcaatgtgcaggataaggagttcttccctcatttggcgaatgttgaggcgaattatgggctcattctgcagtcgctaccgccaaaagctgactacttatacggcggaatgacgcccgaccgacagcgcagattcgaccagtggtacgcggaacaccaccatcagcagttcgacctgtgtgaacagctcgcggcctactgcaccaacgacacgcgcatactaattgaggcgttggtcgcttttcgcacggagttcttgacgatcagtgacccgctggagcggcatggatgcttggatgacgacaacgacgacgaagatgaagaggaggaggtggatgacgacaatgcatttgaagtgatcggcggtggcattgacataacgtgggagccgatgaccatcgccagtgcctcaatgagacactttcgactcaatcacctcaagcgggatcagctcgccattgtgcccgagtgcggctacgacactacaaacacgcaaagccttgtagcgctcaaattcatggactggtacgccaaaaagaacggggtgagcatccagacggcacactcgcccggcggagagaaaaaaattggccagtacactgtggacggatacatcgcggcgaccgacaccgtgattgaggtcaacggctgccactggcacgcgcacgaccacccgcgtcaccgctttcagccccaaacagtgatggcgaatgggaaaacggcgcagcggatacgggaggacgatgcgcgacggatggccttcatcacatcccaggtgcaacaagtgctcgtattttgggagtgtgaaatcaacgcggagaagcgcaacaacgacgaaatgaagcgcgcctttgcgcagtacaaggacagcggcccaattcgtttgaaggactgctaccatggaggacgtgtgggtccacaacgactacactacgaggtgccagaggggtggcggatgaaatattacgacgttcgttctctctacccccacacgaatgccgtgacagcataccccgtgggtcacccaacacgagtgaacatcattggtgaggcagagcaggcggttgactggcgacgcgccgaccaggtgccggtccgaggcattctcaaagtgttcgttgtgccgccccatcacgttgatgtgcctgtactgcccgtgaaatttgatcagcggcttcttttcccgctgtgccgtacctgtgctttgcaacatccgcatggagccgtcaatgaagactacgagtgcacgcatcgcgaggatgatgagcgggggtgggtgtccactgtgacgtcaatcgagttggaggaggcgcttcgcaacgggtaccggtgtacggcctactatcgctccgtcgagtgggacgatacgcggtggagcgaccgcgtttttcgaggctacgttgcagaattcatggccatgaaaacacatgccagcggcttcccggacgaaattggtacaaccgaggaagatcagcagcaattcatagaggaatgtgaggacaaattcggaatccgaatcgagcgggaaaagatggtgcacaacaaggccaagcggaccatcgcaaaactgtgcaacaactccctgtgggggcgcttctctttgcgcaatgggttgtccaaaacgattgtgaccgactcgcccgcggaactgcgcgctctgcttgacaacccagcggtggaggtcagctccgttgaccagctcaccgacgaatgcgttctggtcacctatgcggccggaaacgaatgggtggaggaacacgagtgctcaaacattgtgctctctctttggacaacatcggtggcgcgcctacacttgttgcggctaatgcagacggttgcgcgcgcaccaaactctgtgctcatctacaccgacacggacagtgtgtgtttcgcccatcgtgaggcggacgggtgccctctggagacgggaccccatctaggcgacctttcggatgaatggccggaccacgaactcgtggaatttgtttccggtgggtgcaagcagtacgccctgcggatgcggcaccgccaaagcggggaggagaaaacggtgctcaaagtacggggcataacactgagcgccgatgcctgtcagcttctccactttgacacattcaagaggagtgtcctacgctacgcaatgtgccattcaaatgaggatgatgaagaaggagatgatgatgatgatgacatttgttcaattttgattgagtaccccaatttcctgagacccaacattaaggacgggactgttatttctgttaagctgtcgaaacgctatcgccctattgtaactaagggggttgtgggaatgaatgcaattgtacatgattttggttttataaaggcgtaatttatacggactgcactttttaaaaatgcataattaacaaatagaagattacaatttaaaataatgaagcgtgagaagttgcaaattttaggtagaaaaatgcataatttagtaagagaagtagcagttttggaaatattaaaaagattcatcatcatctgagttacagagttgctgtttttaggtagaaaaatgcataattagtcatatttaactgcttgacttagaatatttttgatttgctctttttcaatccatatgattcctttcacaaaaccgcaagacggaggaggtagtgttgccgcaacactgttttgtgtgggcatcgagccgggtggagagaccatggtcgtcataatcagcatcatcggacgaa

SEQ ID NO: 32 - DNA, 3661 bp, Heterodera glycines
  unsure (1)..(3661): unsure at all n locations
agtgtgtgtttcgcccatcgtgaggcggacggtgcccctctggagacnggacnccatctaggcgacctntcggatgaatgccggaccacgaactcgtggaatttgtttccggtgggtgcaagcagtacgccctgcggatgcggcaccgccaaagcggggaggagaaaacggtgctcaaagtacggggcataacactgagcgccgatgcctgtcagcttctccactttgacacattcaagaggagtgtcctacgctacgcaatgtgccattcaaatgaggatgatgaagaaggagatgatgatgatgatgacatttgttcaattttgattgagtaccccaacttcctgagacccaacattaaggacggaactgttatttctgttaagctgtcgaaacgctatcgccctattgtaactaagggggttgtgggaatgaatgcaattgtacacgattttggttttataaaggcgtaatttatacggaattgtactttttaaaaatgcataattaacaaatggaagattacaatttaaaataatgaagcgtgagaagttgcaaattttaggtagaaaaatgcataatttagtaagagaagtagcagttttggaatattaaaaagattcatcatcatctgagttacagagtttatgtttttaggtagaaaaatgcacaattagtcatgtttaactgcttgactgagaatatttttgatttgctctttttcaatccatatgattcctttcacaaaaccataagacggaggaggtggtgtttccgcaacactgttttgtgtgggcatcgagccaaaccagagaccatggtcgtcatcatccgtatcgtcggaaggagatgataggaaatttcgcggcaatgatgacgaggatgatgatgatgacgatgatgcgccgtcacgcttttgagacagcgaattaacgtacacaggcggaaagcagtcatctacgacttttaccagttcaagcgggtaatatttgtgcaagggtccatcatccctttgcccaaaacatttctcgataacgcatggataatgcgggtattttagcataatgcggtgccgcgagtaataatgggccgcaacgcaaacattgtaggggcgcctcaggttaccataagcaagcactgagtcggcgccctcttcagtgagcccagcaaagaagagcgtgtgagtgaagccattacggtcagagtatgtagtgatgagcttacgatgtgcaaattccttcaacaatttttctcgattcgcaacactagcacaaattcgtacgcccacttcgtcaggggaacagtccaaaatgcgcgagaatgcgataagcaaatgcattgcgcgcaagtgagattttgtgcacattcaagcgcttttatatgtgcgtaggagcaccgtaacttcgtctttcacgtagcgcgcagcactgtaccttttcgctatataaaagcacacaaattgatgcaaaacttcattttaatcagacgattttttgcaaaataaaaatgaatacttttaataatgttcagcaaaacatgccggaagaatctaacaacaacagcacaaactacaacaataataacatcagcaacatcaacaataacaatgagaatgctcaattatggaagcttgtacgtaagaaatatattctgaccttcaatctttgttacggctgttctcaaaaacttttcgagtccactaaaaacaataacaacaacatcagcaacaacaacaattatgcttttgaaactgatcagtttggaggcgttaaggtgcaatttcgcatgtgtaagggatgtgtttggttgaacatgaagctgagcgatttaaatagtgcacccaaaagtggtaataatcatatgaaaacaactcgcaactttccaaacacaaacaatgcaacttactctactgacaataattttggctccttcttcaataacaccaacccgcagaataacgcaaatgaatggatttgacaaaatttagagcagatcaaaattgtaacaattaaaatatttattaattgtatggaattattttattaaatattttgtttcattcaaattcttgtgtcataaatatgacaaacctatttgcccaggaaaaatgattgatttcattcaatgatattaaccttttgagtcggcggataagccgcataaccgctattgtacgttttttggatctcgtagcgcacccatacgccctaacagatggtcatgctgtcttataaaaaggcaacggaaaatgccggccacctttttcctgtgccccatttttcgtccaaaaatgaactctcagcagcgccaaattgaacgagagcagctccgcgccaggcttaatttgttggtcgacgaggtagatatggtcgtccaaggccttatcaacaactacaggagcgatggactgataaatgaagtgagtttaggaatgcatgcccaaccagggactaggatttcaatgtagggaggcataacgattttctcgtcctctgtttaattttataaaactaaactttgatcaggaagcggccattggacaggcaccagaaactgtggaactacagaacgtgaccattgggtcacaccttcccgcgcaacaaggcgaggaatgggaaattgggccacacatgcccctacaacagcattatgagcatcagccttgggaactggacccaccgatgcccgaacagcatttggaaattgggccacagctcccggatgcgtgggaactggttccctatcagccaccaccacaatgggctcaagttgtgcatgtggaacaacagcaacaacaacaacaacaccaccagcaacaacaacagcagcagcaaggcgcgtgggacgagggatgggaggagcagctttcgccaaatgcgttagcgcagatccaggacgaggcggatgggttgcgccaggatttgagtaagaatttcgggtcggggtccctcccataaaaggaaaattaagtgattgagagatttgttcgtgtggggcagccgcagcctacgtggcccggttaccatagatgttcggaaaattttttttttattatgcactaattaataattaatttagcattttggctcgacgagggcacggcaggcattcctgaccaacaacaacaacagcatccgatgcagggatgggaaactccgcgcacccactttgagcgccccgtgccgcagagaacgcccagcccttcgggagattcgccggcggcactgatcagagaattaaatttctccgatcagtgcctcctgtgcatgggtgagcacgggttggactgcgaagtgaccgttcgcggcaacaactgcgggtgtgtcacaatttgtgacacgtgctgcgaaaatggctggtgggcgaggtatgcggatgctgcgcgcgagcagtccgcgcggcagctcgaggacagcctcgacccgtggactgggctagtccgcttagatgaggacagtcagaggcgttgggtaaacacacaaaacattgattttctgataaaatttaatttggttcatgttttcaggtcgaggggcacgatgtgcgccctaagtgtctcggctgccagacgagccgaatcgactacttgatcggggtaacgcggccgcgccgctcgcaacgcacgcgcaaggccacccactgcgccttttgccaatgatgg

SEQ ID NO: 33 - DNA, 1418 bp, Heterodera glycines
cagcggacgccaagcctttcgggggattgcgcgggggcactgatcggagaataaaattttccggatcaggtggctttctgtgcatttggcagccatggagtggactgcacagtgacagtccgcggcaacaattgcggctgtgtcacaatttgcgacacatgctgcgataacggctggtggcagcgttatgcggatgcggcgcgcgatcaggccgcgcggcaggtcgaagacagcatctttccgtggacaggactcgtgcggggggatgaggccagccaaaggctttgggtacacagaacacattttttttttttgataaatttaattcagtttatattttcaggtcgaggggcacgatgcgcgccccaaatgtctgggctgtcagtcgaggcggatcgactacctgatcggggtgacgcggccgcgccgctcgcagcgcacgcgcaaggccacccgctgcgcattttgaccgggaagctcgtagacaacatcaaaagggacaaactgagccttttctatgcgtgtgcaccataaggtgattccctccttggtgaccattgtgtccacctcagcctcagttcctttacatgcgcggcaacgcccgttttcctcaaacggaatgaaacggggaacagacaggcggggtccgctcaaggttatgccgcccgtgcttatagtgaggtccacctctgcgataacacgcttaaacaatgcttttttatccgacatgaaaaactgatggccaaatgtttgacaggaataaattgaaatgggccgatggggacacgcgcacttatttatatagcgcgagcgcccacccacatttttaaattactctaaatccttacttagacttttatttgctggatttatacctattttttaaactttttatgacccattttttgagtgagcgatcctattttcaaacatttttaaaattttattttaaagtgaaaaatcgatcgattagttaaatggtgagtgatcgcttgccgaatcactaaaaatcactgtcatcatcttcctcatcctcctccccattttcttcatcgcgcatctcgaccacaatgtcgctgtcaagcggcacctcatcgtacacgggctcctcgccctcctcaattgcaccatccgcgcggcgctgccccgctgcctttaaatttaaattgtaattttaatgagtgagaaattaaaatatataaagattttaatttaattaaaattgcccacccggtccacagtcaaattgacgcccgtcgggcgcagagaaacgccggccaacatagccggcaaaatcagcggagtcggcgcgcgtgccggctggcggttgcgccttgcggcgctcatccttgtacaaattgttaattacaatttgctaaaatgtaatagcgagaaatcacgctgggatgtcggcgcag

SEQ ID NO: 34 - DNA, 3153 bp, Heterodera glycines
atttccggtatacgcaccggttgaaacaaacccgacgattaaacgtctcggaacaatgctggtaaaaacattgtgtgagagatcagaagtgccccgtggaatgaaaagactcctgatctcaatttttctaaccggatatttggccggggtggtttgtagctgattgcttattacgttatttaatgactgggtaatgtcgactgtttttacataaattctaatatcatgtatgttaatacgatatgtgtgcgggttcgctatgactgcatttcctgaaacatatggcggtgccataattagaaaatcatcggtattacggtgtatgctaaaaatgacatccgagttattaagcaatagattgggctgacgggcgagatcaaaattaagtttcatcattgtttcacattttgcaccatcagcaaaacgtgacgctctgtttttaaagccactgtttgtataatcattctggtcgacatcatcgacgtaatagcaggacgcttcacatagaccctttttgacatcttctgaaaatcccaattcagtcatcatatatgccctaaccgcatagtaaataccggaatcataagattcgacaccggaaattgacacctttaatgttttgacaaagctgtgcccaaaattttgaatgacaccgacgtgttgatcagcttcactgtccgtggtaattggaatccaattgcttttgtcttttctctctattgatgttgacaaatagagaaaagttttattgaggtcacaaaactgattatctgaaaaaagtctaaagatatacggtccagattgatttattgctgaaagtggcagcaattcccgaatactggatttattaattgcaacgttcgtcggagggatgtcgaaaagggaaaggcccccctcgagaccgtcctcactcgccgtgtcgactttcttgagagttgtcatttttaactttttgtattatttattccatttatacctttagatcaaacttaactgatcatatacttgtttccggttcttattagtgatcagagacctttttcctttaccacattgttgtaacttatcggtaaggttagtaaacccctgtcttgaatgttccctgacggcatcccttaaattacgaccctgggcgatgtcactcagaactctctgcccagcggcgagcccctcctgtcctgcactcgaggcaatattcctcgcaatatgggtcaagaaacgtgccacattaccgagtaaaccgaatccccgttgatacttgcttccgacaaagtattgtttctgtcccctcccatgttgtgaagtgaaaaaagatgaccaatcgaccgactcgggatcgaaaaacacatgtgtcattttttaaaatatacttttcttaaaatgtaatgtgagaatacaacttccccagtgaaatttaacgaattcgccaaacggtgtgtgaatttcaattgtaatttctgaaattcgtttcgactgtagacgatgaaagtactcggtgctatatataacttcactaatcgaccctgggtcattgacgacgttaactattcttaagagtggagccatctggttcccgataattgtgttttctattaaatttggtgcataaatgtatagctgccttacgcctcccgtcaaatctggcatataattcgcctcttccgcgtgaaatagccttgtgttcttaaaaccaagcacataggcgaggtgttttgacaaatctatgtgggagacagcagcagaaagatagacaataaatttttgatcaatgctgtcatattgaaattgaacatcctcattggctagtctctctcttttttgtggtcctttctcagcttcagatacttgtctattttcaatatctttacgtttaatatgctcacccaaagcctcattaagcctattcactattccgaggcgtactgtgaattttgacgtagtgttctcctgccccggtgtgttcgacggtagtacaatgtaaaaatcatccatctgttttcactaattcctggttataaaatatgccttttattaaatttccttccaaatcttcgatcctgtatgaatcgggtgtcgttggattaacaataacgattttaaataattcttcggtaaagtttgggagatacccctttgcaaattttcctttttccttggtaattcgaacgatatcgccaattttaaatttgttctttttcgaaattttaaattccttcgccttatataatttttcccagagcggccgggcattttcaaaagttacggatactggcttggcccccaatgtcctattcacactgttgttaatgtttattattattttgtctattacatcgacccatcgtagagtgtccatctttgtaaaatatctgtacaagcgctcctttattgtccgatttgccctttcaacgactccggcgtgaaggtcaggactatacatcacatttttgataataaatttttcctcaaaatattttttcatttttccagcctgaaactcgagtccgctgtcgctatatattttcatcgggataattttcgacttttcgaacacccgatcaaaagcctcaatcatgtcctcactcttctttgacttggccggtgcactgaagatcattcgactcagcacgtcgatgcataccaacagatatttgtaaccgtcgttatgctttttcaactggtcaaatatgcacaaatcgcactgccaatcggtatggaagccgctcggtaccgtctttagtctcgggaattttttcctgatgggcttgtgaatcgtgtatgttctctgcttttctaggaatttattaacgtcatcggtcgtaatttccgagtcaatctttttggcctcatttaaaattttttgaatccaagcaaaacttgccggagattttaaattaaaataaatttttgataaaattttctctacagtcttgcccatattagtggtttgaatggtttcttctctcgtgctatgccgtgtgtttttatagattttattgcctttttacttccacgtccccacatgaccttcgatttatcaaccatgtcttttactgttggatccttcagtaaccgatctttaagaaattttgcaccgcgcggtgtttcatctttcttccccgcgagatacaacaaaacatccctataattact

SEQ ID NO: 35 - DNA, 7461 bp, Heterodera glycines
catcagaatttgggtgcatgttaatcatgagatagctaaattgattattggtcgcatcatgatatgcatccatgaaataattcagtctttttgggaacagttgtgaccctagagtcctcacttgtaattgtcctgaagggttgcgcattaaaaccagataatgggcgttcgctcttgccgttttaatgtcccgaccatagagactctgggttacaaaaattacgcttacgttccaattatgggagcccctggtaaagagtagatcgaggaaagtattctgcatattaagcattaaatcgtcaagtattaacaaaagggggttttcctgttctttaatcttattcatgtccggaatcccgttaaaagtctcaacgccctccccgattaatcctaaaatactatcattcatctcaccataacaataaagaattttttcagccgatggttcaattagattcttatgatgttttaaaaaccgtaatagccaacgggtcttaccactcccagtagcccccgagagaattagagtgaacggacgtgaaacatttttaatgcatcttatttatttgactatttatattttcatagggaacatgtttcgcacatttggggcataaccagaaattatcaaaaaatgatgtaccgaaatgcaaaagactgtgttttttacatctgttacacatctcgtaatgacaggggcagtaatgacaacacttaattttatgtggacagttcatttttcaatttaattttatttttggttgctatttatagaaggggtatataaagggagtgaaaggaccatttgattggtacattgtatcaaaaatgcaaaaaccgataatcgtaaatataattgctctcgctaatgagtactccgggattatttctctaaaatttttctttaacaaaaacgacaattattgggtattttatttatatcactttttagccctttctttcttctatcgaatgcattttgtttcagaaaaaaatatttgtctttttaacaaagacattgttgttaaatataggtgccaaagtggggaaaagcacattttttgacccccatgttacaattggtcaaaattggcacttcaagtttaaaatgtgtaaaaccgaacggactaattacgaactgttaatttgaaatagtgaaagtaaattttgttcatgattaagcatatcttcaaaatatttttttatatctaaaattaagagaaacgttctgatgagtccaaattttgcattgcatttaaaacaaaaatttttataaatattttttcccgaaattgtccgcaaatgtctggacgcgggcggaggagaagaaaaaaaaacatttttatactaaaatattagcgtagcaattaacgacggcttctgacagcaacaaaacaacaaagcagatcctgtgattttaataaacagcaatctctaccgttcttcgcatcaatttttttggtcctatctctgtcctagcccctgctactggtacaaaaccagaggtgccagatctgaggctttagcctcattttgtggttttttgataggacaatgaggctaaattttaaaaattgggcgccagcatgtttttccactataagtttctataacttttttctatgtcatccaaatccaacatttttgatatcattcgaaagcttaatgtatttagaaactttttataagctattacttcacgattagacaaataccaaaaaagttatacataaaaattgcgaaaaagtcgaaattttcaagttttttcattaagattttttcaggcttgaaaaactttgcaatttttgaaaaggctaatagagcatgttaagatctttcgaatgataccaagattgttggatttggataacaaataaaaaagctaaattggaaaaactttcttttcatagggaacatgtttcgcacatttggggcataaccagaaattatcaaaaaatgatgtaccgatatgcaaaagactgtgttttttacatctgttacacatctcgtaatgacaggggcagtaatgacaacacttaattttatgtggacagttcatttttcaatttaattttatttttggttgctatttatagaaggggtatataaagggagtgaaaggaccatttgattggtacattgtatcaaaaatgcaaaaaccgataatcgtaaatataattgctctcgctaatctcggtaccggaattaaactaaactctctgacgatcaccgaatgcgaatttaagtataaccctagaaaattcaatgccgcggttatcaaatgtataagccccatcaaagccacggcattattatgggaatccgggaaaatgatatgtttggggacgaaaagtctgatagactgtgaaaatgctattaaaaaatttatagaaataattaagggctcggggtgtccggggcttcttacaccggacacacggttgaaaatattgtttcgacctttaaattcggacgtgaaattgaactgaacgagtttcgaaaaaatcgtcgtgcattttatgaaccagaaatattttgcggtttaaatttcaagcggggtaaaagcatgacagcgttaattttctggaccggtaaagtcgtaattacgggaactaaaaacaattctgaaatagaggaaatgtatcatcatattctcccctatttgaaaatggctcaaaagaagttagggagacgataaaaatttttcatttattgggacggtccctcaatttatagttctgttgggcatttattttgttatcgattacttcgcgcggcgccggcatcgcggcgcaccggcggggcggagaggaaatgcatggttttggcaaattttcaaaattcagaaaaatcatcataaaaatctcaggattgagaaaataaaacgctaaaaggttttgaaacaaaagattaaaatttgcaaaagttaaattgaatttccttcacctgtcactttggtgacaggtggatgattgatgaccttcccgcggcgctgcgcggcgcggggtgaaaaaacacccgcacggatttgggtaaattaaaatccgcaaggcggcagagttcaaagaacatcccataggctcaggatgtgagcgggcggcaacttcaaagggctgcacccctaccataggcacgggtttgtgcggggcggcaacatcaaagggataccccctcccataggcacgggttcgtgcgggaaacacccgctcggaacccgctcgcttttgacgctctatactacttggaattggccttgttttcttataaaaagtaattcgcatattgtaactgaccgaagtggtggcacggagaaatgcctaaacacaaaaattggtaaaacaaaaacaaagtgtttagtctcgaaatccttgtcgataaaagcacaaattgtgaaagaaaatgtgtcgaccacctgcttgtgattgtggaaccaattgtttattttcataaaagcaaaatgcgagcaacgcaattccttcggttgaccattttttgtcggagttcgcaaccatttggccaacgcttgaccagcagttgaattcggagcattttcatcggggaatagataaccagaatcgattgaattcaattgatcaagatcggtgagaagtgtcggcgaagtgtgataacgcaatttgttcaaatgatcgccatcctcaaagcacaagtggcgaatgttggtagcaaaaattggccaaatttcaatggcaaaaacatgatgaattgtatatattcttcatattgaactccaatttggtgccaattctgtcccaaatttgcttgttcgaacggagaaatgtaatgacggaatggtcaatgtacctgaagaaatttattaaaatacacaagccttaaaatacacaaagttaaaaattactcaatcagaaggaaacgaaaacgaattttgttgggaaacggatggtctggtatcggaaattccacaaatgtgccatcgatctgctgtacagacagtttgtgctttggtccttcgtccttgccaattttgatacatcgccaaagcgtaacttcctttttgccatcaaaatgcatgtccaccaaaacatcgtaaaagtcagaaagcaatgctattttgaggccgagtttagcatagtcaaagaagggcagaatattcatccaaatgtcgccgcacatccaacttaaaaacatggaaaaattaggaaaaaatggaaaattttgaaatttatcaaaatttccttaccgtctattcattttttgctgcaattaggacgctttgccgttttacaattaggtaattggtgacacaatcagaataaatagataattgttttgaaaattctttcctaaacaataagcaaatcgagcgacaacaaaaagtgtagagacgtaaaatgtgttttattcaaaacttttttctgttttaattattatgtgtatcttttacatatatctagggctgggatttttaggtgctaaaaacagggttcgcagatctgaggatttatcctcattttgtggctttttgataggtcaatgaggatttttttggaaaatgaggatttgaggatttttgtggctttttgagaaattttgaggatttttgaggcttttggggaaaatcctcagaatcttttaaattttgataaattggcataatgtttgtcaattatttaatttgaattttggtttttaatagagtatcaaacggaaatctcacccaaatttagccagaaaattacaattttttcgaaaatccacaaaattatgaatttttttaaatgaaaaaattttcatctgcgaaccctggctaaaatcctaaaaaggtactaaaataggtgctaaaaaagtgcaaaataggtgctaaaaacccccaaaaaggccaaaataggtgcgaaaataggtattaaaaattggaaaaaccaagtatatttatgttttttgaaattttttagatcgattcttggggtgcatttttcgtttttattgcatttttgctatgaaatttctggaaaaaggccaaaataggtgctaaaactcgaaaaatgccaaaataggtgctattcactcgaaaccctcgttttaggtgtttttaggtttttataagtcgctctaaatcaaaaattttcgaagaaaatgctatttttgggcttatctcgtcataattaagccgcaaaaaaataggtaaaaacctaaaaatcccagccctacatatatcaaattttctaattcattttagaaattcttgaagacatttgcagcaacaaaattaccagaaatgtgacagacatttgcggacggacatttgcggacaatttcggggaaaaaaatatattcttaaaaaatttttaaaaaaatctcaaaacatggaatggcgactgcaaaactaaataaaaatttatttttggcttttaaaggtatcatattttatttttacactttaaagaattaatttaactggccaaagtgagatgctgttccttaaaaaattttcggaaaggaaaaccgaaattccatggcacaaaaattacaggaatctgatattggaaatcgggatttcgtgcagctattgatttttgaatatggacctccaaattgataaaaatgagtactccgggattatttctctaaaatttttctttaacaaaaacgacaattattgggtattttatttatatcactttttagccctttctttcttctatcgaatgcattttgtttcagaaaaaaatatttgtctttttaacaaagacattgttgttaaatataggtgccaaagtggggaaaagcacattttttgacccccatgttacaattggtcaaaattggcacttcaagtttaaaatgtgtaaaaccgaacggactaattacgaactgttaatttgaaatagtgaaagtaaattttgttcatgattaagcatatcttcaaaatatttttttatatctaaaattaagagaaacgttctgatgagtccaaattttgcattgcatttaaaacaaaaatttttataaatattttttcccgaaattgtccgcaaatgtctggacgcgggcggaggagaagaaaaaaaaacatttttatactaaaatattagcgtagcaattaacgacggcttctgacagcaacaaaacaacaaagcagatcctgtgattttaataaacagcaatctctaccgttcttcgcatcaatttttttggtcctatctctgtcctagcccctgctactggtacaaaaccagaggtgccagatctgaggctttagcctcattttgtggttttttgataggacaatgaggctaaattttaaaaattgggcgccagcatgtttttccactataagtttctataacttttttctatgtcatccaaatccaacatttttgatatcattcgaaagcttaatgtatttagaaactttttataagctattacttcacgattagacaaatactaaaaccactgtatgtataatcattctgaaaaagtcgacatcatcgacgttttagcaggacgcttcacatagaccctttttgacatcttctgaaaatcccaattcagtcatcatatatgccctaaccgcatagtaaataccggaatcataagattcgacaccggaaattgacacctttaatgttttgacaaagctgtgcccaaaattttgaatgacaccgacgtgttgatcagcttcactgtccgtggtaatcggaatccaattgcttttgtcttttctctcaattgaagttgacaaataaagaaaagttttattgagatcacaaaactgattatctgaaaaatgtctaaagatatacggtccagattgatttattgctgaaagtggcagcaattcccgaatactggatttattaattgcaacgttcgtcggagggatgtcgaaaagtgaaaggcccccctcgagaccgtcctcactcgccgtgtcgattttcttgagagttgtcatttttaacttttttgtattatttattccatttatacctttagatgaaacttaactgatcatatacttgtttccggttcttattagtgatcagagacctttttcctttcccacattgttgtaacttgtcggtaaggttagtcaacccctgtcttgaatgttccctgacggcatcccttaaatcacgaccatgggcgatgtcactcagaactctctgcccagcggcgagcccctcatgtcctgcactcgaggcaatattcctcgcaataggggtcaagaaacgtgccacattaccaaggaacccgaatccccgttgatacttgcttccgacaaaatattgtttctgtcctcttccatgttggggagtgataaaagatgaccaatcgaccgactcgggatcgaaaaacacatgtgtcattttttaaaatatacttttcttaaaatgtaatgtaagaatacaacttccccagtgaaatttaacgaattcaccaaacggtgtgtgaatttcaattgtaatttctgaaattcgt

SEQ ID NO: 36 - DNA, 517 bp, Heterodera glycines
  unsure (1)..(517): unsure at all n locations
aaaagtaaaggcctcctgggcctttctgagaaaaagaaacttttcccagcatcgaggctggtgaaccctttgattattttaaaagctgttgttaaatcattgatttttcttctttcttctaatttgtgtaaatcagtgatttttagtctttccccatattttttgtacacaaacccacattttctaagttcttttcttgtgaaaaatttttgaacgcgctcaattttatctatatctttttttaaattagggttccaaactttggtggcatattctacttgaggtcgtacaaaagttttataggctgctgttagagtttttatttccctgcttttcaacactctcaaaatttggaaatttctaagatatgcgtttcgtataattttgctaatatgttctgaaaaattaagtttcgagtcaattataattcccaagtcacgtacactttccgattctgaatttttgagttaataaaatattcttttttcttgttatttttccctnaaataaagaacaa

SEQ ID NO: 37 - DNA, 1502 bp, Heterodera glycines
ggtcccgaatactcatggaaacacgtttttataatttaaaaaaattttatgtggcctaaactgcataagtaccgcagtatttaccaggttagcctcttcggcgcatcccaaaaaatatgtaaaaagtagagcccggacgggtccgtgcgcccgccgggcttttgccgggccacccgtgccaggaaatttgaaaaaacactggccccggccgcccggtaaaacggatttctttttggccgggcagcacgttcaattgtcatcaaagcccgggcacggccattttgaccgagttaaaacgggcctagatttcaccagtgcaaaaatttcaataaaatttccaaaaaaaaaatacctgacaagaaattttaggggctgacgggatgcagtaaaagcagggttgccagatctgaggatttatcctcattttgtggctttttgataaatgaggatttatttggaaaatgatgatttgaggatttttgtggctttttgagaaattttgaggatttttgaggcttttggggaaaatcctcagaatcttttaaattttgttaaattgacataatgtttggcaattatttaatttgaattttggtttttaatagagtagcaaacggaaatctcacccaaatttagccagaaaattacaattttttcgaaaatccacaaaattatgaatttttttaaatgaaaaaattttcatctgcgaaccctggctaaaatcctaaaaaggtactaaaataggtgctaaaaaagtgcaaaataggtgctaaaaacccccaaaaaggccaaaataggtgcgaaaataggtattaaaaattggaaaaaccaagtatatttatgttttttgaaattttttagatcgattcttggggtgcatttttcgtttttattgcatttttgctatgaaatttctggaaaaaggccaaaataggtgctaaaactcgaaaaatgccaaaataggtgcgaaaataggtattaaaaattggaaaaaccaagtatatttatgttttttgaaattttttagatcgattcttggggtgcatttttcgtttttattgcatttttgctatgaaatttctggaaaaaggccaaaataggtgctaaaactcgaaaaatgccaaaataggtgctattcactcgaaaccctcgttttaggtgtttttaggtttttataagtcgctctaaatcaaaaattttcgaagaaaatgctatttttgggcttatctcgtcataattaagccgcaaaaaaataggtaaaaacctaaaaatcccagccctacatatatcaaattttctaattcattttagaaattcttgaagacatttgcagcaacaaaattaccagaaatgtgacagacatttgcggacggacatttgcggacaatttcgaggaaaaaatatattcttaaaaaatttttaaaaaaatctcaaaacatggaatggcgactgcaaaactaaataaaaatttatttttggcttttaaaggtatcatattttat

SEQ ID NO: 38 - DNA, 22869 bp, Heterodera glycines
cagtagtataaggtcccaggggccggggtccagacccctgcccctgcttaaaaaaacacccatttttgttcttcatgattttgtcccaggtgccggggtccaaatccatgagaggattaattaaattaattcatccagaggcagagggactcgaacccaagaggtctaatccaaagcactaccattgggtcagcgatacagctatccgaaaaaggataattagcaattatatatatatatataatttaaaatcgattaattcaccaatgggagggggattcgaacccaagaggtcaaatccaacgcacaaccaattgaccgaggaacatagtcattcgaaaaaggatatttgtcagttatgtagtaaaaaaagtgttgcaagagtcaaaaatggacgggagaggggatgcaggcgacattctcccttttgcctatataaagggatatttgtaagcaaaaaaagcacaaagaaattttattaaaaaaaatgttcaacgcaccgtttacattaattttatccggcgctacgggaagtggaaaaactcaatggctattgaaacttttaaaacactacagcttgctaatcgcaccgcctcctgtaaaaatactctattgttattccgagatgaacgattctgtgatcgggttaatgaaacaaggaattgagacacataatggggtaccgacccaaacgttggttcaaagtatgcctaaacccctgcttttgatcctggacgacctgatgttgagtgtaaataacgattttttggatttattgttcacccgaggctcccataactgggatgtaagtgtgatttttgtaacacaaagtctctacggacgcaatattcgtaccgcaagagccaacagccattatttggttttaacccggaatccttctggtcaacttcaggtcagaacggtgggctctcaattgtttccgaagaggctaaactattttatggaggcatacaacgatgcaaccagcgaaccattcagctatttggttataaatatgcatcctaatgcgcccgagtctgaacgtttaacaactaaaatcttcccggatgaacagcgtgaggtgtacctaccaattgaataaagaaagggtataaaaggttgagaaaatctgtaaccttcactacaaatgtatgaatttagtccatatataagtgaaaacgcagaatttttttaaaaaattgcctctacgaaatcggaaaaaaagaaaaacatccttctgcgagacgaaacagccgaacaaatattagggcttgttgaaatttgcgcaaacatattaaaattcaattttagcctaaacagaaaccaaaggaaacggttggccgaatacgcggactattatcgtgcaattgcacgctcgcgtagtgaaaagactgcgagaaaaaggctacaacagggaagtggtatagcattaggggcaatattagtgcctattcttggcgcactagctcaacacctggtcgagaaaattacgacctgacaagagagagctacaatgaaatatacaaaaaagatggttatggtgccagagagtgagtatttggccctcattaatctactgaaaggaaacagcaccgtatctcctcctctaggcgacccgttacatggcgagaaaacgctgcttgatgtacagattcaaaagaatttggttgatccaaaaacgaacgcagaaataaaaatgaagcgtcactcatggttgtacaaacgtagacaccaactaaaagatattattgagaacaaacctcaaaaagtaattgttgagagtggctcagttacagcaccaaacgttgcaccgtatatgggcattcagaaacaacaaacaccgtcgcatgtgagcacaccacaccgcaactcggcttcaattcaatcaattggtgcagtaagtaagagcaacactgatgtagaagaggacacggacttttcaactgcttctgatcagtttgagcctgctgctgatgctgctactacttcgtcaaagaaaacaccgcatcaaaagacgccaaccgttcctttaaggaccagcccgaaaaatttcccaaaaatgatgggcattatcgggaaggatcacaaaaaattcggtgtcaacgcaagcagcggagaaattttgactaatttcaataaacccgtttcaggctctcattttaccgaatcgttaaagcatttgacaggtcagcgcgaagatgtgcccagaggacatcgcttcttcattcaacgcatctcaaaagacccggaaatgatgaaactgcttcaaaaaataccacaaacgggggaaggccggcggcgcagcacagtgaagaaaatgggaaagaaaaaattagtgcttgtcaatatgatgaattcaccgtctataaaaaccctaggattacaccgaacggaaccaaaacgcaaatttaaacctgaattatggacaagactatagcaccaaagcagccgactgtggataaattattggaacaaatttattacgatttacgctcaccggccagctatgctggtatgctaaaagtttgggaggaggccaagagaagagatcctcgaatttccttacacaatgtctatgaatttcttcatcgccaacgcacttacacattgtttaagccacggagaaacaaatttcctaggctcaaaacggtgccgagtggcctgcatacagattggcaatgtgacctgtgcattatggatacgttaagggcgcataatgacggttaccgctacattttggtttgtatcgatgtgcttagtagaaaaatttttaccgcagagtcggagtcgaagaaaagcgaacacatgattgaagcatttgaaaaggtgttcaaaaaagctggtgtgctgcctaacaaactatacagtgatgcaggtttggagttccaagcaaaacggatgattgaatactggaagcaaaaggatataatcaaacacataatgtacagtcctagcctgcatgcgggtgtggttgaacgggcgaatcgaacactcaaggggcgcttatacaaatattttagcgaaaataacactctaaggtggttaggggtgatagataaaatcgcaaataatgtgaacagtactacaaatcgtaccattggtacaaatccggcttctgtaacctttaagaatgctccgacgttaagaaaacgcctatataaagaacacactgatgacaaggaaatcaaaataaacacaaaattcaaatttggtgatattgtaagaattagcaaagagaaaggccaattttcaaaaggttactatcccaattttacagacgaactttttagggtccaacgtgtaaacaacacagacccgcactcgtacagaatacgtgatttgaacggagaagacataaagggaattttctacgatcaagaacttgtaaagacaacggaaaacggtacccatcgcgcagaagtgctaaaatcgcgtacacgaaacggagtcaaagaacatttcgtccgttgggttggcttgtctgacaaatacaacagctgggtccgtgactcagacctagtgaaacgccgagcatttgaataaagctaaataatggaagatttttacattgtacttccctcaaacacacctggtccaggaaatactgcctcaaattttacggttagacttccgcacaccttagagcttgactccaaatggtccgtcgcgttatcagcaataatctatccatattcattcccgtcgatcagtgtggacgaggatgactctatctctgtcaaactggttaatcctaactacagagaagatgctggaaattctgacgaggaatcgcaaaagtttatcaatttatcagtgaagattccaaatgtacaattccaaagtgtacaaagtttacaaaaaacactgaatcagataatccagaatgcttacgatacaaagtttggcggctcatcatcattaaatgatggtacaaccaacaaaagagccaaacgacaaaccgaattgtcagaaacaggcgctggagttatcgaagtagagaatttcttcactcgaaatccctttgactattggcaacagattggagaactgagaaaaaagcactatcagctcagagaaagggttgaaaaaatggcaaaggagtacaattcaacagcggatggcgaacgaaaaacatttctctcaacggaacttggggtttttcaggggcgagaaacttttctgaaagaacatttgcatttgattgaagaagaggcgaagagaagggacggtgagcagcaagaagccaatgaacaaagactcattgaccgtttctttgcccgataccccgacaattatagagagcagctggacgaatggaggtcaagttacctccgagatgtgctagatctacaaacaaagatgggagagtatgaaggagttaaagatttgaaaaggcttgaagagctcaattcgcaaaccgaacgaatgagaaattccatacacgtttttggaagaaagatggaaatattaaacaacgcagcattgcaacgtgaccagaaaaggtctcaagaggagtttgaacggacaagccatgaacaaaacctgaccttcgtccaagaattcttccaagccaatcccgtgaattattggcaagcaatccagaaaaattatgaagcgcttcagcttgagtacaccaagaagagggaattgagggaaaagcttgaatttgaaactgacgcaacggaaagggagtcgctgcagcgacaaatagagagcattcaacgtctgattgactacaggcgtaaacggtttgccgctttggaatacgaggctaaaaaaagagatgcgcagacagggaaaactaactcaggcctcagtgctgtagctgaggggtcaaatagtactagttccaccccaatagactccttttcaccagcagatgagcccgcaaacccagacgaagaaaatgctaccaatagtaaaaacaaccaccaacaaaacatcactactactgccaccgctactttatcatccgagacaccagctgagcaaattttagcagatcaagataatagtattgatgagaaagacgaagcaggtacgccgccatcaagtgggttaggacagtccggtgatgcttctgctacatcagtgactcaagttgaagatggtcgaaatttacctcaagcagccgcgttgacctccaataacccaaaaattgttgctaaacaatcaacggtagcgacagagagaaggaaggagaaaataattgaaaagctgatcgacgaacaagtggaccgaatggtcgacggaacacatgcacagcagaagatgctacaggaagaaggtaaagacaacgagagtcaacaccgcatttcaacatataaactcatcgaagaagtgctacatggtgagcatggacagctaatgtcgcaacagcgtgaatccaaaatggcagctgaatttgcatacaatgaaataactcagcgattcggcattagaatgggccccggagtaatgcacgttgatttgagcaaacagctgtcctatgtgttggggtttgatcgcaaaacacgcatttacaacaatcagtcggcaaaatatccacctgatctgtctggtggtgtccgtcagctgtacgtttacgcgcctaaactggtggaggattccattataggtgaccgcatggcaccgttgctgcgagttgtcaacgtgtcagggacaccagggttggacatgccagaggttatatataccaatgaaatttttcattctctccaaaataaacgcatttctgaaattaacattgaaattcagacagcatttggacgttacgtaaaatttggttggggaactaccgtaatcacattacattttagacaaaaactattttagcaaaaaaaacgatagttatgacgcacgttgtttttaacccggacaacgtgaattggtccgcgttccttgcgttacagcagcagcaggagggaagcggtgagctgcagtattttgtaggcaataaatttcagcgtggtggcggtctgttacaaaatatttcgcggttcctgatgcctgtagccacaaacctgctaaagtctgcctcaaaagagggcatttccgcagggacacggatgcttgacgatctcgcgcagggaaaggcgtttaaagagtctctcaaaactcaggcaaagcaaggatttgagaatctggccgaaaagctcaaccaatgcggaaagggtgggcggcaacggcacaagacaatcactcatagaaaaaataaaaaaactggtacaatgagagggaaacggcagatcatcgatcaactaacacttgcacattaacattcggcaccacacgaagcctataaataggtaggataattttaatttttttcactaacgactacactctcaacaacatacattaaatattttgagagaaacatactaaccaaaaaactcagtggaaaatgagcgtaattaaaaagattgacaaagacagtgttgagggtctggaaggaagtctgtcattattctctttgccgccaaccaatgtggccataaataagacaaacgtccgtgaattgctgcctctttctgcacttaatcagacaggtccctatttgtttcgcctgttctcggacagtcaattttgtgacttgagcaaaacctatatgtacctgctcagctcaattgaacggaagaatgacgcgggagaatgggtagcactcagtgacacggacccaaacgataaacatgttggcgtcattcaaaactttgctagcagctttgtccgctcgctgaaggtcaatatttcaggcattgaggtgtttgacagttcaatttattatcactaccgcgactacataatgaaggagttgggttattcacaggaaattcgcaaggctttccatgaggcatcgtgctactacgcagacgatgatgaccagaacagcgcaacaaacccaggttttaccgcacgtgcggcacgcttttcaggtggtaaacagtgtgagacaatggtaaaactgaattttgatttggcacgtcaaagtgcattgatgttgaacaatcaggatgtaatattcaccattcaccgcaacaatgattcattcctcctgcttacacccccatacaaaaaaccagatggtacacagcaggaaaataagaaagagtaccgcatccgtgtgcatgatatgcgtctctatgtgcgcactgtggacgtaacaccaagccttaaccttgccattagccgacaattagagtcgacttcagcaaaatatccgctgcgtaaaattgagatgaggtccatttttcttggcacaggccggaccgagctggcacacaatgtgttcacttctacgttacctcgtcgtttaatttgcactttcgtttcaaccgatgcatattccggtaaccgaaaaatgtcaccctacaagtttgaacacgccaatgtacgttcgattagtgtcgaggcgaacgggcagacctttcccagcaccccgtatttgctgtccttcgatggtgtacagccccgctttgtccgtgcttttgtcgacatgtacgcaggcctgggtttggatgactccgacaccaaaacggtctcaattgggatgcagcgttttcttaacggttgggcctttttcgtcattccgctgacttccactctggaggacacacctggttttgagctgatcaggcaaggcacatgcacgataaaggtgcaatttgagcagcctataaaaacggatggatatgagatgcttgtccttggcgaattcgattctgtgttgtccattaacgcagaccgggttctgagtacagacggaagtgtgtaattgcaattgactgacactgaaaagcaacaatgaattcagctcaattggaaataattctgaaaaggttgcgccctaccaaaaataaattcattggtgttttcccatcggatcgaattccgaagcgggtatctaaatttccccattgcatggtcgtaaatacgggcaaagaagggacacgaggtgaacattgggtggcttgctatgctttaagccatagaagcgttgaatattttgacagtcttggtgagcccccaaaccccgatttagcagcctacctcaacacatttaaagaggtactggtcgctaaagatcaaattcaatttcccacatccgatacgtgtggccatttttgtatatattttttggcaagccgatgttctggcattcctttctgccgtgtgattgagactttgcgcaagactcgaggcatggcagattacctcgtgaaatggtttgtcagaaacttgatcaacggtctataaaagctcacgtttcctaagcagtaagaaagatgctggttcatttcatgaatgttttttacgcgggtatagtcctcagctgtgtgccgtcacgattgcaatcggagctgataaatgtagattttacggttgacaatcaaaactattttgacagcggcaaatatcgtaccttttcaaaagatgctacagcagcagaacactttggttatagtcggaatacagcgtgccgaatagagaaatgtgagcgtgacagcgaatgggccgtttcgcttcaaaatgtgtacactttgcacagctatcagagtgtgtttttcgaaatgaaatcattggtgaaaatgtcaccattggcctgttttgaatacaatgggcatagttttaccttttttgaagacagcgaatctggtgagactactatcttccgtggtcaccagcataagattgtgcaacgactgtccaaacatggacgggttgtgtttgatcacctatcgggtcgattgtttctgatcgataagtatcagaggcggatcagcgaaatagagcttgaatacctggagcattggtggcttcgaaaaaaccaatcttccgcacatacgatcttgaagagcaattttgtcgcttttcttccaccagataaaagcgactttactttggcggacaaccatgtgtttgtgatcagagaccagcgcatctataaatttcacattggcgactatgcaaaagggaatcgtgcgctaacttttgtaaccaattcaaatgatgtccgctttaattatctaatctataaacccaaagaccaaaatgttagccgtggtgtttttgcccatctacgcatgtcggacgcatggatgccgatatcgtacctgttcaatctgctcctaattgtactgtgcacatacatacttaaacagctacggcgagtaaaccgacagagtccgcttaacgtgtccgatagcgccgattattacagcagcccgttcattgacgacgcttattcgccccaacatcaacaattgctgaacataccgtatgaaactgaaacatcgagtgatcaaagtggtggagcccgtagtcggagtatttaaagaacgattttttgttgtttggattcagttggccatttgtttcctacattttaagaaaagctattgtcattttacataattgtcacaatatatttacctgcttattgcatgcaaagggcaatccgttatctgatcgacagttacgggctgagcagtgtagacgatctgtacacctgcttgaaagaagaaattaaaagtgggcctgaaggtgggaattgtctctatcccaacccgctttgtgctgttgactgtgtacacgttgcaaacgctgatcatccgaaccaacctgtgcatattgacgggtcgcttgaattgattgctgacgttgaattgtactcaacatgctatccgaagaggaagttcgaaggaatagtgtggtaagcctactaaacaaaaaatattttttgtcaatatccatttttaaggagcgaacctctgtatgtggagctgaaagatctgaagatttgtccgggcgactcgccgctgtgtctatcgcgccatttcgaactaccgaacagcaacaacaacaacatggacctgatagtcgacgagctggatctatccaactattggagcgacgacgagcgcgaaaacgagactacaacttggtgagagtgctgtgccgattcaataactgtggtccctaccgactcgctaaacagctacagaaacggaggaccgaaaatctcacctatcttaatcggttagacattgaaactgctcatcttaggaaaaatatcaaagttataccggatgctttatgcccaaatggggctaatcaggtgtttgcttatcgcggattcctcggaatcaccgttcaacaacatttgtattctcgccaccgtgtcatgctaaagtacccgggtttaccatgcattgttcaatttggcggtggttaccaccgtgacctatttcccattgaattgttacgagtcgctaatgccgaaatgcatagcgaaatagcttaaatttctatctttttcccaatcacccaattatgtcatgaatacgattgttgcaggataaatttttactcgaataaattgcgctttcagggttaacaataggaaggggctagaatttccctttttctatcaatttttgcggtccagatagaccgttgaggttggttcatccaaatccttctcactattgctggagtccatatcttctttcttaacagcctgggcctgagcagacaaaaactcaacgctgacggtcttggcttcatcacgaccgcgcgtgtccatccattttttggccttctcttccgatcgacgaattcttataagaatgaaccgactattggcacgaagcagattttcttttgaaacatacttttccataatttcttcaacgctatccacgaaaaaatcgacggtgtcttcgtcgctttcctcaccgcctatatccgcttccatttttgaatattttttttcaatgttgtcgagtgcttcagccctgcaacaaaaaaagaattagctatccatgtgaaacccgaaccaagtctgccttgctcgacaagaaagtaacgggagcgggtagcttctttttcgattgcgcacctccttccctgtatttttcttgctaccattgtcgtcgttctttccgctgttgccacctttgtcatctttgccggacatttcttatctgatttctaacgcaaatagataaaactttacgattattgtcaaaatattccgttgaaaatcagacagtaaatttagaacatgacgaataatttgtagtgtatttttattaaaatcacaattatttttattcatatccaaacggaaagacttcatactgctcatttattattcctttttggcacacaggcacatattttttgcgcatctctctcgtgataatgcgactatcacgtgtcggcattattttgttgtagcgaaatactgagggtgcatttccattattgtcgctgtcatcgttatggtgatcgttgttgccgatgttaacattcctgccataggtggccaccttttgctgaaaattctcaaactgcagagctttactattgttcacatcaaatgttatgccacgaatctttaggacgtattcaactgctccagtgctcttgtctttcatacgaaaaccgtattgtttggcaccttgaacatgtttgttttttcataaataaataataggcaaattctataacctccgcagacaaaggttttgatattgtagttgaggtactcctcgctcatttgacctaaatattctccagtctgtattggcgcaacgtcacgcttgtgcaatacaacaacactgtcggtgtcctatgaatttgatgttttttttcaagagccattaaagaaaaaaatgaccgtatatagtagttttgctccttcggtgcgctcaatttgagtcataaagtcgagcaatttaaggcgggcgcggcttgtagtccataaacttaggacgatgttgctggatgagtgttccgtgatgaaatttcttttgtgcttgtaaagaactcttacagccctgtccgataaagggataatagctgttacttcctaaagaaatatattagaaaaaactatatcttgttactgctcacaatcgcatgatctaaaataatgtcgaaaaactcttgtggtctggtaatcactttattcacacccagctcatttctcatgctgaacttgcccctaaagtgaaaataaggctgctacagaaagaataaagtctttaaccaaccataggctattgagcattaactttgcaatgaatctcagtccaggatttttacacacatgccccaggtccaaattgacaccgtatgtccgtctatattcttccgcgtattggtgccgttgttcagcacagaccacaccgtcaggaaaaccgctggcctcaatctgccaaaaacgatgttccgttacgtaaatgtggtcacttaccttaagctttatgagaagtctgacgtagtctttgaatatttcgtcgctcctaaattgaaaaaaaatgtacaattaatcttcccgccggtacgcacccataccattcgtcgtagtgccaggctctccagaatctgtccactctgtagcctgattccaacgcacgttccagttcaatgtgtgtgtagttgccagtaaacgcacgttgctcatctgtgtgtatacatttatgtgttcggcgcgtatttgtctttcggaatgctgttgcacaatggtggcagcagcagaacaggaggcggtcgtcaattttgagtggtaaaacgggtattcgaagcccccgcggagggattacgcggacccgatagattccacgatattgtaattgctcagcccgagtccaatcgacaagcatctcctcagcggtcgggtggattaccgacggaacgccaaccggatagtcggcggaataatttacccatggatatagcgatataatatcgaaaactgatattttttcgtcctctttaggctcggcgatcagctgaagtggcccggttctaccgccataataggcctgtcgtgggtcaatcggtccccgatccgttcccagatcggcaaaaaaatctcgcatttcgtcgtctcttttgagctgttctctgatctggcattcccaaactgcctcaatctctagcctgctgtgcaaatcgcctggaggtccacgtagcttcaataaacgtagatgggtcagctcgttgagctctctgcacgtttttccgtcgaccaacttgtcttcgggtttgaaacagcgttcacatccgtgccagtagcaccccagcacttcgatgcatttattttgctcctcaatccaaccatccaacctaaattgctgccaacgcttttcaagcccgtttccagcgtgctgtattcgtgttccgtctttttttgagcgccagtcaaggtattttatggcaaaaacactggcacgatcgtttctctcataaccacattcgggtacgatggctagctgattttccttcaaaaattgtcctttgaagatggtcatgcagacactgaacagagagtgacagttaacagccttcgtttcctcgttgttcctcatctgttaactgaacctggcaattgtagcgctgagaggtaacacatcaaatcctccggtaacctcgtccatcaatattcgccgaaattcgataatcgcggagagcaaaatttctgtgtcgttttggcagtagagacgcaactcctgcgtcagcgaaaatggagtgtttttgttttcttcgtacctgctcgttttgttattagagtttcgaatcatctcctcactcattctacataccattttataaacttatcatatttgtcttgcctcattgaccctgggtaatagtcgttcattggcggcagatgttgcaaatttacattataattttcactaaatttcacagaaatcgttaacttttaccatagtttttaatgctaactgccgattgaatgcgtatggaaaaaacggcttgtccgcacaatccaaactgaacgtttttggcaaatcctcgagtcggattggcataagaagacaagaatcccgccatgtgagcagtgaatgacgtctcgaatgttggaggcggaattcaaaaattttaagcccgttcattacaacatccgggcggcgtttagtttcgcccaaatactttaacacaaagtggccgtcaaatcgtgatgcgttgtgcgcctgatttcaaaaacacgtgtagataagaaaggtttggcgtgttaaatgggtttaacccacccaaatataagttttaaatttgttagtccatgcgcgcataatccattctacaaactctgagattggctcgtgtccttcagcttcgctcctattaatagacgatgaacctttacataatgtatgggcagaaattttaacaacgcactgaccaattttttagccgatccaacgttccatacacggtcgtgcaaatttggcaattggtccgagcccgattcgcagaatcacaacattctgtgcatgttatcctcgcagaaagataattcactttgtgacgctgatgaccggctatttcaaggggttcgagtctggtctccgtgtcccagcatattatgcgatactgctgcttctcttttggcaccataatcttcttaatgaaacaaccggcatccttctcatggtacacctacgaccatttattatttacgttagccagatattgacgaaaaataccctgcatcgtgtacaaaaagaagtgtagcatttatgagggcgtttaggatcctgttggaaggtacggctacatctgggacaacgcttaagcaaattgcaggtctgactgcgtcggtggccatcaaagcacgtttgggagaagaaaaagcgattacattgctgacagtgaagacataccccttgctctctattgcatggatattggggtccaacttaagcaaaaataagaaataataaagctataaaaattatttggaaactacctttagcacattgtggacagcgacttttgcacgatattgtgtgtttagtgtcacggttgtaggcacattcgcagtccagacaatattttcggcctaatttgaagaagcagtgtatctttttgatgccaaaatagtgtccttcggacacaaaaagcgacacatagatgcggcgtcccatagggcccttccaaatcgggcgaggcagttcctcggaatggtcttcgaacagaacaatccggtacaaaccagcgtaggtttggtcctgtttttcgtattaaagaataagctgattttgctaatagcattcacccaaaattgttgaatttgcacgaggtgctccatcccatatgcatcttcgtctgtcggaatccctgcagtatgcatcagctccgccacggcagttttcatccgttctcggtttgacacaagtcggttcaacgcctcgtaaccagcacaaaagtccggcctcgtcatcactcgtcgaacgatttcagctggcacggcaccctgcgggccaccatcctcttccgcctcagccgcccgtcgcgaagacaacttcaaaaactcttggtctgtgtatgcacgagtggcaatcaacgcatggaatagacaataattgtcatccatatgcataatgcgaatcatctgccggtcatcatagccccaatgttggtattggtggaaacgtggcgcagcgccaaccggaggcgcgatgcacgtgacaataatttcaatcggttcgctgagcaacagtgagcgtttgcttatccctccaccgtgcacgtcctcatcaccgtccgactggccaagcttgtctagttcagccatcaaaacttctgctgtgttttgctccggcgggcggattggcagcacaatcggatcactcagacctgttgggcagagaaaaatcagccgccaacataaaggaaacaagtgttccctcctcccggtcaatcccacctctcccattcaacaatatgccaagtctggtgacttgacgcttgcgacgactgtcgctcaaatctccccttgctccacttccggtttgctgtttggggtcctccgcatttcggatcgcacgctcaatgatgtgtttaaaagtgcgctggagctcctcttccggctcatcgtgctgcccgttgagcaaaaattcggtcacgtgacgttgcatagcgaatcgttccactcgatgcacataatagtgtctctgttcaaacaacggcggtgatttcggcctgttctctccagtcgctgcatccatatcaaagtgggacattgtcttgaaatcccaactttgccgtctcggtcgtttgaccatgcattcttcgtctccgccacgatgatcggtcaatgctgaagccttcacagtgtctgcttctacccttttcatcgtgtgttttgcaggtatattttcttaataacttcgcccaaaatagagcaaggattggtgcaaaatataattcaaaatagatttttcgtttcgataactaaatcggttcaatgtgaccattattcaaaggaaaattttattcataacaatctttttgcaagcgacctatcatttttccgcctttgacatagtccagccctcttcgcaaggcggcagaccgctcaattctttttggcccgcttcttcggtggaccgcctcctgatggagcaaatgcattgtcactactatcaagcgcaattatttccccgtcttcagctccgtctccatctccaaattgcccgttattagtcaccgttggctcctccatctgcattttttcaccttcaattagggccgaaatgacccagtctagcaatccatgctctccttttgcctaaaacgaggcgagaagtcgaatacagttagtatcaaacgatggaaaaatggtgccgaccttaagagtcagcttgacgcagactatttggccaattttcgactcaagcatcgcctccaccttctcaggtcgctgctcaaccatgtcggcaaattggtctaccttcatatccaggtaactctcagcaaccgaagcgaacatggtcgcatgttggctaatttccatgtctccgcaatcgtgcaattccagacgcatatacagaccgcggagcggtctgttggcgcgatgcatgcatattccgcagaagctgtcgtcgtcgagcttctttttacacagcatgcctctatttttaagggggcacgcctaaaacgttgatttttaagagaaacatacaacggcagatacttaaagcatttaataccttatacaaagagaattgcaagtccgtgactttggcatttgcgtaaaaaactccaggggcattgaagttttttagatctcgcaaatgtttaagaacggtaggaaattcctcagaaacgcgcttcttcggtgaagcggcaatttcgaaacgtttcaggcaattcattttatgggtaatgtgctaaaaccagttataaaaattttatataaatttaaatatagcttgattagcttaacaaataaaaataaaaatgctaattaaaatattttttatactgatcaaaatgaaatatcggtgaaataaatgctatatatataacagtttgaagtgcctcatatccttaattaaaaattattaattttcattacggaaattcattacctaaatatcggcggctaaaaccatgagcagaaaatcttcaaaatcttaaaataagctatattataaaatgcacttactgataaaattttacggatattaatgcggcctgtggcacaaacatcgacagtacgaaatgaaggcataagccgctgaagcataatgcacatatgcataaagtcgtcaaacaataaacaacatgaaaaggtgacgaagtcaaaaatactcaagaaaaatctaccggtacgcgtccgatcgaatcggcgcagaagaatttgaaaaaatggcgtagtaaaattgaagcctgaaaagtacaataattttttttaaataaaaaataccgtattgggctaatgcattttgaagctgccgcatagacaaaaagccaaggttctcgctcaatttgacgaaatcatatttccaatcgtttacatgctgtaaattcagtaaacaacaataaattcatcatttcctacattccaaagcgccttaaaatcttcatagccgacatatccatttcttaaagtgtcaaattggactactaaaagacggcatgtgtcgagattaaacggccgcgatgtcccatttgttagagcgcgctgcaatttaacggctgttaactgtccagaaccgtcgttgtctattttgttgaatttttgctctataaggagcgaggctgtggattttctatccattttagacaatataatctaaagtttccaaattattccgaggttttatttctcgaaattagaaggttataagcaaattaaaggctggcatttagatttagaaaaatatgagataactacacatataatcaggtttgattttaaatgagcataaaaaaaggtttgatttgataatttaaccatcagtaaattttggtaaaaatatttaaacgatgaaattaatgcgaataaaaacaaaaaaatttcaataaaattttagtggtttatggttatctcgggttgaaaaataaatgcaaaccctatggagctatgcgcgaatgttttgggaacaaatacacgaggcacaaacgcatacacaccatatataaatcgtttatttcactttacagaagtttatatgtgcataaaaattccataagctataattattttcagagaacactaaaattaaacaaatcccgcgaaaatgtgaaaaataaagttatatgagttcaaaaaaaagccaatttcaagtgctcaaaacgaaaattattagcaacgtactaaaggttttaaaaagtaataaaaataaacaaaataaaatcaacagttaaatttaattttacaattttatcaatttgataagaaaaagacaaataatagcttggattttaattgtcatgttaaatgacgaaataattgctagaactcgaaaaattagtgagagttatatttatctttaatttcaacatgctgccggtgccggtgacagggaaaaaaaattgaaattttatggcccttttggcaagtattcgatttttaaaaagagttttggagtacagcgcaggattatggaaaaattttaaaatagttgataaaaaaaaagtttaataaaccaaaatagctggcaataagcaaaaactccaaaagctgataaaaaagaccaaaaaaaaaacttttgaagaaactgattatatatgttatctgtaaattagtttaaaacaaaaaaaaattgaccttggaaaataacgggttaacgggtcatatcctacaatatcattgacacgagtgagagttatgtttttctttgtatttcagcatgctgctgataccggtgacagaaaaaaatgaaattttatggcccttttggcaagtattcgtttattaaaacagttttggagtacaacgcgggattatggcaaaattttaaaatagttgataaaaaaaagttaataaaccaaaatagctggcaatagacaaaactccaaaagctgataaaaaagaccaaaaaaaaaaaacttttgaagaaactgattatatgtgttatctgtaaattagtttaaaacaaaaaaattgaccttggaaaataacgggttaacgggtaattagtagggcatccaaaaatatgcacataaaatcgcaaaatatgcgcataaaatatgcatcaaaaatggcaaaatatgcacataaaaagtgaaaaatatgcacataaatttttccaaattgagggtataatttttcaaaatttctttaaattcgctaaacgcaaagtaaaatttcataaatggttaaatatggcattaaaaacatgatacagcttaaaaattactcattttagcgaaaaatcaacctgaaaagcgaaattttcgcttttttgcttatttctgacataaattaacgaatttttaagaaaattgaatttaatcaatatttttgacaaaattttgataaaaaaatgtctttttcggaaattttttcggtctttaggggtcaaaaagtccaatttacctgatgggggccgttttaataggggttttttgaaaaaatgccaaatatgcacataaaatatgcacaaaatgccaaaatatgcaaatatgcacataaatcgcgaaatatgcacaaatatgcatatgaaaagtcatcctagaagcttcaaatcaagctaaaaacatgtttttcgtgcgtttcaggcctcccacagtccaggaaaaaaatatgcatgtgcatatttttggatgccctagtaattagatatggatttgtgtactccatgtggagtcaatttttataagattttggtaaaaaaaaggttaagctcaaactgaatggctaaattgcgataaaggataacggttttgccaagtggcataaagttttggataaggatttaccgatttaatgggacataaaagcattttttattaggctgtataaagaaaaatgccgatagctaataaaatcaccaaccaactctctggccaatcactgacgagtgcaggccgctatctctctgagtgttttctgcgccgtagaaatggatgttgtagttggagtttacaattaaacgaaagcttaatgaatgctaactgccttctgtgagcatcttttatactcattcatagcataaaaagttggtctttggccatgtctagacaaataacctgttaaagtaaaacatgatcaaaaatgcttctgtgtgtataatttttttgggtaggccatatgctcattaaatcagattattttaactaatgtttgcctagggaattaaatttggtcctccaagtgtctggcgtttgacatttatctcagtgattaattgccggctgacggcgaataaagaagcttagcgctaaacattttttatctccggtgaccatcttgcgcttcatcggctggtcatgtgcagttcacccgttccattccactccgacgactatttcaccggttggtcatgtgcaatgcagccgttcggttccgctccggcgaccatcttgcgcttcatcggctcgcgcatgtgcaaccgttccgttgaacgttaatcctccgaaaaaagcagacaagcagacactttgataggctatttaaatgagatttcttctgatgatcataagcatttgtaatgaatcggagagggcgttcagtgccaccaaagggcgtaaatagcgaaagtaattgtgcaaactgcccattggaccatgcgttccgtttctttcaacgtttgcacgatgcccgcggcggaaaacgtttagtgtcaacccctccggcatttatttttcaagaccgaagactcccgcctttatgtatgccaatttagaaatttccacacgccccatttaattaagtgccaaaaatatattccgaaatgccgtctgattcgactgacaattccaccaaccgcggagcaaaacggagcgcggacgcggtcaagcgctcgatggacctggaaaaattgaaggacgacaaacggaagcgtcgtcagcatagacatgaagaaggcatcagaaggcaaaaagcactgctcctgctccaatccgagtttcggacggcgcgtgaggctgtccagagcgggcatttcaaattagtgtgcacacccaattcaatcaatttgaccgtcccgacgcttgtgagttgccttttttagtttttgagggggttgtggccaaatccttccgatacatccattcataaaatgacatttttccttgtttgccagagacgttcgcctttttttatggccataaagcaagaagcggtgcaatccataacgccaactgacccccgttctgctgctcccgcccctttaagtcacactgtgccggtttctactagttgtcagtgcttttgttttgaaatggcatgtcgtgaccgtccttgttgattttcagctattgctcccgttccgttggcctcagttgtagtctccacatgccctcccccgccggtgccaccgaaacttcaatctgttgctcattctggaccgttgactcgaactgctgctggttcgtcaaaaatgcactcgaaaaacaaggcgcaaaaaaaaccctattcatccgatgatagcacgtggagcgatggatccgagggaccatcggaaccaaagagaaggatgataatttgctcggatgatgatgaaaaaatggaggggtaaaattaggccgcaaatgaattttgaattgaaaaatggttgtgacacaattcatttttgaatttgttgctcgcgtttttagatgttctttgtgttattgttgctttttaagtttaaatacataactctttacctttaagtggtggctttaaattaattaataatgacccgatactcttctgattttaatttaattatttttaaattaattcgtagttgcacaatgctcctatcttaagtacatatcgcagacattttcccctcgttcagatttccacgtgagtaccccctcccctgtcggcgcaaattgaattccttcgccgttcactgagtagtcgcatttttaacacccccagtgtaggtcaataattttgtttgccgttattttgttcagattatcattatatttttaacagttagccgtctgatataagcgaatacatggctaaacggtattgagacaggtttaaaagcgctcataatagttcgaatccgcctgcaaagaaaaatatttattagcattaaaattaagttgaagacattgaccaaaaaaatatgaaactaaagtgtttgagtaagccttataactcaagtttctggcaaaaatcgaaaatggttgaaagggtgtgattggttttgtgacgggttaatgtatttggattaatagagtttgtttgtatagtgggcaaaatctttttcggatagctgacccgttggtcgaatgccattgctttggattcggctctagggttctaatcccaatgcctgtgtgcgaattaattaggccctatctagggcatggatttgaacaacggtccttgggacctaaatcctgggtaataatgggtgtttttttaagcagggg

SEQ ID NO: 39 - DNA, 16472 bp, Heterodera glycines
tattaactttttactgttattctgtatttttctattcctccacggaactataatatttccctttgattaaattttttcctttatgctatattttcgtataaatgtttttccttcatacaaagaactgactggaaattctaatacaattataggtagagcatgaagcaggacgatatcgcgcgcgagaatttacgatttaaattaaattattggttttaattcaatagaataaatgtgcgtataactttataaaacattaaaactattaagattaaattaaattaaatttttatatttttccgtttgaaatttttctcccaagaaaagtttattgccatctgccgcattcaaaacatttttatttctctttaaattcagatttgtttttgtataatgagcctgttgggcgtatcaattttgttgcaattttgctatttgcactataaatgtttttttgctaaatgaagtactgaattaaaattctaatacaattaaaggtagatcaataagcagaactggatcccgcgagagttttgcggtaaccaggccacaattataaatttcccgggattaatcccgctggatcccgtctggtaacattttgagtctcaatcccgcagaaggacacgcaaatttgctttttgtgcgtgaacccagcgggaccagtattgaatttttttttgttgagaaattcaaaggacattatgccaaatattttctattacaataaatcaaaattttgataaatgttaatattgaattatagaaataaatttatcataataattagggatgtcaaaaatatgtacaaaagatggtcaaaatatgtacataatatgtaaaaaaaatcccgaaatatgtaagaaaaacccaaaatatgtaccaaatatgtaaataaaatttttaaaatggttatttttttggaaaaaaaattcttcggaaagggtgaaataggcacaaaatgccatcccgaaatatgtaaaatatgtataaaaccccgaaatatgtaaataaaagtccaaacttttgtttgcaaacacaaaaaagaaaatgtttttcctactaattagagcatgtagaatccaggaaaaaaaatatgtatttacataaaattgacatccctaataataatatttctaaacgatggtcgaaaataaataaatatgccaacttccattctttaaattcataatcattatcaataaatttatttttaacaatattttatttaaaagtgtcttgtttcttttacattttttattattttaatgtaaacatgtaatttgtagtgtatacaaaaattttaggcataattttaatttcgtttatagatttttttaggattaaataaattattatgccttgttgtgaaaaaattttaaaaaataagctcgaaaatttcaagagaatgtaattaaattaaaaatgaattttattttaataccttttctgaaacatttcagataaaaaaatagaataaaaaataaagcaaataaattttatttctattaattttttttagtgtttttgacgttggaggccaaaggtcagaacggcgaaaatggattcacttttttgacgatgtaaatgcaattatttttgttgctgccatcaatgaatatgatcaaaaactgcgtgaagacaataaaacggtaattttaaaccaattaaatctaatcaaaataattaattttttcttaatttaagaatcgactcattgaagcgatgggtaattaataaatttatttgtcttaaaaattctaaaaatgattttttttccccagaactttttgacggaattgcaaacagcaaattttttaccaagtcatcaatgattctgttcatgaacaaaaaggatttatttgaagaaaaaattaaacgagtttcgctgaacattctttttccatcttataaaggtaaaaaaatttaataaaaaattatttaattaaaaagcaatatttttctaattaattaaaagttttttttgcgaacataagatggacttttgtttacatatttttacatattccctgatttttttatatacaatattttgaattttttctcattttttttttctgtaaatattttgcatttttgaggatttttaagtataatttttcctgttttctctagagaattttggaaatttcggaattccggaactccggcgaaaagttaaattccgagaaagtataaaatttttaaaatgcataaatttctaataaaaactttcttgaccctaaatttggaagtttatagaaacagaaatttttgcttgatgaaaatttttgaaaatataaattttttaaggagacctcacgtatgaggacggtgttgcatatttacgtgtcaaattccgcaagttgtacagaaataaacggagtttgtacatccacgagacattcgccactgacaccaaccaaatcaacacggttttccgatcagtgcttgacacgatcttacaagaaaatatgcaagacacgggcatgttatgattatgatcagttttggtgttgcattgtatggataaaatttagaaaaaaaatatttaagcctaattaagaacattaatgcctaagccataggatgttatgattatactttgggaattgggttttagtggcgaatttaaaagagcgatttttcgtaataaatttataattttgaccgcttttaaaattttttcgtttttgtcgatattctataagttattttttataaattcgcaacttaccaacataatatagatagaaatctaataattaataaggggtttattttttctacaattaaatttacatattcattcaacaactgtttggcatatgccccacccccgcatatgccaacaattgtttggcgtatgaaaaagcccccgcatatgccaacaattgtttggcatacgtcaaagcccccatttataataaaattatagaaaagatattatgtggtgccaacaaaatgtatgacatttgacacatatcattttcccctttttctctgccatactcttcatttaacatactgtctattctacattgtcttcgtatcttttccgctatcctttatacaaatactattttaatacctaccccatattctcatatgaatttccatattagaacagattgtgaatatgaaaaaattattattatttattgtaggggaatagtgactgagaacccattactaatgaaattttcatttttccattatttatcaaaaagtaggcctcgggttcccagtcaatttttttgtataaagattaaaaaattttttatagaaaatggtaaatatttcaataaatattggttctatttttctctttgcttttgccacaagcttatgtggaggcaagccaaatgatgacaaaaatgctgcctccagctcaagtgtgccaagcgaaacggaaaatcccaaaaacgaagagtcgaaaaagaatttggtgataattacggacatgggggcggatgatcaatttacactggagatgatcagcgcaacagaattggccggtaaagtgttggcaattgggacgacggagaaaggaagaaaagcggcattgtcacaatcactgggatttgagaaagtgccagtgtatgtgagaagcagtggcgaggaatacgagaaaatgctttttatgaatcccaatcagagtaggttcagtttgcaagttgaaacgtatgtcggcattttaccctgaaaatttttgttttagaggatacaaaaagagaggaaaacgaatttcaacattttttgaaaaatttgctggatgaaagattgaaaactaatgcgatgaaggttcattttttggtgctggcacctccgatcgatttaagtgcagtattgttggagaatagacaattggcaaaagcagttggacaaatacatattacggatggatgtaaaaattgtcaggaattgcaaccgccgacaccgcttagcctgaacaattttttgaggcaattaccaagggaacacaccaagccaacaacctacaatgttagcatggacgcattggcaactgtgtaccttttggaaatggccgccaatggagaagttaatgtcctactagtttcttcaagtttacttgctgaaaagttcggtgatggagtcgaatttggaaaaaaatttccaaatctgaaattgacaagaaaaaagaaaacattgggctttaaaattattgtagaacgagaaaaaaaatgtcaacaaaaaccacacattgacgagcaattcagtgctgccggtccaatagctgtgcttgcaattatggatatgacaaatgtaagggtggatggagtgcccgaatctgacaattttgtcctgtttacaactcaatcaaaaaaagtgagcttgatcaccccaaaaagtggagagcaaaagccagaacatggtgaataccaagtggaaattgggattaaaaaagcaacaaaaattagattgcttgtcaattttaatgttgacacatttggcaacgcaatgacattgattcttgagaaaatcaacaagcaacgccaagaggcgaaaaggaatttggtgataattacggacatgggggtggatgatcaagttgcactggcgatgatcagcgcaacagaattggccggtaatgtgttggccattgggacgacggagcaaggaaaagaagcagcattggcacaatcactgggatttgagaaggtgccagtgtatgtgagaagcagtaatgaagaactagagaaaatggtttttatgaatcccaatcagagtaggttcagtttgcaagttgaaacgtatgtcggcattttaccctgaaaatttttgttttagaggatacaaaaagagaggaaaacgaatttcaacattttttgaaaaatttgttggatgaaagattgaaatttatgggcgtaaaggttaattttttggtactggcacctccgactgatttaactgcagtactattgaggaataaaaaattggcagaagcggttggggaaatactcatcacgggcgaatgtaaaaattgccaagatttacaaccgccggcaccgcttagcctgaacaaatttttgtgggaattaccaagggaacacaccaagccaacaacctacaatgttagcatggacgcattggcatctctgtatcttttcgaaatggcctcaaatggtgaagtgaatgtcctactagtttcttcacgtttacttgctgaaaagttcggtgctgaggataattttgacaaaagatttccaaaactgaaattgataagcaaaaagacaatgggtgctaaaattattgtaaatcgagaagaagaatttgaacaaaagccacacattgaccagcaattcagtgctgccggtccaatagctgtgcttgcaattatggatatgacaaatgtaagggtggatcgagtgcccgaatctgacaatttcgtcctgtttacaactcgatcaaaaaaagtgagcttgatcaccccaaaaagtggagagcaaaagccagaacatggtgaataccaagtggaaatagggattaaacaagcaacaaaaattagattgcttgtcaattttaatgttgatacatttggaaacgcaatgacattgattcttgataaaagcaacaaacaatggaattacaaaatttcgtccgaaaaacaaaaggtataggacaaattagaaaaaaattgttctctaaatatgactcatattattcaataaccaatttaattatcctaattaggggaaagagaaaaaccaagatccaaatgatgagaaaaatactgcctccagctcaagtgtgccaagcgaaaaggaaaatcccaaaaacgaagaggcgaaaaagaatttggtgataattacggacatgggggtggatgatcaagttgcactggcgatgatcagcgcaacagaattggccggtaatgtgttggccattgggacgacggagcaaggaaaagaagcagcattggcacaatcactgggatttgagaaagtgccagtgtatgtgagaagcagtaatgaagaactagagaaaatgttttttatgaatcccaatcagagtaggttcagtttgcaagttgaaacgtatgtcggcattttaccctgaaaaatttttaattttagagaatcaaaaaagagaggaaaatgaatttcaaaattttttgcaaaatttgttggatgaaagattgaaatttatgggcgtaaaggttaattttttggtactggcacctccgactgatttaactgcagtactattggagaataaaaaattggcagaagcagttggtgaaatactcatcacgggcgaatgtaaaaattgccaagatttacaaccgccggcaccgcttagcgtgaacaaatttttgtgggaattaccaagggaacacaccaagccaacaacctacaatgttagcatggacgcattggcaactctgtatcttttcgaaatggcctcaaatggtgaagtgaatgtcctactagtttcttcacgtttacttgctgaaaagttcggtgctgaggataattttgacaaaagatttccaaaactgaaattgataagcaaaaagacaatgggtgctaaaattattgtaaatcgagaagaagaatttgaacaaaagccacacattgaccagcaattcagtgctgccggtccaatagctgtgcttgcaattatggatatgacaaatgtaagggtggatcgagtgcccgaatctgacaatttcgtcctgtttacaactcgatcaaaaaaagtgagcttgatcaccccaaaaagtggagaggaaaagccaaagcatggtggataccaagtggaaatagggattaaacaagcaacaaaaattagattgcttgtcaattttaatgttgatacatttggaaacgcaatgacattgattcttgataaaagcaacaaacaatggaattacaaaatttcgtccgaaaaacaaaaggtataggacaaattagaaaaaaattgttctctaaatatgactcatattattcaataaccaatttaattatcctaattaggggaaagagaaaaagcaagatccaaatgatgagaaaaatactgcctccagctcaagtgtgccaagcgaaaaggaaaatcccaaaaacgaagaggcgaaaaagaatttggtgataattacggacatgggggtggatgatcaagttgcactggcgatgatcagcgcaacagaattggccggtaatgtgttggccattgggacgtcggagcaaggaaaagaagcagcattggcacaatcactgggatttgagaaagtgccagtgtatgtgagaagcagtaatgaagaactagagaaaatgttttttatgaatcccaatcagagtaggttcagtttgcaagttgaaacgtatgtcggcattttaccctgaaaaatttttaattttagagaatcaaaaaagagaggaaaatgaatttcaaaattttttgcaaaatttgttggatgaaagattgaaatttatgggcgtaaaggttaattttttggtactggcacctccgactgatttaactgcagtactattgaagaataaaaaattggcagaagcggttggggaaatactcatcacgggcgaatgtaaaaattgccaagatttacaaccgccggcaccgcttagcctgaacaaatttttgtgggaattaccaagggaacacaccaagccaacaacctacaatgttagcatggacgcattggcaactctgtatcttttcgaaatggcctcaaatggtgaagtgaatgtcctactagtttcttcacgtttacttgctgaaaagttcggtgctgaggataattttgacaaaagatttccaaaactgaaattgataagcaaaaagacaatgggtgctaaaattattgtaaatcgagaagaagaatttgaacaaaagccacacattgacgagcaattcagtgctgccggtccaatagctgtgcttgcaattatggatatgacaaatgtaagggtggatggagtgaccgaatctgacaatttcgtcctgtttacaactcgatcaaaaaaagtgagcttgatcaccccaaaaagtggagaggaaaagccaaatcatggtggataccaagtggaaatagggattaaacaagcaacaaaaattagattgcttgtcaattttaatgttgatacatttggaaacgcaatgacatttattcttgataaaagcaacaaacaatggaattacaaaatttcgtccgaaaaacaaaaggtataggacaaattagaaaaaaattgttctcagatatgactcatattattcaataaccaatttaattatcctaattaggggaaagagaaaaaccaagatccaaatgatgagaaaaatactgcctccagctcaagtgtgccaagcgaaaaggaaaatcccaaaaacgaagaggcgaaaaagaatttggtgataattacggacatgggggtggatgatcaagttgcactggcgatgatcagcgcaacagaattggccggtaatgtgttggccattgggacgacggagcaaggaaaagaagcagcattggcacaatcactgggatttgagaaagtgccagtgtatgtgagaagaagtaatgaagaactagagaaaatgttttttatgaatcccaatcatagtaggttcagtttgcaagttgaaacgtatgtcggcattttaccctgaaaatttttaattttagagaatcaaaaaagagaggaaaatgaatttcaaaattttttgcaaaatttgttggatgaaagattgaaatttatgggcgtaaaggttaattttttggtactggcacctccgactgatttaactgcagtactattggagaataaaaaattggcagaagcagttggtgaaatactcatcacgggcgaatgtaaaaattgccaagatttacaaccgccggcaccgcttagcctgaacaaatttttgtgggaattaccaagggaacacaccaagccaacaacctacaatgttagcatggacgcattggcaactctgtatcttttcgaaatggcctcaaatggtgaagtgaatgtcctactagtttcttcacgtttacttgctgaaaagttcggtgctgaggataattttgacaaaagatttccaaaactgaaattgataagcaaaaagacaatgggtgctaaaattattgtaaatcgagaagaagaatttgaacaaaagccacacattgacgagcaattcagtgctgccggtccaatagctgtgcttgcaattatggatatgacaaatgtaagggtggatggagtgaccgaatctgacaatttcgtcctgtttacaactcgatcaaaaaaagtgagcttgatcaccccaaaaagtggagaggaaaagccaaagcatggtggataccaagtggaaatagggattaaacaagcaacaaaaattagattgcttgtcaattttaatgttgatacatttggaaacgcaatgacattgattcttgataaaagcaacaaacaatggaattacaaaatttcgtccgaaaaacaaaaggtataggacaaattagaaaaaaattgttctctaaatatgactcatattattcaataaccaatttaattatcctaattaggggaaagagaaaaaccaagatccaaatgatgagaaaaatactgcctttcaaatatttggaaaagcaatgacctttatgcttgacaaaattaacaaacaacgcaatgataaaaattatcggtgcccttgaaatgaaaatttgacgtaaaatgattaagcatgcatttcttcatcccttttttcgcggtgaatcaaccaaagttacagtatttggggcctgattaactatttatattattttccattttgatcggggttggtttcactatgttttactgtattttcctatttattaactttttactgttattctgtatttttctattcttaaatcataactataatatttccctttaattaaattttttttcgttatgctatattttcgtataaatgtttttccttcatacaaagaactgactggaaattctaatacaattataggtagagcatgaagcagaacgatatcccgcacgagaatttacgatttaaattaaattattgggtttaattcaatagaataaatgtgcgtataactttataaaacattaaaactattaagattaaattaaattaaatttttatatttttccgtttgaaatttttctcccaagaaaagtttagtgccatctgccgcattcaaaacatttttattttcctcaaagcatcgattttatttaaaaaacatatttattattatttttttagaaaaataattaatttaaccaatttcaaagattggctgagtattttttaattcagcttcttcattgtgcacaggtgaagcgatagtgcctgtgaataaaaattattcttttattttttaatcagaaaatattaatacttttttatatttaataattaccaaatttgcaaatgccagtcaaagcaaatatcaccagaaaaacggtgatgttgctgttgtagaagttcatttttttaatttgttaaaaatttaaaatatgaatatttaataaataattaaataataatttgtgttttttccatgattttttggcattttttatatgccaaatggtaggcttaatgtttgccataatttccggcttctatcatttgaacaatgttatgatgatgacattgcaaaggatgtccgggaatacaatttcatgtgaatatttttgttttttaattatttttattaatttgattaataccaataaaaaaatttcgcatattaaataataataatgttttgatgaaagtgacagtaaaatgagtaaattttcttaataataaatatgattataatatctaattttttttgtcaaaaacgatttattaaaaataattaaattttgcgttaccattattaaacaaaattttttccagcttttttggttcttcaaattacaaataacatacggcaaatatttgaatttttgctttaaattctttccatcccttcgcggaatgttttccattttgcataaatgcattttttattttaaaatatttttcaacaatttttcttttatttatcataaattttttgaatgtatactgaattttctcactttttaattgtttcttccatctttgaatgcttttcaaacttatgaccaaatgttttgctattattttccaactttttttcaccttttccctccaattttttaatttattcatatataaactatttaaatttaatgcattattaggttataaggtttgtgtatttttttagtgcatataaatgcttataatttgcaatatttacgttttaaaaatatattcggtatttttttggcgataaatgcctacaaattaaaaaacacacacttaacaattaactttaattatataatatttttgtaataattcgccaaattttaaatgattaaagatggtcctgaaatttgagaccacttattctgaattttatttttaataatatttacttgattttaaggcaaattttaccactgaaatttagttgattttaaatgtttattttcaaatattaatagtgtaagaattatagtaaatcaattttttaaaattattttttaaatgactttttaatttttcagaatggggctgaaattttgtcagtgaaatacctaaaaattcatgctaataacttaagaaatgcaattaattacatatttatggatgttataaaatcagaaagattatcacaattaggttaatatagtcaacggcgcacctctaataggttcgccactgacaccaaccaaatgaagtttttcttttttctcatttttttatactttgggaattgggtttttagtggcgaatttaaaagagcgatttttcgtaataaatttataattttgaccgcttttaaaattttttcgtttttgtcgatattctataagttattttttataaattcgcaacttaccaacataatatagatagaaatctattaattaataaggggttttattttctataattaaatttacatattcattcaacaactgtttggcatataccccacccccgcatatgccaaacagttgtttgtcatacgtcaaagcccccatttatgaataaaattatagaaaagatattatgtggtgccaacaaaatgtatggcatttgacacatatcattttcccctttttctctgccataatcttcatttaacatactgtctattctacattgtcttcgtatcttttccgctatcctttatacaaatactattttcatacctaccccatattctcatatgactttccatattagaacagattgtgaatatgaaaaaattattattatttattgttaggggaatagtgactgagaacccattactaatgaaattttcatttttccattatttatcaaaaagtagcctcgggttcccagtcaatttttttgtataaagattaaaaaattttttatagaaaatggtaaatatttcaataaatattggttctatttttctctttgcttttgccacaagcttatgtggaggcaagccaaattatgacaaaaatgctgcctccagctcaagtgtgccaagcgaaacggaaaatcccaaaaacgaagaggcgaaaaagaatttggtgataattacggacatgggggcggatgatcaatttacactggagatgatcagcgcaacagaattggccggtaaagtgttggcaattgggacgacggagaaaggaagaaaagcggcattgtcacaatcactgggatttgagaaagtgccagtgtatgtgagaagcagtggcgaggaattcgagaaaatgctttttatgaatcccaatcagagtaggttcagtttgcaagttgaaacgtatgtcggcattttaccctgaaaatttttgttttagaggatacaaaaagagaggaaaacgaatttcaacattttttgaaaaatttgctgaatgaaagatttaaaactaatgcgatgaaggttcattttttggtgctggcacctccgatcgatttaagtgcagtattattggagaatagacaattagcaaaagcagttggacaaatacatattacggacggatgtaaaaattgccaggaattgcaaccgccgacaccgcttagcctgaacaattttttgagggaattaccaagggaacacaccaagccagcaacctacaatgttagcatggacgcattggcaactgtgtaccttttggaaatggccgccaatggagaagttaatgtcctactagtttcttcaagtttacttgctgaaaagttcggtgatggagtcgaatttggaaaaaaatttccaaatctgaaattgacaagaaaaaagaaaacattgggctttaaaattattgtagaacgagaaaaaaaatgtcaacaaaaaccacacattgacgagcaattcagtgctgccggtccaatagctgtgcttgcaattatggatatgacaaatgtaagggtggatggagtgcccgaatctgacaattttgtcctgtttacaactcaatcaaaaaaagtgagcttgatcaccccaaaaagtggagagcaaaagccagaacatggtgaataccaagtggaaattgggattaaaaaagcaacaaaaattagattgcttgtcaattttaatgttgacacatttggcaacgcaatgacattgattcttgagaaaatcaacaaacaacgccaagaggcgaaaaggaatttggtgataattacggacatgggggtggatgatcaagttgcactggcgatgatcagcgcaacagaattggccggtaatgtgttggccattgggacgacggagcaaggaaaagaagcagcattggcacaatcactgggatttgagaaggtgccagtgtatgtgagaagcagtaatgaagaactcgagaaaatggtttttatgaatcccaatcagagtaggttcagtttgcaagttgaaacgtatttcggcattttaccctgaaaatttttgttttagaggatacaaaaagagagaaaaacgaatttcaacattttttgaaaaatttgttggatgaaagattgaaatttatgggcgtaaaggttaattttttggtactggcacctccgactgatttaactgcagtactattgaggaataaaaaattggcagaagcagttggtgaaatactcatcacgggcgaatgtaaaaattgccaagatttacaaccgccggcaccgcttagcgtgaacaaatttttgtgggaattatcaagggaacacaccaagccaacaacctacaatgttagcatggacgcattggcaactctgtatcttttcgaaatggcctcaaatggtgaagtgaatgtcctactagtttcttcacgtttacttgctgaaaagttcggtgctggggataattttgacaaaagatttccaaaactgaaattgataagcaaaaagacaatgggtgctaaaattattgtaaatcgagaagaagaatttgaacaaaagccacacattgacgagcaattcagtgctgccagtccaatagctgtgcttgcaattatggatatgacaaatgtaagggtggatggagtgaccgaatctgacaatttcgtcctgtttacaactcgatcaaaaaaagtgagcttgatcaccccaaaaagtggagaggaaaagccaaagcatggtggataacaagtggaaatagggattaaacaagcaacaaaaattagattgcttgtcaattttaatgttgacacatttggcaacgcaatgacattgattcttgataaaagcaacaaacaatggaattacaaaatttcgtccgaaaaacaaaaggtataggacaaattagaaaaaaattgttctctagatatgactcatattattcaataaccaatttaattatcttaattaggggaaagagaaaaaccaagatccaaatgatgagaaaaatactgcctttcaaatatttggaaaagcaatgacctttatgcttgacaaaattaacaaacaacgcaatgataaaaattatcggtgcccttgaaatgaaaatttgacgtaaaatgattaagcatgcatttcttcatcccttttttcgcggtgaatcaaccaaagttacaatatttggggcctgattaactatttatattattttccattttgatcggggttggtttcactatgttttactgtattttcctatttattaactttttactgttattctgtatttttctattcttaaatcataactataatatttccctttaattaaattttttttcgttatgctatattttcgtataaatgtttttccttcatacaaagaactgactggaaattctaatacaattataggtagagcatgaagcagaacgatatcccgcgcgagaatttacgatttaaattaaattattgggtttaattcaatagaataaatgtgcgtataactttataaaacattaaaactattaagattaaattaaattaaatttttatatttttccgtttgaaatttttctcccaagaaaagtttagtgccatctgccgcattcaaaacatttttattttcctcaaagcatcgattttatttaaaaaacatatttattattatttttttagaaaaataattaatttaaccaatttcaaagattggctgagtattttttaattcagcttcttcattgtgaacaggtgaagcgatagtgcctgtgaataaaaattattcttttattttttaatcagaaaatattaatacttttttatatttaataattaccaaatttgcaaatgccagtcaaagcaaatatcaccagaaaaacggtgatgttgctgttgtagaagttcatttttttaatttgttaaaaattaaaatatgaatatttaataaataattaaataataatttgtgttttttccatgattttttggcattttttatatgccaaatggtaggcttaatgtttgccataatttccggcttctatcatttgaacaatgttatgatgatgacattgcaaaggatgtccgggaatacaatttcatgtgaatatttttgttttttaattatttttattaatttgattaataccaataaaaaaatttcgcatattaaataataataatgttttgatgaaagtgacagtaaaatgagtaaattttcttaataataaatatgattataatatctaattttttttgtcaaaaacgatttattaaaaataattaaattttgcgttaccattattaaacaaaattttttccagcttttttggttcttcaaattacaaataacatacggcaaatatttgaatttttgctttaaattctttccatcccttcgcggaatgttttccattttgcataaatgcattttttattttaaaatatttttcaacaatttttcttttatttatcataaatttttttgaatgtatactgaattttctcactttttaattgtttcttccatctttgatgcttttcaa

SEQ ID NO: 40 - DNA, 6573 bp, Heterodera glycines
  unsure (1)..(6573): unsure at all n locations
aaatantgaaaaaaataaaaattaaaaatgatattcgaatcgataaaatttatttgttttacgaattaaaatagtttatgttatattttccactttttaatacattattcattaaacattaaataaatatacgaaataaacttacacttaaatattgaaatgtttttagtaaataataaactataatgaaaaaacaatttaaaaataaaaataattgtcgataaaaatgggtgacggagtgacgacgaggaggaaagcgttggcgaggaagaggggatgaggaggaaaggaagacgagaaatgaagaggaagagagtgtgccgagaagggaaatgtgtgagtcgagggggggaggacagtggcggttagagccactaattgaaggtcaccggaggggcagcagatggaagcaaagcgacgggaaagagaaaataagggaccatatcttttttagcccaaaaattaacacattttccgagaaaaaaaaattaaaaattggtatggactaaattataattacttgttaaattggcactcgacttttaatgaatttattacaatgagagggttttgccgggtgaactcacttgctatgtttaattttaccaatttctgggtttagcagaatttttattttatttttaagaatttttggatttcattcaactgaaaaattagcttttttagttttctcaactttccattcctttcgcatttttaacaactttgaatataatatctttaaatttccacatgatcattaactttgtcttccttgtccccgtcattggtcgcctgcttttccccaaactgagctggtactgttcaaatggttttgtaattttggtcaacgagtcaatccacacaaaaaaaagttgaaaaaaaatttaataaagaaaattaattaataataaaatttgagccgccgagttcgatttacaaaagaatattataataaatgcatatttatccgggatgggtcttaaaaaccaggacatgttaatcttttgactatacgacatttgaggattttttaaaaaacaagtaaaaatcaggaattaatcgaaaaatatcggactttttcataaaatttaataattaattaaattaattaaataaaaacctatttacggatttacattttcttttttaaatctttctacggcacagatttctcagcaaatcgttccaattcggcaaaattaagaaatgaaaaacgatttcgaaagaaaaatttacaaattggaaaaaataaatagaattcaatatcgtaaagaattttgagtttttggcacaaaaattttgtaactttatacttatttatctgtgagcgaaaaaggaaattttgaattttctttggctgctgacgacgaaatcatttgcatccaagaaaagtagcagcagaaatacttattgttgttacaaatattagcccgaggataaatttataaataaacacttacaaagaataatttttaaaaattaaaaaagtcaagggttaagactttttatccgatggggttgctgatcacgaatatgacatccatctgaccaatttcgaatcctggacccgaattcgaacaaaagtcgaaaaaattttcaccaaaatccacctttcttgtccaaaatcgattcaaatgcatgaaatggccgtgaatgcctattttctattcaatttagtgcatttgaatcgattttggacaataaaggtggattttggtgaaaattttttttcgacttttgttcgaattttggtccggggttcgaaaattgatcggaattaatgtcatattcgtgatcagcgacaccgaatacgcctggaaaacacgtttttaccagtagaaacaaaaaaatcttctatgtggtccaaactgaactctgaatcccagacccgaattcgaacaaaaaatttaaaatacaaaattttaaaaattctcgcttttgttccttctctcggatttataggtagtttagtttgaacatttgtaggaaaatgccggcgttcaacggcatcccaatacaatcgtttccactgcgattttcgttacgaatttaagatttttgcaacaagcttataaatttggcatcattccaaagctctacatgtttagaagcttttgataaggcatttataagcgattgaacaacttataaaaaagttgcaacatgaatactaccaaaaagtccgaatttttgcatattttaatttataacttttttacatgtcggcatatctttgtgatttttaggaagccgatagagcttgttaagagctttcgaatgataccaactttgttggatttggtcaacaaagaaaaaagttatgatgctctaaacttgctcagacgcaactggcccgttccgagctctaatggggtaaaaaagaaccatgttgatcattacaacaataaataaacaatttttatgagcgcatcgatttcaaatttcataattattaaatcgatcgatcacttctcaacaaatttatcctaaagacataaatattgtataacacaaaacaaataaaagttgatcattacaataatatgggctcaaattcgttctccaactccgcaattcaattagatcgatcagttctcaacaattgattcattcattcacttctgctgatgatcacttgggccgggatttgcgttgagaagcctaaaaatagaaacgcaataaatatgaatttttgaaaaaagcattcgcttacccatctccgatttcgccctcatcattaatccgaatgtcaattatgttccattgctcataaaattgccagtcaatcgcttccttttcccattttgtccatttgctttcatcacgcgcaattggacaacggaccaacagaaaacgattgctgtagtcatcagttcttttcaatgccaattgttcccgagtcaattcattgatcagatcaaagggcacaacgaagtcaggaaaagacgtaggaataaaacacatgacgacaataaaattgacgggggaagaagcattggaaaaagcctaaaatatgggaaaattgattaacgaaataataaaagaaagcaccgttttgaatggttcaatatttgacggccaagtccaagcatccatgtacaaccagcatttgaacacctttggcacattgctttgaagtggagtgaaaagccatttgaccaccgcttgtccatccgatgccgcgacactgtcattgcatggaaattcggcgaagaaaccagtataataggcactgataacgcgaagcgatggacagtcgtcgagaattgacggcacgaatttgcgcaaacggtagaaaacttcgtcggacaattggatggcacaaatatgtttcacgatcattggccaaatgttgtgcaaaatgaactccgaaatgcgatcattgtgcgcataaatgtccaaattaatttgacaggcggcgaaaagttgacgaaaacggtggagaaaagcgatgacattttggtcgatgaaactgaaaatgatgggaagtgttgtctaaatttttcataatcgaaattactagatgctgatgcttttgaatccgatgattttctttggcaattgaatttgcggaattggcaatgattcacaattagaattgacaattgccatttctttggtgccattttctccaattttgcttcgaatttcaataattttcagtgcccattttcgcgtcttgaaatgttcgtccacgtaatagtcaaatcggtggctgatcatcgcaattccaaggccaagttgacgaggcggcaacaaatcgaagacacaaagccaacaatcagcggagatgaagctgaagaaaaagaaacaaaattgaaaattgaaatttaaaatggcattttaattttaatttacattgctttttccattttttcctcggcttcttttcggcggtctgacattttgttgttggcaaattattaagacagttttcggcacttaaatgggctttattttcttcaagattcatataaaaatgaataggtattttcataaaatatcataaaagaattatagtctcattgctatttttcactgtcatttttcgatttaagttttcatttagaaactaaatgttatgcccgaaggaatttaaatttaaaagaattaaaatgaataaagtggggtcatttaagcgatgcgtcatcatcatcagcagaaaagccgacatttgcggacgaattttttgaagttttttttaacaaaaaatttcttaagcatgtcagtccgcaaatgtagcgacacgaatgagaaagaaatcaaaaaagtcaaaaacacgaaattttggtactttcaattagccgccgggctccaaaatttcaaacttttcttaaaaaatggcctaaaaaacgtaagaaagagacgaaaataaacaaatggcaaatggaaaaaataataatgaaaagtggtggaggaagagcaaccatttttatactaatttttacaggatatacagtttaggccccataaatttttttttgttaaaaggcataaaaaacaattttccgtgggtttttggggtcgctgatcacgaatctgacatccattccgaccaatttcaaacccctaacccgaattcgaacaaaggtcgaaaattcaaaattttcacatttctcatttttagactctaaattgataaactgctaataaaatgcaacaatccataaattctacaaagttaaacacgtaatatatataaaataaagtaaagttcaacacaatcaaatacagcaaagtcccaaaatcgacaatatggagatgttagatcaattttcgcatgggtacaattcagcaacttgggaccaaaaatgttgaaaaacggcgtcataatcgccaaaatgcttccgccacaaatgttcagacatgtaccgtatttgctctaattatagcccagtctctattaatttcgcagtctccaattatccccccccctttctgaggagttcgaaaaataatcccccatgggctataattagagcaaatacggtatgtacgtgtcgtacaatgcacgtgaatcaccaaagcgacgcttcgctatattcttcagtttctgccacatactttcgactgattgtgtatgggaccccgtgttaggattgacgaagttttcactgtgattcacagtgtagtgttggtatctattttcgaataatatacgccatcctatccattactctacccctgctggggaaggttaggaatccccccatacgctctccacatgtcactgtggatgacgctgcctggcaagatgtgttcagtaatgagtggaagtaacgtggcagcgtcgcgtcgcataaccggtagtgatgctcgagagtctcggtctcgagtctcgactcgagaaaagtctcgggtttttttggtctcggggttttgggtctcggtctcgagtctcggggtcgagtctcggtctcggggtcgagtctcggtctcgagtctcgggaaatttttggtctcgagcatcactaataaccggcaccataaaacaacgctgcggatttcctcgttcaattccaccgaatatccaaacgtcattaacgacgagccttccacgctcgtattttcttcgaaccgcaagtgtttcatcgatttcgacgaggattcctacgagatgacaaactacaacctgtgtacgatggcgacaaaaaaccttggccgcctatgcgggcagggtggcgaatgaaaaattcgatacaaaccagggatgtgccgagccagacaaaatccgattccgattatggccaaaaatccgatacggttttaaaaccgattacgataatggcccaaaatccgattaattgcgattccgattacgattccgatttttttaaaataattttttcccaaaaattttattcataatcaaaatcataaattttaagattgtgatgcaaaaataaaagtttgtccacattctcaggcaataaacgttttctcagatctgtcacaatcaacccagcggtggagaaaagccgttcgctttcagtcgatgtagctggggctgagaaatatttttttgatagcttagattcggaaacgaaatgtcttctgcacacagaagcccaacaactgttttgttttgcaaaaaacgatcaagcatttggaaggtggatgaccaacgcagctgataggaaaattgcaacttagtaataattcattcatggttcttttctgctttaatgtcccaacaaatttttttcttcaaaatttcgacttttggttcgaattcgggtccgggattcaaaaataggtgaattggctgccatgttcttaaactgataccattaacaacccttcaaagactgacatttttgctaaataacaaaaaactggattatatcggggagaattaatccggcactgctttgtgagaaaaatttaatttcagtcattatgttaaaataagattaaaacattcgtttcagaaaacatttttttcaaaattcattggtattctcgctaaaaaaattccttcaaaggtcaattcttaggggtgtaataatcggatttccaaggcaaaatcccaattacgaatatcccaattccgattatggcccaaaatcc

SEQ ID NO: 41 - DNA, 2458 bp, Heterodera glycines
tacccctgacaaaggaggggtcggcaagtgaccgtgggatttccaaatgaaatttggtgggtggatagatgacgcccaggttctattgtgaaattttgactatttttgccaaatgagcatgagtgccgagatatgacgtgccaaacttttttaatgaacaaacaaattaaataattatttgcaaccagtcgcattgtcaaatggtgtagaggtaatgcgttagtagcagtcgcaccaggttcgaatccgctatatgcaatttttttgttttttttttttttgctttttatgaaaagtcaattctcaaaagattagttttataaaaagactttatttttaattttactttttattttggtacatatgataataaaaaatatttttaattttactttcattttgatatgtacataagataataaaatattttaaaaatacgacaggatatttattgcacctttatgtttaatgtagtaattttttgatttctaatggaaaaaaatttaaaataaaaatatgtttttactaaaaatttttagatagttaactttgcatgaaaatcaaaaataaaaattataaaataatatatacatgcatgggattcgaacctgtgagataaaaaagatttgactaacctactacctacctctacaccaatggcttctttcttggccaaaaagaattatatcttttctaattaaaaaagcgtaaaaactttggcacgtcatatctcggcactcatgctcatttggcaaaaatggttaaaatttcacaatagaaactaggggtgatttttccacacaccaaatttcatttggaaatttcccggggcacctttcgccccctccccttctttttttttttgtattcattcatggttcttttctgctttaatgtcccaacaaatttttttcttcaaaatttcgacttttggttcgaattcgggtccgggattcaaaaataggtgaattggctgccatgttcttaaactgacaccattaacaacccttcaaagactgacatttttgctaaataacaaaaaacttgattatatcggggagaattaatccggcactgctttgtgagaaaaatttaatttcagtcattatgttaaaataagattaaaacattcgtttcagaaaacatttttttcaaaattcattggtattctcgctaaaaaaattccttcaaaggtcaattcttaggggtgtaataatcggatttcaaggcaaaatccgattacgattatccgattccgattatggcccaaaatccgattaaagttaattacgattccgattcggcacatccctggtacaaatgtcgcgaaaaaattacgccaatctacgactgtttgaggccctatcatagtaatttgagtaacttccactaaacaatttacaaaacctccgatatcgatttcgcgcatcatttgatcctgagtacccaattcctgcgcccagaaataagacaaagaaaacacctgcttaatagcaaggtgagagccggcgaaaaaagtgccaacaaggtagcccatttccggacgattgcactgtgcgtttttgcacctccattttccataatgctgatttgggcgaggttggcagcgtcccatttcatttccacattgaggacatgtacgtctaccatgtaataggcctaattccacaagccactcatcaaactgatcatcagccaatgccaatttttcataaagctttttggcggtaaaattgtgcaattggttcatactcgttgaaaaaatatgtaaatcctcagatctgggaaccctgcataaaacattataacttttttctttgttggtcaaattttataaatttggcatcattccaaagctctacatgtttagaagcttttgataaggcatttataagcgattgaacaacttataaaaaagttgcaacatgaatactaccaaaaagtcagaatttttgcatattttaatttataacttttttacatgtcggcatatctttgtgatttttaggaagccgatagagcttgttaagagctttcgaatgataccaacttttggtggatttggccaacaattctaagggggcccctgctgaatttaatttttatttggttttttgatttccatttgacaataacaataataaaaataatttgaaaatttaacatcgaaaaaggttatcaaaatgggtaaaattaaaatcgatcagaattggttaaaatccagaattattttaattgaaagttctttttgccaataaaaacggttattttcctcccctttttctgatggactcaattccaaagggggcggggaaaaaaaggaagggaaaaaaaaaagggaaaaaaaaacccaaggggggggggggaaaaggggggggaaaaaaaggggaagggggaaggggaaaaaaaaaacctttaaaaaaaaaaaaagggaaaaaaaaaaaaaaaaggggggggg

SEQ ID NO: 42 - DNA, 10998 bp, Heterodera glycines
  unsure (1)..(10998): unsure at all n locations
aaaagtcagaattgttgcatattttaatctatatcttttctacatgtcggcatatctgtgtgatttataggaagccgatagagcttgttaagagctttcgaatgataccaacttagttggatctggtcagcaattataaggggcccctgatgattttaattgtaatttgtatcttgatttgcatagactatatcaataataaaataatttgaaaatttaacatcgaaaaggttatcaaaatggttaaattaaaattgatcagaatgtttaaaatcaagaattatttaattgagagttcttttgtcaataaaacggttatttcatcccttttctgatgactcaatccaaagggcgggagaagtgagtgagagagagaggagagagagccaagggggggggaatgagtgagagagtgaagggaaggagaagagactgagagaaagaggagagagagaagggagggagaagagagtgagagaattgagggcgaagtgaatgagagaagaagaatgaaagagaggaatgagtgaaagagagaaagtgagaaagagaaggagaaatggaaaatgaaaaagagaaaaaaaggaaatgaaagagagcaagcaatatggagcttttaataaaaaaaacaaaaaaattaattaaataaaaacttatgtcctcatcagtcgtttactgcaagttttgcgcaacatttgatctatgtccatagcggaataggaaaaagtactacatttgtcccgaaagatcatgcttaaacctttttgattgcatactgaactatatcaaaactaaatcttcctgggcaatacgacggattagggttgggcccccgaccatcgggattggaattcggggtcatcggggtcagcaagttcgggatcgggttcgattaaatcgtcggggtcgggattcgggagcccaaccctacgacggatgtttagaatattctttagtgtaaatccgatggctttagttcaaccgtttagaatgaacaaggaaaatttatcatacctaaatactaacactatccaattttgacattaattaaaaaaaattctcaatagtgtcgaatttactcgatgtcgaaatggtccagtgtcaggaaaacagtgaaagtttttgaaatagttcagtgtcgaaaattctgtgtcgaaaatgtagtgtcgaaattacttagtgtcgaaaatactcagtgtcgaaattacatttaaacgcgtcgcacatagttttcctatttttagactttaatttccgagcgcattcaagtggcctctagggccaacatgattgcgttctaggaaaactatgatttgacgaaacaaataaaaaaaaaaataattcaataaattgaagatggagtgtcgcactcgcacataattttccaaatcgaaaattctgaagcggacgcaagtgcccactgacaaaggagagtgttcgggtgatggtggaacttccaaatgaaactttgtaggtgggtagaccacccctgggttgtattgccaaattttttttctagctgcggaataagcttctgtgccgagatatgaggctttaaatatttaataattatattatattaaatttaaaaggagaagcaacaagcgaccggttggcagggtggttgtgtgtcacgatttcatttttgtaatggaaagttcgagtcccccctacgcaaacatttttttttattgtttttaataaaattacatatttagataatttaattataatgcaagttaatccccaaaatattatttctttacttcaaaaacatttttcgaataattttaatgattcaactatttcgcctgtcgagattgaaatggctaataattttatttcaatcattgaacgatgccttaaaaatgaagaagaaattgaaatcgttgaagatctcgcatttgatgaaaatgcagataaaaagtttaaatttagtatgtggaaagaatttacaaggaaagtcactcaatttgttattgtttgtgaaattgatttaaatttgcacactcgggacaatatcattaaattgcaatcactgatacacaaccagctccaagcaagccggtttaatgcttggataaatttcgcgtggcgaaaagctggattttatgggaatgactccttcccaatttttacgcacccagttaaatattgttttgatgcaaaaaagcagccacatcaatgccaaaagaatgaatgtgccaatgttgttttaatccggtgcgctcattgcgaaattttcctatgttttgaacatttttttgtcaattacctgtactgattagatgattttgatttagagaaaattaaaataaaatttattaaaaacaataaaaaaatgtttgcgtaggggggactcgaactttccattacaaaaattaaatcgtgacacacaaccaccctgccaaccggtcgcttgttgcttctccttttaaatttaatataatataattattaaatatttaaagcctcatatctcggcacagaagcttattccgcagctagaaaaaaaatttggcaatacaacccaggggtggtctacccacctacaaagtttcatttggaagttccaccatcacccgaacactctcctttgtgagggtcagcagggcggctttttggaaaactatgtgcgacgtggccaaaactaaatcaatgatcaaatttcatctaccaaatttctctcatcattttgccaacagcactcaaagttcaaagcatttgtccgcattcggcaatgttttaagcctaaatcataaataacatttttgtattagatcacggtgatcgagacactgaaaattgggaaaattttagaaaaaaattcataggggcttagaaaatttttttgaaaaaaatcattaagactaccaaaaagaacacaaaaaagctaccgaattgtcttatgaatggtggatcgaagtcttttacaaaagggcaaaaaatgctttccgcaaaaagtgcaatttgaacataaaagacctggcctcatcagtactagggttggttttccgatttccgaaatttttgataaaacgtcggaaattctaaaaaaatttgaaagtttttttttaaaattagcaatttttgtacattatatattacaataaaattttcaggaattttcccagcggcgcctatcggaaccgacggatgaaccgtaaaagtcattaattttcaaggaaaaaatactaaaaccgcaaaatttggtcatctttatgatgaagaattttatcaaacaaaaaattttttgaaatcatctattacttggttaagaattttaaaatttagcttgttaaaatattttaaaattttttaatttattttatgtttttcaaaaatttccgatttccgccttctgatccgacgtttttggggtcagaattccgatttcgaaaaaatattggggcttggaattccaatttcctaaaaaattttgagcctcggaatgccatccaatacgatgtctttttgttgttaaaataattttaattatttaaaatctgttttaggcattattatagacaaaccactacaaaataaagtaaaacaaattatacttaagttaataaaaaataaatattttaatttttttccacaaaatacttaaaaaataataaagagcaaagaaaactttaaacttttcgcgaaatgacctagcatcttaattttaggcaattaatttatttgttttattaatgtgttcatatctcgttaattttatagaaaataccattttttgtcgatccatgtcacagttctcattgtgaccgcatttttggtttcgaccagctgatggtagatgaccaaagtggattccggatggacaaaggtgaatttgtcgaaagtgatcgacatgtcacggtcgacaattggcttgaaaagccttccgcgctcaccatcacgctgggcgatctttatttttcaatataaataatttgataaatacgtggattacaacaaaaagcaaaaaacaaaaacaaacaaaaaagaggtataaaaaccctcgattatgcattaaaaatagtcaaacaaaagttttctgaaagattttaaggtaaaaaatccagaaaaattattaggaaaaaaaactttcttgattatatttcaattataaagaatcgaataaggaaaattttaaatcaatttattgcgaaataaaaattaatttggggatcgactttagagatcatttttcaattcttagggggcatattttcgtttttattctattttaaaaaattttttccgaaaaccattaaacaaaaacggcgtaaaaccatagggattcgtccttgggtgccaaggacgtccttggatttgggctctacgtcttggaaaattgaaggagttcttatttgcaagaatgcctctggaaatcagatagaaaaatatttaaatttctcggtgaaaatctattaaaaaatagtcaaaatctcgaattttttcctccgctgcgcctatcggcagctccggaccccaaaattcctatttcttcttttaaaatggtcaaaaacgtttttaatgaagatctgtaaataaacttctttcttcccaaaatttttccccgcagagactatcggcatcgccgaaaaaatagtaatttgtccacaattttcattaattttttaaaataattcccattttcccacaaaaaaatttaatttaaaatagataattaaataaattaatcatcatattattatttactggcttgaaataacaaagtttacaaaagaacttgtatttttaatttttttacgatttaaattaaaattcaaatccaatttacaattaatgtatagcatttgataaattattgaaatagtttgtaaattttaaaaacttatttggtatcatttttatttaaatttcaattttaaatttttcaattacctgcatgaaatacccgtgcagcagtgattgcttgatgttcttgaagtattctggagaatttgggttcgcgaactgcatctaaaacaatttttcagctataaatcggcccttagttgaaactatttgttaacatttataatctggcttttttgcaatgaataatttataaaaatacctagtcaatttgcaaaattttggccaggtcccggtcccggtttttgaaaaaaagaaatcccggtcccggttttgccagtcccggtcccggcgggactaaataagcactagtaagaatggcggtctggtgagaaaagagaaggaaattggtggagaaggaaaaatttttgagaaaaaaattaattatttatttcatttaatcataattcctcacgggatataatatttttcatattttctttaccattattttactgtaattaaaattttaattaataaaaaatattcttttatttttaaacagcctaaaacccacaaataaccaaatattttatcacttttttggtaaattctgttaacaaatctcacgcaaaatttcaaaatttttaccggcagcgcctatcggcaccgccggacccccctccccccccccccccaatgttcctaaaaagttttttgaaaaaacagcgccacaaaagagagatttaaaagcaaaaaaattaagagattgttaatttatttaaaaaatccagaatttttggactcagaaaattccaagattcaccgctccccccgaaataaacggttggttctgttcccgtttttttgggtcccggtcgaaaaacttggtcccaatcccggcttttctcgtcccggtcccggtttttgtcaaaattccctgtcccgctcaactctagctaaaactcgtttttcgttcgtttcattccatttgcagtctatgaaaaaaatgcaaatacatggacaccctaacattagcattttaggcgtttgtttgattttgtgttttgttttttttctctttactttgttgtacttttttcattttttttaaatggctactaccatatttcttctcgtcggctccttgattttgtctgacagctgctttcgtattaaagtagcttcattcaatgcatcgaagcgtacaaaattttgattgcaccactttttgcgttcttcttcgctcgtattcactgaaactttaacatatttaagggctttatcgaaaatttttcaaaatcagaacatcgggctcaaaaaatcagattttggtgtcgaaaataaaaatatttcaattatttttaaatttattcgaagatttttcgcctccgatcatctttagcaattttgggaatgaaattagcaaattgaattttaatgcattcgggataaaaaaaatcaaattttaacaattttttgcggcgcatttaacgaaaaacttttgggaaatgggcgaggggataggatccggaaaaatttggtaatttctttcggatttgttaacagattttcatcaaaaagaccaatttttgcaattaagtgccaatcgatgattttttgcgcttcgaaacgctttttttgctgcgcgtttttcaaaaattttgggggatgggcagggggtcgccgggaaagattttataatttttaatgcgatttgtttgtcaaaaaatgaccaaattttgcgcaaaccttagacattctgccataaagtttcaaaatatgaatttatttagtgaaataagaacaatttttggtcactacatacctccaaatcaggacaaatctgacaaagggatttaaaagcgtaaaatcaagcaaccggttgtcaagtgattagtgtgcctaccttaggtggtgtgttgtcatgggttcgagtcccattagtgttgtctattttcaatcaattaattaatcaaaataattcaattcttttttaaaaattaattaagtttattaaataaaataataattattgtaaattaataaataataatttatttttaataaaattaaaaaaaacaaattcgaataaaataaatatgaaataaaaaaaacaataataataatgcaaatctaaataatttataaaaaaatgatttattgagtttataatagagttaagcggtaatcggtaattgtaaaaaaaccggtatcggtaatgaccggtactgcaaaaccggtaccgataccggtaaaaaccggtaattttccaacgttaaaaattcttagacaacattttcaaatacaaaatttttattccgttttcgtgcgagttcctgttttttagcattagaattgttcagaagtatatgtatcttgagggtgattaagtttttttttcaaattcaggatgaagaacagtaaaattcagatttatacctaaaattaaaattttttgcaaagcgaggggtcagcggccaattttacaaattgcgaaggggtccggccatgtaaatcgatgtacctttttttgctctcaaaccggttttttcgcggcgctttttccaagacttttggggaacattggggaacaaggggtccgccgataggcgccgccgggaaaatttgtaattttagttgatttgttaacaaaacttgacaaaaaaatgaccagaaaagagggaaatgagacaaaatgaggagagaaaagaatagaagcgagaaacaaagaaagaaagtgaggtgagaaggagaagaaaggaaaggatagagaaaatgaggagagagaggaaagaagaaagaaatagaataagttaaggagagaggaaaggatagagataaagcgaggagagacaaagagaggaagcgagagagggatgagagatagtgaggcgaggagagaagatagaaatgaacgaagagagtaaaggaaagagagggagagaagataaaagaggagaggaaagaaggagaagagagcaaagaaaaaagagagttaaagaaaaaaagagagggagagagagatgagggagaaagagagaggagagacagagaaaattcgagggagcgacagaaagagcgagagagagagaaaaagagagggaaagaaagagaagagggagagagagtaaagcgagggagaaaaaatagaaaataagagaaagtaagagagaagagagggttagagagataaagaaagagagaaaatggaaaagtgagagagaaagagagagtagaaatgaaagaaagatagaaagagatcgcaatttttttttaaattttattaaaaataaattattattatttattaatttacaataattattattttatttaataaacttaattaatttttaaaaaagaattgaattattttgattaattaattgattgaaaatagacaacactaatgggactcgaacccatgacaacacaccacctaaggtaggcacactaatcacttgacaaccggttgcttgattttacgcttttaaatccctttgtcagatttgtcctgatttggaggtatgtagtgaccaaaaattgttcttatttcactaaataaattcatattttgaaactttatggcagaatgtctaaggtttgcgcaaaatttggtcattttttgacaaacaaatcgcattaaaaattataaaatctttcccggcgaccccctgcccatcccccaaaatttttgaaaaacgcgcagcaaaaaaagcgtttcgaagcgcaaaaaatcatcgattggcacttaattgcaaaaattggtctttttgatgaaaatctgttaacaaatccgaaagaaattaccaaatttttccggatcctatcccctcgcccatttcccaaaagtttttcgttaaatgcgccgcaaaaaattgttaaaatttgattaatattaatttgctaatttcattcccaaaaacagaaagagtaagagatagaggaagagaaaaaggaggagaaaggaaagaaagagtagatataggaattttatatttttagtttcctattttcgtatttctattttattttttaattcgcaactacccttctatatccccacccttcttacaactcataaacttgttgtagacgttcatcattgtgatgtgatcgccatggtagttggcgaactgctccatcgctttcatgaatcggctgcgatctatttttttagggcgaataatgcacggttgttgggtcgacatgatggccgcaatggatagcatctcttcaatgcaatcgtaatctttcgaagctatcagggcccttgccatttgcggatccacagggagatttgccatgtgattgccaatttgagtaagtgatacgcgttctataaatgaggaaatgggcactattaatatatattttttcttttttaagaacaatcaaaaaattgaattaattttattttagaagtttgtgtccatatacaaagagtaagttcaattccccgtataactaaattttttcgttttaaaatttattctttttttaacagaatttcaccaaaactggcaatttttggtcaaatttgaatattttggtggtatttagcagggatggcatggaattctgatttccgacatttttgggtttggaattccgattttcgacttacgaaaaatttttgggcctcggaattctgataaatctaattcataatttgtaatttcgctattatttctaaaaataaatatatctggtgttatagccgaaaatttttggggcttcggaatgccatcctggtaattaggataaaaaacgaagaattccgtttttaatttatccattttaaattattttgattgcttataatttaaaatagttttgttttatgtccatatattaagttttaaaaaattaaattacggtataattagggacccgctttgaggcattttttgccttttttctgacttactagggctgtctattttatgtaagaaaaatcgtgaaatatgtaaataaaaatttataaaaaatgctaaaatatatgtgcaaaaaacccaagatatgtactaaaatatgtaaataaaaatttttaatggtaatttttttggagaaaattcctcgtaaagggtgaaatatgcacaaaatgccataaaaataggcttaaaatcattttttagtattttaaattaatttttgatatcattttttgaaaaaaatcgattttttagggatacattttcaaaaattttttttaattttcacaaaaaatttctataaattctcaaaaatcctcaaaatatgtaaaaaaatatatgaaaatatgtacgaaaaagtgtggaatatgcatgcaaatatgtacgtatgtaatatgaaaaaaacccgaaaatatgtaaaaaaaagtcccaacttttgttcgcaaacacaaaaaagaaagtgtttttcctactattcaaagcatggagaatccaggaaaaaaacagagcacaacccacttcacgagtctcgaagactaaaatcgagaccgaaaatccgggaccgagactacaagcatcactactcttttatgccttttcacaaatttgtgccattcggtgcccttttgaaaattttttgtggaaatgaccggactgaaatttttaattttataaaaaattaaaataaattttcgccaaaaaaaaaaaaaatattaccatcgattgctcccagaaaataaagattttttaatgcgcttccaatagccgctttcggtggctgatcgcggaagcggaggtcgccaaggtgctcagaaatactgggaatggacttcattttaaggaccattgaagtcagatcggaccaaagaatctaaaaagcatttcagcttattaaatataagtcggcatacaacccagttattctggattcaattttaactactttgtaaagtgaattccaaaataaaatttttgggtgaaaattagtcgttaacccgattcagacataaatatatatatatatatatatataaatacacggaaatttctcaaatgtatgcctcactanacttaactgtattatcgaccgcatttttttaatgttcttgaaagtaaatctctggccaatttgataatgtaattttaatttttaatctcatttgcccaaaaaatttagagaaaaattatgaaatatgagaaatcagactcgcgaagtcannagcccggatctttctttactcgatcttca

SEQ ID NO: 43 - DNA, 3429 bp, Heterodera glycines
aaaaagatagaaataaaaatctttgaaaattctgccttttttgcggttttcatctgacaacttttttgagacttgactaatccctgagaaatagcttataaatatcttttaaacatatagggctttcaaatgataccatgattgtgaagtttggccaacaaagaaaaaagttatagctttttgaacattgctgagacggagttggccagacggagttgacccctaccgtcgccggacccctccccctcccccggtgtcagtggggggggggggggggggaccggcagtgccgatatacttcgcctgggtaaatttgtaatttttaatgcgatttgttaacagattttgtccaaatgacaaaatttttttcaattttggatcaatttgttaagaaaaaatgtgagttctttggggggggggggttggcggtgccattggcgttgccgagagaaaaattagaaatttgacgttttttgaacagattttcactgaaaattttctattattaggttaaattttgcataaattaatgattattattacaaaaggaaaaatttgattttttttcataaaatgtcatttttacattcatatgcaaaaatctcgatttccaaggattttgatgaaatcataaaataattttttcaagcaagtatagaaaaatagcctattaaaatatttagaaaattttttagattctatttttttttaaatttccgattttccggcttccgaaaaaatctttagccacggaattcagttttacgattcccaaaatttttgggccacggaatgccatccctggtacattaattataatagtgaattcattttcaatattttttaactttttcaacggtataactgacgccggagtaggacaaaacgtcgtcagccgaaacgtcgtcgaacgaatttttcgaccataacttttttctttctcaaccaaattaaacatttttggtattattcgaaagcattcgaaaaatgctattagcctgcaaattttcaaaaatttttatttatgcacaataaaatcagagcaaaaaaagttcgaattactgggcttttgagttccttctggccataacttttttgaaacttaacgaaaatttttgagattttgcaaattaataataaacacatagagctatcgaacaacaccaacaattcttaatttgattgacagtgaacaaagttatggttcaaaaagtcttccgacgacgtttcggccgccgacgttttggggtgcaccgaactgacgcatttcccgtttcaagatctaattttgccattatttaaaaaaaactaactgtgatgccctttttggtatcatatttgaggtgcttcgccaagccactatcaacaacatagacgatgccgtcgatagtgatcgatgattcggcgatgttcgtggcgatcacacattttctctggtctatttaaaaatttgatttagaatacggaattttaaatataaatatttttttatttaatgaatttgggatcaggcaataatgagaagtgccgaaggaaaagttttataaatttgatttattaaatttggttgtaacaatttatttttgacccgatttggcaagaaaaaaattaccagagatgccatcgaaattggcaaccaaaattgaattatgttgaaaaataaggacattattaaacccgattaaaaaattcttaatttcacgtaccaaagtttttcaattttagggaatattaaacatatatgtgtatatgtgtgctaaattttaacaactttccttccatttttaataaaaccatttaaatattcaataatatttttgctaaaataaaaaataaaagaaaaaagaaatcaaaaaacaaaaaacaaaccaaattaaagaattcaaaatttttaaattaatttttttaatttaaattaatattaattgttacaatttaatttaatttaatttttattactcggatatctttcgaacgcttttgcttgctggtcagttgtcaatgccccatacaacggccggcacacctaataaaaattgctataaaattttttcctttttattgtagagagatctttcttgtccttatttccaagaattgtctttattttccatttcattattatccttattttaatttggattaaaaataacaaaaatcagtatttttaacctaataatcataaaattgcaatttggtgcaaaatctgttaacaaatagcataaatttttttatgtttaccataatttgctaacaaatataataagcaaatgtacacaaatgtctcctattttatagaaaaattggaattctgtgccctctattcaaaagtttttttttgaaattaccaaatcagatctcttcaattcgcgtaatcgttccttcaccttgtcgcacactttctcaatttcctgtagaatacatacatatattaatttctaacttttattaaaattttgcacggatcgttttcaattaaaaaaattacatttgttttgttcctttaattttttcgtcttcttggcgactcattttgagtatgaaataaataaagcactgctgttgactttatttttagagaaaaaaagagattttcttttcaagaattcttaatcataaaaacaaacataaacggaaatcattcaaaaactttaagaatcaatgccaaaatgtcatttttcttgagaaaaaatggtacttgaaaacattttaaattaacaatataacgaaatagagaattttttttatattctaatttatattcattaaaaagttaactttaaaagaaccgtttaatttttaatttttgtttcaaaaatgaaaaaaattatttgataaaaatgtcaagaatttttatagtactagcaatttctaaatatctatgagttcgtaaattattattctaatattttaattttctttttgtatattcattggtttcctatcgacaaaatttaatccatatatatatatatatatatatatatatatatatatatttcaattgacacatattttatcattttttaattaaaatcagtacaaaaagtctttttgggactcagtctcgattctcgggtcagctggagaccaaaaatttcgtctcgagcaaaaatattttccatttattattcatacttacttcctccccttcaacgaaaacaaggatgtctccgtattgtttctcaacatgaatttggattattgccgttgcagcagcttccaatgcgtcctcaaccggcgcagaaaggtactaaaaactttgtttaactgacagcctagccattttcatttttagtaaatcccttagggttggaaaaagtttctggagaaaacaaaaagatctttagaaagagcacaaaattctctataaacttaaagtcgcaagactctactactatcatggggaaataggctgaagaaaataat

SEQ ID NO: 44 - DNA, 2650 bp, Heterodera glycines
cgcggcgctctttccccaaacctcaattatatgcgacaaacattttgtttttgtgttttaaattaatgcattgcgccaacatgacgtcgacctgtttttggcgaagtgtttgttactgtgcgcagggcatttcgccaatgtttttacgccaagcacagttcgtccccccttaatttcactcaaattttttgtgctgaaaatgagattggtactcacctcaaataaattgaaaattctatttgatttaggatttgggttcatttctagaaaactttcaactccttccttctcctctagtttttcctcctccttttcattttcttcttcctctttatcctcgatcactattttatgttttatcctttctctttttttgttcttccttccactctatctctctctctctttattcctcctctctttctcctctctcactctttatccttctctctctctctctctttatactctctctctctcccccattttcttttattttgttccccaaattcttcagcaataagcagcccacccactcccatacacaattcttcaattgctcaattgaatcgctcattcaattgtgaagcgtacataatcatcgaccattcattccgtcttctgtttgtttattcccttccattcatttttcattcattcactttccctttgatccgcctttttttgtgtgggtacaccctcaaaatgttgtgtggttgttcaacagttctattcatgttgtatgttgtttgctggggtattgtatttactcgggatttgaattttggtttcatctcgaagcaaatgataaatcttagcgaggattttcgaatgaccaaacaaaacacttaaatcccctgagaaatatcgagtttaaatattctttttagtaaaaacgcacactccaaatacataaaccacaaaaaaatattttaaaatgccaaatttgaatcttccttttattaaactaggaaatgtatatatgtagtgtaacaaaatattccgtcctctaaaaatggcaattttatcattgttttgcgcaatttgatacacatacaacaaatttaatttcacagctcccgcccccccccccattcgccgatgacagcggcagggcgacattcgagaacaggcttttactagtggggtgtgcgagacgtacgctgcgcaagtttatggcgtagggattgggctgggagaagacgaagaaaacattccccgcccccaattctcgcccaaattcccattcccccaattcactctcggcagaagagtgacgagactctcgtcagatgctccgcgcccctaagaagttaaattgattgtttgatggaaagaattgaattaaatttatttcaaattctaacaagacatagaacaagcaattcctttatgggctattgaaggccgcttcatcggctgagaggatggctttatttgtgcttggccgctccggacacattgggcttttcccttctcacaatgtgataggcttccatcctttcagatcgccaattttgttaaaaatcagaggaattttttctattgatttcgtaaaaattagttaagcctaaccaagtttcattaatatacaatgtatgtatacaatgtctttattctaattctatggctttttttattgctatattttgtaaatagttgagcatttaatttaatttttctaattattaaaaataatttttttaagtttaaatgttgcccacctttttaaggccatacaaatcttttttgcccacctcccttccttaatgtcccaatttgttgaaggcaaaattcttcggctaatttggccacaaatttgcccacatttccccccgactaaatgcatccatcagtccatcatcatccaccattggccacataacgatgttttgatcgtgtgatcgtgtgattgttgtgtgtatgtgtgcacatctgctgcttgtacgtcttgggccaagaggaggggaagtgagtgagtccaagacgaattgccacacaaaaatgggcggggcgggggagggcgcctccttcctgcgccaagaacggggacggacggacattgagcggagagaggataaatttgtcattcttggacactttattccacaattaattttgttccatccttatagataggattcattaaacttcttcctccccccacctctgggaacaaagcattggcccagcaattattaaaaattcaaaaaccaatattgccctgccaagtttgaaacacatagcagtctggcacccatactaatatatcccaaaaagggtccaaaaatttccgggattaatttgcacttatcttccctttttctttggatgtatttaagaaaagttatgtcaaaatatggcaccttctctcgagaatgaaacgcgtttatgcggtgggcatgttcagcaagcagcttttttcacttttcccgtgttgcccccgaggtgatggaccacacttttttctcgcctctctcttctcctagcagctcactaactcaattgcccctgctaaatattttcaggaagttgacgaggaagttcaatggattaacaaagtcgactgtctcataaaactgaaagaagaaagaagttattgcggaacgaaaaggtcgaaacagaataaaaaacatcagagcatggaata

SEQ ID NO: 45 - DNA, 2209 bp, Heterodera glycines
tgggggggggggaaaattcctttttcccccccccccccccccccccgcttcgcctccccttttttgggctggctctcttcgtgacctgttttgggggtgtcgggggatggggaggggagggatgcgattgaatgggtggggtccgtccgtgggctataaggggaaaatggttggtgaataataacaatgtgttgttaaagtgtgtggtgctgtgatgggaatgattcagcaacagaagaacgcccctctcccctccccaatcaaaaattgggaattgtttttgtatttttttgtactgattgaattgcatccctttactcagtttatttcagtgtgtgtggtgccccccccccccccattagaagatggcgaatgttttgataatgcattcgcggtgccatttgtttgcattacaaattgcctatttatggcacaccaaaattttgatggcacctttttaatgttgtatgtaaggtgtgcccatttattggtactttttaatagcttatatatggtgtaaaaagaaattttacaccatttcttatgtgacaaattgcgactttatggcatgccattaaatttatggcaatttatttgatgcaaatttcgtcttaaaaataataaattttccctctaaaaatattttttcaatatattagtgatattcttagataagtgtaccaccgctgttttacacatgtatttatttgtaaatgttctttttccattaaatgtcttatgagtatgcgtcttggcattgagaaattatcctatttttctaatatataatttttttttaatttaagcaaaaaaaacaaaataatgaaagtatttactgttgggctggaccagaaaccgccgctggaggaggccaaggggagtccagaaaaatcaggtaaaacgagcagatagcaaggagcaagcagaacatgatttttttgtcatttcaacaagaaatttcccaattttctgaaatcacaaaatcttcgaaataaccaagaagctctatcttattcgccttcaaaattttatttatgaactcctatttaatccaaattcctaattacggtgtccattacaatacctaccgtattcatttggactccatttctccctgtctaattaattttggctttgattatctgaagtttaccatttgctcaaccattagacacgcctccgccccgctactccaccaccgaggcgcgcattccgcttccgctcgggccccaactgccgcgtccgccgttgccgccccagccgattatcatgcgcaaggcgcgcggctacaaaggcattctgttggtgctgatcgccgtctttttgatggcagcttttgcgctcactttgtccgaaatggcgtacaacagacaacgcgaggagaacttcttcaagctgcgctggtcagtcaagtaaagaaggaacgattctgagcttaagcagttttttttgtcagtcaatcggtggcaaggcgtacaaagcataaattgactaaatgattgggaaattgagagagagagagagagggacggctaaatgttttatgaaatgccaacaaactcttttggcactgtttcaatttgggcatttttcagtagaaatggcttatcatattttgtttattggtttgatattgaatcggtcttttgcttgagcggatcttcactaaattaaacctacttcgaatcttcgtttctttaggcttaagtttcctgccgctaaatttcatttgatggttttttatctcactgatcagtttatttccgttttgaaacaatattggactgatcattggattagtagggctcggatttttaagcgcaacaaagtctaaaataaggccgtaaataagggcgaaaaaatcgcgaaataagggcaaaaaagttccaaatttaggggtatacttttttaaattgctgttttttatatgaaaataatttcagattaaggcaaacaaaatattttggtcgattcttaggggtgcatttttcgtttttattgcatttttgttaataaattttggacaaaacgcaaaaataagggcaaaaacttattttaagggcgaacatccaaaataaggatttctaaggtcgaataagggcgttaaaacgcaaaattttcgaaacaaaaaatgtgttttttcgtgcatttttcgtcgagttaaagccgcagaaaaaataagtaaaaacttataaatccgggccctact

SEQ ID NO: 46 - DNA, 2013 bp, Heterodera glycines
gaagcatcgtatgggctatgaaaacgccggtccctacgactattaccatcgagcatcatcggctattggcgagaaatttgacagattgttcagcctagcaaaaaggtaaactgacttttaattgtttttttaataaaaagtttgctatctgggttactgtaactgaaatttctgtaattgacaattgcatgtaaatgacttaaatctctgctggtatgtagcgaatatgcattgaaaataaatattttcataatcctttggggaaataaaacacagaaaaagagagtgtggcataaaagttatgacaacatatcaatttataataataacctataaaattttaagcttttttattttaatttttgcagtaatgaattgccaccatcgctgcccatttcggcgtccatggaccgcgacccgtccaccaccagcacaacatcggcaccggcacaaccgtcagagcccgtggtggccatcgactccttcccgcaatttatgggactcaacggccgcagagtgcaccagccatttggaccccaacaaaactccgtggaggtgtgaaataataaatttgttaaagatttgacgacaatagggtagagactaatggaaattgggcattgcgccagagtttcatattttagtaaaattttaaaaacttcggtttgaataagttcggttaacaatcatttccaactgtttttgctcgtttagatggagcaaccgatgccacaaatgttcggcagcaacggcatgaccaacagcgggccgttctcccaggtgcgcgacgcacgactgcagtttttgcgcaacatcctgcagaagatcaaacagcacgcggaggacattgggtaaagggctgcacgagcgtacggttgacagttgggtctaccgtacccatttgctacttactatacatactgtggtgcatttgagccgaacccgtataaataatctgtttatgattataaatgatcaaaccaacggcccactgttgtattcattttggatacacacgcacaaattaccatgaaaaaataaatgatattaaagttccccttatagaatacagtattttctacaaaatgtaccatgctttgtgtctcattttgacaaattttccacaaaaaatttaccgtatctcacttcaaattagactaatagatattttctaaaatatagaattaagcacgactcttttaatttaatttgcagctttgacggcaccatgcaagtgtccatcattgaggtggagccgcaaaacggtgccgacggcgccgagacggctgcccaagagaacggcaacattaacaacaacaacaacatttggggcccgcaacaacgtggcgtcgaaatgggccagcagccccagcaacagcaacaacagtcactccccgctcagatggcatttccgatgccgcaacatttcttcccacaccctcgcccactgattgacgatttcaaggtgggcagggcatcatatagccattggcaaagatttttgccaagttcatcggaggatttttgcataatttcggaaatgcactatttcaaattttggcaaaaaatgccattttttaatttttaggttctatatactgaattttaaactactccaatgaaatgaattttttaatgaaattggtttaaaaattgaaaaatagataaggctttatattttatagtaaatatgggacagaaccataaaaatgcaaatggtccatatacaaaaaataaaaaaaatgttaatgaatttgagaattatttattttttattttttgaagaattcgcgctcttttctcgacggattcggcgagttccatccgcccagctttgtgcaacagcagcagcagcagatgaacaatcatatcacggagccggaggagcgaccgcgcatgtttggcccatgggcacagcagcagcaaatgccgaatatgccggacgagttccaacaacagcaacagcagcaacaacaacaacaacagccgaatgtgccggattttagggaaaag

SEQ ID NO: 47 - DNA, 1318 bp, Heterodera glycines
  unsure (1)..(1318): unsure at all n locations
tgtttttccaccccnattttcccgcaacaaatgaacctccgcttcccgcccattcagcctccacaggtgtccatcacaaattgccacgctttatcatttcaattctctaaaaattattaaaaaaatgttttaataattatttaatattaaaatttaaatataattaaatgtcataaaaggttaacaatgaatgggcccaacaacagcaacagcaacaaaatgcgttgcagcttcaacaaaacggggccgctgcgttgccgcgcccggccgcgttcgaccgttggaacggtggcccaccgccatcatcttccaacaatggttttttcgtgccaccgccgccgtcgccccaattcgcgcaacaacagcaacaggagcagacggagcagcaacaacagccgcaaccgcaacaatcagttgtccagcaacaacaacaacagccacagccgcaaccactgcagcaacaagttgtgtcgggcggggattggcattcatttttagccacaaaaactcaatcgtccaaagaattgaaacaataaattttgtccaaatttaccttgaataatcgggccgtttcaatctgtggtgccaattttaatagaaaaaacgctttgtagtaaataggcacttcagactctaaagctcctcagactgaaacgaactgactgaaatcggccagattcaaatgaccccatcgaatcttgaatactccaaatttaaaaataaaattttgaaaatgtcagattcaaattgacttccccgaggtcaagcttccgccgccgagcattgacagcaacgacaacagtaacaatgttgttgatgacaacaacaagaacaaattccaactgccaattgggcctccaactgaacagcctcaggcacaggtgaaaaatcaataaaaattttgtaaaattaataccaaaagtgcttactgtatgattaatgtctattgctgtgcgcttcagaatcaacagcaaccgcaacaaccgcgccaggactggctgcccaaatggtcgacttcgtcatcatcctcagccggtatttagagggaaacatgagaaagtgggggggggggggggtcgtagccaaatttacgaaaggtcaagaatgcatctttttttcaatcacaaatagtttaaacagaacagctttaaaattaggaaaaaaattttcttgagacattagaacaattaaatcaattattaaaaaactaagattttttctttaaaaatatttatttaaaaataaattggaaaaaacatgaatttaaacgaatttgggcattcgtgcaaatgcccggagcgcaactgtttgtacaatg

SEQ ID NO: 48 - DNA, 4393 bp, Heterodera glycines
  unsure (1)..(4393): unsure at all n locations
atgcccggagcgcaactgtttgtacaatggtctgcatttcatttatgcccaacttttcttgctttcagctgacaagaccgaccccgacaacagcaaggacgatgatgataatgatgatgatgagaacagcaacgccaaccgtggcaccggcacaatgttcggcgccggtccgccatccgcccaaccgtcggacattgttaaatttcccactgtgactgttgttgaggcggcaaagaatgaacacgacgatgctgtggaggtgcatatctgattattaaatgaatgccataaaatttacgacgatttttccccgtttgccttaggcaatgatcgatgggtgccctggtgttaaacctatcgattattgttcgagagtcctggtctcgacttccttgatcgggaccgacactttttacactatcccctaaagaattttaagccgaaattccaacataaatttctggcacccgcttacatctcccctgctaattacttcgtgtacgggttccgcccccccccccccccctcccaatgtaattgcaaccggcaaacgagttcaaaaacctggacaggccaaacagcaagccgacaattgcaaaaatatggaaaaaaactattgaatacttttgcagccaattcccacctcgttgggcactgaacagccggcggcaccacccgctcagcccacgccagctgcggcaacacctcaagttcaagcagcgggtgcagctgtggctccctcccaaactgagcaccagcaggagaagaaggaggtgtggcatgtctcccatatacctttcatagataattaaatcgaaaagtaatgaactaattaacccagccactgtttcgctgaaagcgaaatttccgtgcactaatgacatggcttttcgttcggcttttctttaatcatgacgctaaaatattatgtttaaaaattgctttattgtttcatggaaaatttaaccaaattttttatttcgttcaattcgcattgaacttcgcccaatccctgaaaatatgattttctaaaaattcatcacatttcaaaaattaaacagcagtccgccgatgagttggttgaggtggacgcaccgccgcagccgattgtgccacaacagaacaatcagccggcgcaaccacagcaacaacagccgcagcagcagcaacaggaggagatgaccaagacggagcaggaacaaccgcagctgaaccagcaacagcagccatccccgcccggcatttcgccattccaacagaaatggttcccggaagtgccgtccgtgtttttccaggtattattttttgaaagggactaaaagatggcatttttttagaatattctttaaattatgtttaaataatttatctatctcattaacggatgcgttgggtgggagcaaatgaatgaaaaagagaagagggaaataaggaatggaccaccaaggaggaatgtaacggaattccgacatatttggctgaattttttttggggcacggaatttcgacttccagagagactacggtagagagagagagagagagtggaaagaaaacagacagtttaagtgtgtggcgtttaacgggagaaatagttaggcaaaacggtagagagaaaacagacagttagaggaatgccaactcttccgttaatggggtagcacccaaaaaataataacaatcaataatacaataattaattacctaacttattttatctttgtaaatctccgatccctaacacttaatttatcagttgataaatgcttgatcttaaccaaatgttagcaaaaacactccttaatttagtgctagcttagcttttttcgtgctaaaaatttgtcctaaaaatgcttttaaaaatttcagaaggacaattcaagagaagaaattgagaaaactgagaaagtgttcgagtcaatggtgcaaaatatgaagagaatgattgggaaaatgttcaaagtggacgattctgactccacagaaattgtccaggttaagatcaaacccatagaagcattttaattttattttcaaaaattctgaagaaaccttggattggccaaagatagaataaattgttttcttaaaaacagggcacggattttcaaaaaaaaattctaaggaagcgattaattcataacgaaaaaaaacaaatcaaagacttcaaagttcacgttctgttcatttccctgcttcatttacctttaaattttaaatctttataaaaaaacatcgaaatttttctttgaaagactaaaaaaattttttaaaaattattattgtattttaggacaacattaacacctaagcacaatttcgtacccttataaaccacaatttttttttcttatttaattttttttttctaaggttgatgacccaaacggtggcaacgccggtggcactgacgacgtgaacatgccaaaaccggcagaactggtcgccaatgatggaggtgctggggagcagcaacgacctcgacagccccacatggtggttgattgaggggaagaaacttgtggagaacaaagatattcgggaaaatttttttaatttttggcttttatttcgtaaactatgcagcaaatttcattggtttttttttaaattaacccatttaaaaaaaataattttgtctcaaagtgccaaaaattgcaaaaatttaacccaccaaaaccccttttatattttgaaaatgttaattctattgttcaaccaccaaaatcacaccacagtaaatgtgtcaccgttaaagtgatatgcatccattccttcgttgaattctgtgttttttttttaaattttcccggatgctttggcataacgtcgtcccgtgttccccgtttgaaaatggaattgattggagctgatcagaagttatcagcagcaggacagtaaatccgcacattagctgctgatcacttaagactcggctccctctcccctcccccctgcttttgctctctgatcgcaccgttgtgagcctcgaccatataaattaattagcccataacacactcactaattgacccaaccaattattattgctcgtatatatatttggttattattatatttttcattttttgtagcataaatttttctgaaattattttaaaacgctgcccgtcatttcgtcccgcgtcgtttcgtcctgcgtcgtttcgtcccgcgtcgtttcgtcctgcgtcgtttcgtcccgcattgtttcgtcccccaagccaaaattagtcgtttcgtccccaaatttattttaattttcaaaaacggcgaagaagtctaattttatatataagtctataaatagttttttattaattgaacaacacaaaaaaacaataaaaacattgaaatgaacaaatcctaagggatgacttcagcgattgaatcttccactctttcagtaattcaatttcctgcaattccagcatggaattggaaacagtgccgacggacatagaggctcttaccaaaggcggacttaaaatttagaaaacatgaaattttgtgaaattggctgtgccttgctgcaacgtgacgattcattcaacgagactgcaccaacttgtggtcggatgtgacggatgaaaatgatgtcccagcgagtgcttaagatgcaaaagccggatattccgttgtcggttttgctgacatttttacacgtacgtacagggcagtcacgcacactgcatctccacaatcattttgtttgtgcgtaaataatcggaacctaaaaacgaaaaattccttgaaaaaaaaattttttctcaccattaaatcaaatgcaaacacctcgtcttttcggttttccaagttcgagataccgtgttcttcaaaatcatcggcgcggtcgttgttttctcgttttgttgactgtgaccagcagcagactgcgtctctttttctccgtcattattattcaaaactttgcgcttacgacattttgaagattttcaatttttttacgatccatcatacttctaaattcgtaaatttatgctgtgttaactaaactcggaaaaaattttagtggtaacactttagaaactaaatattttataaataaaaagaaatttggggacgaaacgactaattttggcttgggggacgaaacgacgcgggacgaaacgacgcaggacgaaacgacgcgggacgaaacgacgcgggacgaaacgacgcgggacgaaacgacgcgggacgaaatgacagcgcgccgttgcaattgtgcgggcgaaattgataaaaaattagtcacttttgtacataaaaacactggattttttcaatttttaacacctattttggccttgttgnggcttattangtatttgtggaaaatttgttagttttttataagaatttttttgggcatttgaaaatttttatttgg

SEQ ID NO: 49 - DNA, 2083 bp, Heterodera glycines
aaccatatccaacattgttggtgtcgttcgaaagcttaatctatttagaagctttttctaagctattgctttgcgattagacaattatcaaaacagttatgcatgaaaattgcgaaaagtcgaaatttttgaacttttttcttaataaaatttttacaggcttgaaaaacttttcgtttttgataaggctaatagaggatacatagggctttcgaatgataccaagattgttggatttggatgccaaagaaaaaagcttaagtggaaaaacgagctggcgccgaaacgggagcgccgaaacgcgagcgccgaaacgcgtgggtcccccaaacgtgagggccaaactgacatggaccgtttttgcatgtgcccattttctcctccgtttatctccctcacattgtctatttaaaggcgtgttcccatcctccactggtcatttcttcttcttttctatttgttactttctcggctcatcttccgtttatgcaccacatctttttttaacatttttccaaacaaaaaatataccatacctatagtctttaggggtcgctgattacgaatccgacattcatttcgacccatttctaaactccgaattcgataaaagttgaaaatttatttttcatcaaaattcacccaaaatcgaaaaagaaccaacggcagcagaatctgaacaggagagccaatgacgactaaccaacggtctttcatgcatttcaatcgattttggggtaataaatgtgaattttggtgaaaaatgaattcgactttttattcgaattcaggtccggggttagaaatgggtcgaaatggatatcgggttcgtgattctgatcagcaaaacggatcatccgtcccgcagttccgtcccgggccggttccgtaaaaagtacatatttcaataaaaattttatataaaacaaagtacaataaatacacgacttgattgaagtttttggtgtacttcgtctttctatgacctttttacggactttattctcatcttctcacaatttgttttttcttcatttgtattatgtgaatctcttttatgcaattacggtttttgttttgtgtttgaatacaattctgacatgggttcgtccacgtcgcccccgcaaaatcagtattttttcttttcttgcatttataagattctgattaacaaagcatttttaaaatggggcagaaaatgcgacgacgacttaccgtattcattgttctggtcgtactgctcgcgtcatacggtgggtgctgacatttttgcacttgaatattattattgactctcagtttagagaaaaataaattttaatttttaaataaattaaattaaattgttccttcggcaggtgtttgtgcggaaggcaatgcgactgctaatgagccgacgacagtttcatcctttgacacaacgccaacggaacaaaatttggcggaagaaacgaaaagcagcgaaagcacaacacccaaaggagaagaagccgaagtgacaacagaagtagcagtaattaggaataataataatggaccaaattgttagttaattaattaatgccgaaaaattaaaattaaggcaaaaaatgaaacggaaatcggagatgacaataaatcggcacaatcagagcacgaaaatgagcatgagaagaagccgaacaacgaaatgagcagaatcaacgggggagacgaaacgaatgaaagggaaacgaataaaacggagtcagaggaaaaggtgggcaattaaacgctaattaattaatgagtgtgcaaaatgaaatccaaaataggaaaagcaaattggcacaatgccaacggaaaaaacagacaatgaagaagcgggaaacgcacaacagcgaaaagacgaagtgacggaaaaaagtgacgaaaggggcgatggaagaacaaaagagaaagaagaggagggggaaaaggaggcgaaaagcactgaaggaaaagcggaaaacgcagagaaagagaaaattgagacaaagaaggaagagacgagagaagaacaaaaagaaaaaaagacggaggaagagaacgaagaacacacgacgaatgagaaggaggcggaagg

SEQ ID NO: 50 - DNA, 3744 bp, Heterodera glycines
  unsure (1)..(3744): unsure at all n locations
tcatttaaaattatgattttttagactttgacgggacaaattggcaacacaaagtaaagacgagaaagccaaaagtcccaatggtaaaaatgatcagcagaaagagctttttaattgttaatttagtaggcgaaagtgaaaaaaaaaaagccaagggtcgaacggagaaggggaaagaaaaagccattgttttcccaacagaaaacgcagaaaatggcacaacgccagccactccagaaaaggcatctttggcacttttccgagattaattacaatttaatttagcctaacattggcaatgccaacgaaggagaggaggagaaaatgccacagccggaacgggcacagatcactcacatgagccgagagggggacaaaatgccagagaaagaaaaagtgccaaattcaaaaatcaaaatagaaaattaaaaatcataaattaattaggcgaattccaactccgacactgctgaacaacaaccaaagcatcagcacgaactcgaaattggtcagttcagaagtccgacggcggaggcaaacgacggaagcgaaggattcgaagtgataacgcgagaagagaacggaggacaccaaacggaggagggagaagaggaacagaaggccaacgaaggcgagaaaatgccaaagtcaagtggaaatgccgaaaacacaggtcaaggagaggggactcagtcggctgcgaccaccacaacgtcggcgttggcatcgacgacaacgacaagcgaaactgaaacggcaaaacagacggagcggacgacagagcaaccacaatcgtccccaagggaagaaggcgcgggcggaggagcggccaacggacccgcggacacagaagtggacattttggcaccacggggaccacccgccgcgggtttgacagaaagacaaaaatggacaaattaaaaatatatattaattacagatgaaacagacaaagaaaaaacggaagtgccgttgttacccgcggaggagaaaccgtcgacgacggcaccgacagaacaaacgcaaacgacgccaaagacaacggaggcggaagaagaacaaacgacgccgacgccgacaacaacggcaatttcagcgggacatggcgtcgaaacggtggcggaagaaacttcggaaaatgcgcaaaaggaggcggaagaggagcaaacgcaacgaggcaattagaaacaatgaaaagcaattgaaattgaaatgggacaattgggtaaaaagggggggggggtaattaaattaagcgaagggtcattcattccgacaaaataaagacacataattaaactaataatggtaattaattaaggggatttgcccatcgacgagacgacaaaaacgaaaacagaagcagaggaggtgaatttgttaaatttaaataaataattattaatataaaatataatgattttgccaatttaaaaattcgttttccatttttcgaacgaaacgacgccaattccaacggcagccgaagaaggcgaaaagggagggaatgaagtgaccgaaaaaagcattgagcaaacgacgggacaaagggaggacgaaacggcggagaaacacggcaaaaacagcggaaaatggcaaataaaacgaccgttcgcctcccaattcagaattggaactcgcccgagccttccgcactcccttccttttgcgcctctccaaaatcgaatggcgtgccgaatttggcgatctgtcgagcggagcggcacggaagttgcaagagcaaatccgagcagatgtaaggcgattaaaccttcattttaactcccgccggaataaatccttcccatttctcagctccattccgcactctccgccgccattggtcccggctttttggactatcaaatcgaagcattgcaccaaggctcagtgattgtggaggggcaattgttgagccgagaagagataagcgatgcccaaagtgtggccatggccttggaacaggtgccattgagaagaatttgaaaataaatccgagtttatttggttacttcgcttaggcaattgtctcccgaggcggcgaattgggcggaaatgcggtggacacggaagggatcagtgtggcgggtaaccaactagcgatcatctgctgatcagcttatgattttcaaaattcacattttcaggccttcccgcccacgggccaaatggtaacggagtggcagcgaaccaaaggcagcaggaggaggaggcaagccaattcggaagcaaatgctcatttctcggctttgaaattcaggccgagagtaccggctacatcatcggtggtgccgtcgtcgtcggcgttctcatcgtcgtttttgccatttttgccattgtcgtttttggggtaagccatgggaagaacgattttgacattattccattaaaaagaaatgcttcattcgacagatgaacaataggcggaacaatggcactttgaaattgaaggaggaaatttgcatggtcgaaaatgggaaagggacgcaagcgacggggcaccgattcaccacaacggcggatggaaatggcgtcaatctgtacggactgactgaaattggcattttgagtgattaatcaatgctttagcaccggactgaggacgacaatgcccggcacggacagtgccaccaacggacaaagcatcggcggaaggctcaacggaatgaacgggcagcagcagccgatcatcctaagcggctcgcaattttccactccgtcggcgtacacttcagcgaacaacagaccctgaggggtggcgatcggatcgcccgctcggtgattgatcagcggattgtgatctttgaactctgatcatctgacggggatacggtcaatgccatcggtggtcctttttatatttaattgatcaaaatgacggtgatttgaattgactgtgtcctcatttgtcagttgcattattatattacgtgttgggaaaacctttgacttttgaagaatttgctaattaattgagttgtattttccttttcccaacaatggcatttctctgccaattaattccattgacttttttctgatcgcaaattcatttttattctctttgatttcccttttattagacatatattttccataattaatatattcttttgctttttctcggtgtgctcaatcacacaaatattttgaccatttctgctgttaatcgcttttaatgccaattcattgttaaatcattataaaatgaatctttccaatttataaatcatatttttgtcttttcgacgaattccattcattaattaatccatcaaatggcatcattttaatacattatccaaaataataaaaaatgtacatataaagaaaaattaataaatgataaaacaacgaagatgggaataataaaataatagaaaaaaggaagaaatttaaaataaaaataaaattaaaaacttaaaaaaatttgcgtcgaatcaaactcatttcacattaaaaaaagaagataatacaaatttataaattgttaattaattaattatattgatcagaaattgaactcaatttatttaattttacaggtgctgtggcgaagtgacaaaaaggcaaatgagtggtgataggaagnnncnnntcntttccctccggcctcgttcttctnctgnttcttnnnttctttnntttccaatcgaatgaggagataataataataaatatattanaaatatgacactgttgtctnccacgaaaaaagacacgaccaaataatattttgatgac

SEQ ID NO: 51 - DNA, 1999 bp, Heterodera glycines
ctgttctgtctgtctgatcatctccgtctctttttgtctgaacagcgtcgacctgcatgtaattgctgacaattttgtaacagtttctcatgcatggccccgacagaaagcaaaagtcgggcgtccgtttggtggcacagtgcgcccggcaccacggctcgcactcgtcgaagctgacgtaccacgagtggtgcacgttccgtggcgtgaatttctgcgcgcgccaatccgtttgcgcgacgggcaaatacgcctaaacaaatggcattatttaaaatcaaaatccaaatgtcatattggcatttccactttgggcaatcaatgttggcaaatgatttgcttcttcgcttacattgcattggctgtgccgttggacgaccattgagccgatgaacacggagaggagaagagcaaagcgatggcattttgtgaatttcattgtttttgatggttgttttttaattggatgttattaagtctctttctgtccacgttttttgcccaatttcgcccctttttatagccctccgtccgtccgtcgattcatttcggtggcgtggccgccccccgacgacgttttgcgttttgcgccggaaggggcaccgatttgtacggacggaagaacaaaacgaaacgaaggaagagaaggacaaattggaaagatcagcggaagaaagaacaaaagaaagaccaaaaaaggaggaggaaaatgggggaaattgagcagaaaattggaattttaatgaaattttgaaaaagttgcgaaggaaagaaaaatctttgaattgaattggtttttttgattgattggtcatgcaaaaggattaaagaaagggactaaaataaacagaacaaatccaatcataaaaatgagttggaaaaagcgaatgatttgaaaattgggcgaaaagaccaaaaaagggaaaaagcaaagatcagaagggagggcaatgaaaatgacctacaaaagaggaaattcttaaaataacaccaaaatgtgcagaataatgaaaagagaaacaattcaaatggaaagtccaaaattaattaaatttaaaatatttatgaaaatgccgggaatttttatgctcataaaagaactaattgaggtaaatgccaacatagcaatgaatgaatgtgccaaaataatgaaaaacccaagggaaaaatataaaagactcaaaaatttatttcaattttctcttctgctgaccaaactctgcttctgcttctgtgtgggccaatgctttttttgtcggcacaagttttacgccaattaaccaaattttgcaataatttgcgctaaatttaataaatttttttaacttcaacacttatttgcctgaatgatgtggcaatgatttgaatggaaatggcacaattttccctgtaaaattcggccattacgtgtgccgttccgccgttggactggtcaatattcacaaacaattgccagcgaattcgtccgtccataaattggcaaaatttgtccaattcgtttttttgctcggccgcgcaatttaccaaaatgaattttgaaactgaaaaatcccaatgagaaaactaaaaggcgaagaaacaattcaaattttatcaatttatgcaatatttgcttaatttacgtatttttaattttttttgatttgatgccgcacaatttcttcacaattcatttctgatataattagcgtttttaaaaaattagggaaatgatatgcctctggtgggagtcgaacccacgcctccatcccagtaaattggccattgagaatttaatttattaagcctaaatttgcccttttttctttaccaattttgaccatttcataaagtgctgctttttggcgactatcattgagaattcgctgaatcgcttctgcaccttttcatttgtctttccttcggcttacaaaagtgccgtattctccgaatggcactttttcgttcgctttctgtcgcttttttcataaattcgctgaattcgttattcgtttgtaca

SEQ ID NO: 52 - DNA, 1826 bp, Heterodera glycines
ccaattaaatgcccaaaaccaaccgcgccaaaacctccaaagtttgcaattgttttgacgcgaaatgttcgttattttctcctccaattcgctaaattctcttctttttttgcttaagaatgtccttttgctgttaaagttggtggcgccaatttcctatgccaaagttacctaaatgacccttcaaaaacgggcgtttttcgatgttaaaatttcatttaattttattttaaacattttgttatttttaaaatgacttagactttttcattttcagagaatttcatttttattgtctcatttttcttaacagacggacaaattaaatacttttcgcatttcttttttcccttttgtatttattgtggaaataaattaataataattgtaataatcaaataaaatatttgtgcaaaatcgcattattcttcttcatcttcttctctctcttctttggctatcctaaattattatttttttcaattaaaaaatgccaaattcgaattttcttaccaattccgcacagtttcccccgaggccatttccgcttttagctgaatattgtgaaaggatcccttctcaaagtccccttggagtttcgcttccaatttcttgctcagcttggcgttcagttttctcttaaatgtgccattggccttctgattgggcgccatttgaatgccgacgatccatgccaattcgcatattttcgatccatcggtctgacatttggacaaagcaatcgctttcgggaaaacatggcaaaaatcgacccaaaaggccaaaggattctcgacaaattcgagcagctcgtaacgaagtcgttttccgacaaatccgcaaaagtttttaacattaaacgaagtgccaaagcatttgaaaacgacgaaattttcaaactgaaaatgaaaaaataaagaaaatgtagcaaatagcaatcatgttgtactttttcactgaatttggtcattcgaattggtccaatgatcgcattttcgtcttttttgtttcttattttcgccaatgctataaaaaataattttttaatttgtattaaaattaaaagatttaatttttattttctttttaaattgcattttttattttttgcctttttttagttcatttttcaggacttttgcactcgaattgttcactttttcggcaacatttctctcggggaatgtcggcgtaattacggccattgccaattccatgcgaatgttttttttcgcttccttcccaaagttttcccatgcaaattgtctgcgccaaaaccattctctgtacggcgaccaactcaaaaatccgccgaattttttgtcgctaatttcggccaattggacgggcattggccaattcctgagaaaaagacaaaaatcaattaaaattcgaaatattttaaattattaccaatttgaaaaaatgagaaagaatctgtcgatgagaaaaggcaaagacgaatttgggaaaagaagaaccactttggaaagcatcagaagaagcatttgaccattaaaatagcccaattcgttgctcagaatttgattgtctgttgaaatcgccaaattaatcaacccattttaaaaattatttaattagatttattaaattcgtttttttattcatttttactttttgcccacttctccaaataagccaaaattgtgcgaaatttttccaaagttttggtgccaaaagcatcggccaattcaaaacgctccaaaattgccaaataattgttttcaggcaaaataaattgcaacactttcaagctggtcgcatcgaaggtataatagaaacattaaatgacattaattaatgat

SEQ ID NO: 53 - DNA, 2181 bp, Heterodera glycines
  unsure (1)..(2181): unsure at all n locations
tccctcatcaaaatggtcatgtcttccaatttgtgaatgattgaccaaatttcatcaaaaatatttccgtttgttntgcgctgaaatttttgcgcggaattcgcgcgaattttggaatttccaaaaatttcacgtcaatttgcatctgcgaaaggccaattagtatcgatggaatgttcgaaaattgactttttgggtgtttttgaatgaaaatcaaatttattccctaaaaacaattaaattaagaaaacaattggcatttgtttttaattattttttatttagttttccatgactttgcaaagagcacaaaaaagcgaattgtctgaacatttgtccgctctttgctccgttttttcgtcacaattcgattccccaaaaattaatttttcttcaaattcttccggcaaaatgcaaattgtcgcaaatttgctgtgcgtatccctcaaaaagaataaactcggaaattgaaagtgcgccgcgtcggactgaaattttttgtttatttattttttattttttgggggggggggaaattagcattaataaatttcaattttgattattaaaattacccattcgtcaaatatttgttttatttcggccatttctcttccatttttttgtccgttttttaattttatttcttttttcacctgaaatgtttaaaaaattttttatttttctttatttttattactttttcagtttctctgaattttctcttcttttcttccgctgaatttaattcttggaatttttctgtttggaataattgtgaattattctctttaaattggcatttgtccttctcttcggcaattgttgttaaattcgcattgtttttgtattcataaaataatttttggtctgatttttttgggttttaatttacgctaaggttaataattaatagaataattaaatttaaattcattaattaatttatttaattttcacccagttttcgctgtgcctccgccctttttaaaaattccaaatttctttcgaatttctctaaaattgtttcactttttttctctgccattgtgccgttataaaggttcaaaagtgccatctttttgctgctttcgcccatttcttcccaatttttcacttttccctcttttattgcctcccccaattttcgctggtgcaattgtccaattatttggtcacattttgccccacctttttccctattttcccccattgcccccacaatttccccaattatttggcatatcttttccaaatgcttttcctcctttccctctctctctgcctgcgaatattccgtccttttcagcctctcccactgttccccaatgcttttcctttggcttccatttgcctcccattccttcgcttccaatcgatttgaaatttcgttagacaaaacgccaatgtttagcaatgcgatgctttttcccatttcttctgtgtgctgctcattttgttgttgccctttgttaattatctccaaatattcgtcgtatttcgctgccaaaaatttgccatcgccaaattccctcattttcattttccgattattttcgaccaaattattctcgccaatctccgtaattccctctgaataggcccccactttttcctcctctctttcctcattttcttttccttctttctgatcacttcccttctctaccgtaacgttttctaccgtattcggccccccctctctctcctcacctattacggtattttccttatcctttcccgctttttcctcctttctttcctcgttttcttttccttctttctgatcactttccttccctaccgtatccttttctaccgtattcgtcccctcctctctctcctcccctattacggtattttccttatcctttcccgctttttcctcctttctttcctcgttttcttttccttctttctgatcactttccttccctaccgtatccttttctaccgtattcgtcccctcctctctctcctcccctattacggtattttccccttccttttcctctttttcttctgctgctttcttttgctttttttgcttcgcttttttctttttccttttcactttcacttctttttcttctttccttttttcaaattttcttccaatttttttacaatnccattaaatcaattcttttcaaatttccaaatcgtttcttttcccaaatg

SEQ ID NO: 54 - DNA, 7943 bp, Heterodera glycines
  unsure (1)..(7943): unsure at all n locations
gaattgtttgtccctcttattaaatccgttaattgtttccacgtgtttttccattaattgctcctctaaatcccncaatttgtcttcatttgttccttttcttttgctttcttcgtactttctttggcttttttcaattatttttctcatttccttctccgttcccttcccaactttttttgcgttttttaatattttttcaaaaaataaatttaattcatttaaaaaattcatttgaaatattttaatgtttggcatttcgtcctcattttcgtcgaataattggtcataaaactgacaaagcaacaattttttacgctcccaaaaagtggcaaaacgccgtgcgtccgttgaatgatttccaatttcaattgtttttgaaatttttgcatcgatccaacggaaaaaaacaaataaatccaactgaaaaattaaataaatttggcaaaaaaagggatgaatgaaattttaaatttaaaaatttattaatttttcaattgaaaatgctttcccactttcagcttggcattcagccatttcattgaattactcgccacaaaaaggtcaacgtaatgtctaatcaacagattgtcatcgctgaacagcactaaaataaaccaaaatttacttcgaatgtcgtgcattttaatgcctaattatctcgctaattgcccttaattatcccttgcctttcttttcgccgttcgttttgccttcgtccatccacaacgctttgaccttccaattttcgtctgttatgtccggcaaaagttccctcaccgtttcttcgctattaattttcagtaatttaaaaagtcgagtctttgcccccggtactccctcaattttcgcgcgaagactttggaaatgttcgggattttcatcaagaactttggaaagatttgcagagaaaaccgcagcgaagtgcgaaatggcacttaaatttaagcaataacaaaaaatggttttttaatggcctccccccgcttttccctcccctgctaattcccggtgcctccccctattccgctgctaatgccccccattcttccgggtgcccctccccttccgcttttgtccttccgtgttccgcttcgcttgcctcttcacaacttcctcctcttcgcattttcgcccgttccattcgcgcattacgtccgcttttcctactttaagctgtcccttgtcaatgctttccgccaaaatgaaaaacataaaaagcggacagaatgcctttctcagcaaaaggttcgtttcgttcgctttggccaattgcgcgtaaaatttcaccttttctctcccaattatcatcagtaaaacttctccaattgttttttcttccgccgttttggtgctgtcattctcacgcaaattgtgctcaatttcattgatggcacccaaaagaaaaggcgacgaaattcgcacgccggcattttccgcagccaaagtgccacttttgaattccaattgccgaagcagcaacacaagcagatggcttattgacaaatgttctaaattaggaattgaccccggctcccggtaaattggacaccggaaaatttgacatcatttcatataaaaataaataaacaaaaattttggtgtggcctaaaaatttttattttagtctgcacatacctatgttttttatatgcttaataaaatggaaataaatcatttgaaacatcggcagaagaaagccagttttccgttgtccaattttcctttggtgtccaaaattcggcggtccccattgacccctgcctcctctccacccattccccctatttgggaaaatgagcaacaaatgcacttccttcgcccttttatacgttccgccgtcctcggcttttgatcgccccccccctcggctttatccttatattagcaagtgcttattaaccgtaatgcatcacttcggggtgaaccatctccaatttgttcaggactctgtgcgaaacggttgagctgatcttgtgcttcatccataaaatgttttcttcggtgccattggccaaagtgtcgcgcattttgccagactttccgatcagatgggctaatgctaacaaatggacgccctccatcagctgaggacagtgaaggcgaacttcgttcaccaattcgtcggcttcgcttcggttggcacagtcaattcggtgccattggcgcgggcggtcggccaaaagaattaaacgctaaaataccacattatatggtcatcttttaatttaaattgttcatactccgttggaaatctgctcaaaagtgtcctctccaaattgtgccacattttctgccaaatttcgtccccatttcccattcattctcattaatttgtcgtcctttaccatttgataaacgaattggtaaatttggcacattttctgttccaattttccttcattttcccttccgattgtttttattttgtcccatttctttttgtaagtgccaatccattcattgaaaatgccattttcccactttaactggccaaagttgaacagtccgtcaacgcagtgccgataatagaaaatgatcgctctcatttcggtgtttctcattagtccgatcttcgaaagtcgcgacggatcgtcgtccatttggcaaaacaaattgacgaaatgatccgtcagagaaagcaaatcgaaatctgagaaggaatcgcaacggcggattaaagcgaagacacaattttgaactgacccaaaacagaaaaagcggaaacattggcagaggagggggagggaacggccgaacgccactcattttggcggtgatcggccaacgcattgtcttccgtctgatcacattccaaaatttcgccctccttccgatcactcattctttttgcgcattctttggcattctccggtgccacaatttctttttgtttttttggcgcttcgtccccttcaaattcgtcttctcttccgtcctctccttcttcgtcttcttcatccaattcttcttcactctgctcaaattcttcttcgatttcttcactttcttcgtcctcactgaaataatcctccaaattttcaatttgcgtttttttattttcttttaatttaaaatctttaaaaagttcgtcgatttcattgacatcaaaaaattggagtaatccttcgcgaattgttttggagccaaacacattcagaacttaatttggaaatgctttattgactataattattatttttacttatccatcatcgttttttttggggttaaattatttcaaaatggaatttcccatttgtttttccatttttcccatttttattttccgttttttatttttgtttttccctcctccgtttgttcttcgcttaccttcgctcaattggctcagttttccgtttttcagcagttttctcatttcctccgcgtgaatttggcccacccaccgtttctttgcctcaaattcgccgttttttgcctttttcgcctcttttttttcctcggcaattaatttccatcgttcgaataaattttcgctctttttttcggtcccttttaatttttccaccatttttttcgtcccccaaaataatttttccaaaaattcctccccgcccattagcgtcgtttcttcagcgtcaaaaatcggattataaatctgatcagaaatgtaatttctgatcagcacaaagtgagaattgagccggcgttcgaccgtaagtttctgccgaagccatcgcacaaacgccgccaaatcggcgccaaatttgtgactttttcgctcgattttgtcggctcggcacatcgcttgcaaataatgaacccagaaatcatcatcgttggtgagtgctgagaaaggcgaatgatcatagtttattgttaaaagactttttaccattattcacaaagagttgtgccaaatcgaaatgttccgtcagttggtccgtccttttcactgtgccggccaatcgcaaaaggcgtatctgtgccccggggtatttaagtgccgattggactttggtcttgtcgatcatcaacagctcggcgatcgcagcagtgatcagagtgccgagtcgcgtgcccatcgcctcggccatcgcctgtctctgcactcgccactcttcgcattcgctcgtccccaatttcttcaccgcttttttcgtcacattttccgcctttttctcaatgttcacttcccacacaaagatcaaaattgtgttcattacgcacagttgggaagtcgagccgaagtgccggagggcatcttccgccgcggcattcgctttgtccgccagcaagcgaagggcgggcgacgctttgggccgagcggtggcgccaaattgcgagtggagacgcgccatttggtcgaccaacagtgccgtgacgaacagcacaaagttgttgatgtacagctcggagttgcttcggttcatcagcatttgttgaacccgataaacgaccgatttcttcgtcaaaatatctttaaaaagaaacttttccttgtctaaaatatttttggcacttaccaatgcgcaaaacctcggggaattcgttttccagcaaagttaagtatttgccatttgtcaagtgatttaacgacactttcatttcatcgccttttagcacttcatgacaaaaaaagtgccgaaaactttcatatttcgccaaaagttccatcaaagttagccctatgatggggaatatccgcggggggttggtcagtcgtgccatggtttgcataatgccaattaaattattacaagtgaccgtttctgccttaatatgtttcatttcattataatccattacgttatttattaatttggcagttggacaattagttaattaacctatttaactctcattatttaattttttgtcctgttttggccaattagtgtccatttccccctcccactttgagaatgtccgcgatgtgcttttccttcgcgtattttctccatgcttccaccattaagctgcctttttgtgccgccgcgtgttttgccattccttcgaccatttttgtgcccaattcgtacattaagcaaatccacattaaccaattgttcattttgccgtccattttcttttggcccgctttttcctcaatttctctccgtttgttctcccatttttcaatttcctcaataaattcccctttttgctcattttttgtgccaatttttcgcgcaaatgccaaaattccgccgattgtccgctccaaaaccaattttagtgaattgattcgcattttcaacttttccgttctcttatttttgctctcattgcgaataaaatttttaaaaatattcattaattcaattctttcgtcgtctaaaaatagaaaaagccttttttaaatttaaatttaattcaaatgccaccattttcttccgtcgctttttccgttcgctttttcccctctttttcggggcatcggtgcctttcgtcgatcactttttgttttggcggaatgttccacagcgttttttgctccgtttcttcttccaatttgttttgcttcttccattggtttttgccgcttaacacaaaatttgataaacaaatcaaaaaaattaaaataaataaaaatttgacattaattgcggcaaaattcgtttgttttgttcgttgttcaaataccatttctgaatttaatatttcaaaaataaattataaataattctaacgaaaatccctttctttttcttttttaataaatttatgcccattaaaaaataaaataaataaatgaaaaaattaaaaaataaaatttttttgcgtggaatcaataaaacccacaattttatattcaaatgtttgcttaatatttgttggtttttgttgagaaatttaataaattagcatatattcaaacaaataattctttttttttcttcaggacaaaacattgcaatttcgggagattttttaaaataatttttgaattataattaccattcttttaagagaaatatttttctcttttataataatttattttctttcattgtgtcagtaattttaattaaaaatcactgataattaattaatttacatttattaataataataatattttatggtttattttcacaaattaatgtcaaaatgagtttattattgtccaaattgaccacgtggagataaaaaaaagagttgtgatatgaaaaatgatcaacaaaatggcaaattcattctcattcatttcgattcactaatcattcgccgcttattttattctttcgtttttaattcgtccattttatttattatttatttatttttcgttttattttttaattacccattaattttcgtttttgttttttaatctctgtgtcttccaatgcctttttttaagttttcgtttattttctgatcaaaaatcattgatattcgttcattgctccaaatcagccgaatatttgtcttttttgcaattattccataatcttcgtcccatcattccccaccccccgtaattaccctaattaccttccaccttcccccgctaagatcgaataatcgttcagcattctgcgcaaaagcaaaaaaaaacaaaaactgataaaacaggacaatgcttaatcaacaaacagcgcaataagcaacataataaaaaaactcgtttaattatttattttattaattattttcatcaaaaaatatataaaaaaatattcaaaattgacaatttttttgataaattatttcgacgtgaattgagtgattatcgctccatcagcagacacaccaaaacattcatttttctctctctgattgactgtcaacgaaatttctatgaaattgaccaaaatgtcattgagacaaaatttgggaaatattttttctcgcttcgctttttccaaagatttttgtctttttaaatggaaataatttttaatttacaaaagcaattaaagcgcataaaatgtcttctccaaatgacgtcgagcaaaatgaggaaaaagggccaatgaaatgccaatcatttcgatggcattccgatggggcggaggacgaatatggacgatatccattcactgaatatccgtaaattaacaaaataagcagattaattatgtgaacttatttttagaaaaaagcgccaaaaaattttaagcacagttttggaagcgatcggaaacactccgatggtaagggaaaagcaaagcgaaatttaaaaaagaaataaaaataaaatgctttttaaaggtaaaactcaacaaaatccaatcagaatttggcattgagtgcgacatttgtaattcgattaaaaacataaaataaataaatccaaatattaaattactttcaaagattgcaaatgcgagtttctgaacccgggcggctctgtgaaggacagaacggcacttcggctggtcgaaaatgccgagagagtgggccgacttcgcgcgggaatgaccgttattgtgcccttctcgggcaatgtcggcatcggagtggcgatggtttgtggcgggcattagccaaaatcccttcgggggaaaatggcacagagaaaagtgtcaaaacgaatgataggcgaaaggagcagcaaaagttttatatacgtgactatttttatgtgtgtgctatccgcggctatcgctgcgtcattgtgtcgcccggggggacggcgaattggcaaatcgaattggcgcagagagcgttgggggcgcgcgttgcgagagcggacgacgccgcgggggacgacgaggaaaagtgccgaaggaaggcacggcaaattcagcagggcattgtcaattccgttctgttggattatgtccgttttggggaccaaaagaggggagagattaattttccaacaaatatactgcagaacgaagccggcaccgcaatgtgccattttgacgggacggcggaagagattttggacgcgttggacggtgccgtcgaaatggtggtgatcggagttggtaaagcggcatttttaaatggcaaaagaaaaa

SEQ ID NO: 55 - DNA, 2346 bp, Heterodera glycines
  unsure (1)..(2346): unsure at all n locations
cattgcttttcatgccatttccgccgccattggcggcacgcctttggtcaaattgcagaggctgccgagggaagacggcattgaggcggaaattcgtaatgaatggcatataatcaaattggggatgtatcagtcaattactattactaattgagcatcgcttcagtggtcaaatgtgagtttttaaatgccggtgggtcggtgaaggatcgaattgctcgtaaaatggtcgaattggccgaagcgaaggttggcaccccaattttttgggaatgtccgtcccgatgggtccgaattacctcagggcattctccgtgccggccaaagtacgatcattgagcccacctcgggcaacacgggcattggcctggcactgatggccgccattcgcggctaccgctgtatcattgtgatgccggagaaaatgagctgggagaaggagtgcgttctgcgcgcgttgggcgcccaaattgtgcggacgccgtcagagaagggatacaccgatgcggacagtcacattggggtggcattgcggctgcagcgggaaatccccggggccgtcattttggaccaggcaaaagaagcgggtggatggggaaacacgccacgggggagggtaacatccgcagaacagtaagtaatgcaaatagggatacggtatcaaccaaatagggatacggtatcaaccaacgaaaaatgatgggaaatggcacgggggagggcgaatcccttacagtaaacgaggatatataggcaacaaaagcgaaaatattagatacattaaacagagtaatttcagtacaggaatgatgggaacccactcgcccattatgagggaactgccgaagaaatcatttgggcatgcgatggcaaattggatgccgtggtggtcggcgccggcaccggcggaacaatgacgggaatagcgaagaaaatgcgacaaaaacttccgaattgcaaagcgagtcataattaaatgcattcatttgagtttggcaatgctttcgctgttatgtattcccttttagatcattgccattgatcccgagggttccattttggccaatccgacaaatcgccaaacgcacgcctacgaagttgagggcatcggatacggtagctcaaacgatgcattagcatttgtgccacgaaattttttgcacaaataagcaccaccaacaaatttataattatctgaagttatgcagcgggggattttcggggtaataattatgaatttcacaattattggcctaaatgggaggctatgcgatcaatcagttagttaattaaaggccatttttaccaagtgtccaattgtcccactgttttttgtctgattttctccctatgccttcccttttccgccaaattttgctgttttgccggttttaccattgtttaactaatcaacctaattccgttctaataattacggcaattagctttgtctgttcctttgacttttttcatgctaattgtcccttaaattggtccattctttgctcattttccctcttaaaaagactttgtgccgtacaccactgatcgcaatttggtggacgaatggatcaaaacgaatgatgcgaatgcctttcgcaccgcgcggcgactgatcagcggggagggattgctgtgcgggggttcttccggcgccaatgtttgngcggcgatggaagtggcaaaacggatgggcagagggaaacgcgtggtcacaattctgccggacggaattcgaaattacatgtgagcaaatgaagagaaataattacaattgttaattaacataattaggagcaaattcatcgacgacgaatggatgagagttaagggatttgaaggaatttgaaaaaggggacagaaaaagagacggctgaagatgaagataacggatgggaaagcaatatgccaaaagggaaaaatgccaataaccaaccccttgtgatatatttaatttacaattaattgctcaaattttaatcgtggctaatgagcgaaaaacggaaaaagcgacgaataaaacgagctgttcaaacaaaaagagacattggcaaaaaggatcagtctcttcagaaacgacaattatatcacagcacattatgaaagcatttcatttccatcgctttttatttgtaagaaaatttacagaaaaaaacttcggggaaatttggttttttttcaaaatttaaatagcgatagatggagaggcgctgctggcaatgttttaaaatttcggaattcccccccccccccccccccctgcaaagaaataaatgtgtcgagattgaaaatctctattcgagaatttctcgcgttttggggactctttgttctaggaaaaacccc

SEQ ID NO: 56 - DNA, 2297 bp, Heterodera glycines
  unsure (1)..(2297): unsure at all n locations
ataaatatccaaaatttttggattttattttcggaatcattcatttgcctattcaatttcaacttaattggaaactctcatcagaaagtccatttattcgttgttttggagacttggttcaatttcacagatgcaaaaatatatttttattatgaatgaattaataaattttgcatgggttgggcccaattccttggccattcaatggcctaaaatgcaaaaataaatgggaaaaaattaattggattaacggggatttaaacatgcggaggaaaaaggtgcgaaagatgttaaataattatttcgtttatttactcattaaaaactttggcattctcctcttaaagagcttagaaattttttggttggacaattcgtttaaataaattttaatgcaaaattcagatgattaaatttgtttcgaaataaaatcattaatcgaattaaaaatgtaaaaaaaaataaaaattgtccattagtgatgaattgtccatcagtagtggtgcacattgtccggattcgtctcacagaatgattcaaaatttaaagtgtataaaaaattctaaattttagggcatatttttgcttgtaagcaaaattatcattctgtacagttcgaactttaagttaaggttattctagtgcactttatgagtacaatcaaaattagtatcttttgtcaaaaatggggacggacggcacaacgaaagttttaccgtttttcgattaaaatcgaaaaaccgaaaaaaccgccgaccgtaacattctctaagaaaaataactttttgaatggaaagcctaaaatatagatgaataaaaagaggaataccatcagcagaccttattgccatcgtatggaaaatcggaaaacgaatttgacgaggcgttttgccatccgacagtccgtttggtgagctttaaatagggcgcggattttcagtcattttgttatgttttttttggttagccgacttttgcgccgcggacatttgcgccgcactatttgcgccgcgacacttgtgccgctcagcaaaaaagacaattgcgccgcggacatttgcgccgtgccatttgcgccacgaaatttgcgccgctcattaaaaattttataagattgacccaacaatttttctaaattataatcgattgatattcaatcaaaaatcgcgaaataggggcgaaaaattaaaatattgtttcaaaattaaaatcgatgtaaataactttttaactattttaatgacaaaatacatacataaatttcatctttttttgaataaaaagcaaaaaaagtaagtttttcttacagaaaacatagggggggggcattaaatgaagtatttttgtgttaaaaatgtgtttctcttttctcattgaattaaaagccgcagaaaaaataactaaaaacctaaatatcccccaccctactcatcaatttcaattattttttgagccgtgggcagtcaaaaatccgtgagtaggactaattcaaacagagtcagtctgtttagttgttattcttcttcatttttcatatttttgatgaacctaatcaatgttaagctttttaatgattaaaaataaaaaaattaatgtttatctttaagtagtgattttttttaaatttttcacttcgttattttcgtcgttggttattagtaatcttattgatattagtgaaattgaaatgaaaaatattatttttgactgcgcggcgcagatgtccatttttgctaggcggcgcaaatgtcgctacgcaaatggagcggcgcaaatatccgtggcgcaactgtctgaggcgcaaatgacgcggcgcaagtgtcgactttgctgagcggcacaaatgtccatttttgctgtgcggcgcaaatgacgcagttcaatgtcataaaaaaatatttatttcttatttttatttattctgatttgagggtagtgagtaaattttgttatcttaaattactcataattttgaaattttatgatgtcaatattttatatagaaattttaatgtttggacaaaaatctgttaaaattttttggtggcgcctatcggcagcgccgggtaaataattaaataaaaaaatttattataaacctttaagaaaaaatgtactaacaatatgaagttataatttttttattgtaatataaattttaaaataacattaattttattttgtttttgatcataaataaattgaatcattatttatttanatggtanatattgcaattanatanataacacttttaaagattaattatttcattttgcaactntatgatttgatat

SEQ ID NO: 57 - DNA, 1284 bp, Heterodera glycines
ataaatctccatattttgtatgcaataatttgattaaaggtggttttaacaccggaaaagaataataaggaattaacaattaaattaaaactttaaaaaatgaattaaaaatactggaaaagtctcttcagattaataaaatattcaacaattaattgtaaacaaatttcaacattaataaaatttgtacaatatgcgaaaccaaaataatttaataaaaaataaactataaaaaatgttaaaaattaaacctttaaatcagttttcacttaatttgctttatgggggaagaataataaaatttattcaattttatttaattttataatctagcaatatgacgggggatgaggatgatggtaattaaatgcattaattaaattaataaataattatgagagttaaaatgaaaaattaatacaacataaaaacaatcaagattaaagaaataaaatattatatattgggttcaagaggataaaattataaaagcaaaatatatttacaactttatattttgtgagagccacagagacaaaataattttcaaacaaaagcaatttatttaataattttttgagtttttcaaattaatatcatctaaaatattttgaaacgaattaataaattaagccaaaaaaatactactattaatataaacaaaaactgataatcgtcaaatttgactatttagtgcttttcaaaacagcttttttcggtgcgatttttcaaaaaactaggaacagagatgcaggattgcggactgggatcccgcaaaatcacgcgcgagatcccgtcccgagctggtctctatttatatcaattataaacttttatattgaatttttttaaatatttattaacatttaaaagataaaatattaaagagttaatgaatatttcgagacaaaaattaatggcgaatttcctttgatactaaaaagaggaataatgaaaacgaaataaaatctaaataatttaaatttgtaagtcaaaatcaaaacaattaaaaaatgtatcaatatgttttaagaatgtccagatgctcgaatttagattcattttttgaaaatttgagaaaagatgcatttttttaaatataaaattcagaaaaaaaatcatcatgaaatattcatgtaaataataaaattaaaaaaaaaataattataataaatgaaaacaaaatttttcaaaatggctggaaagttagtccataaaaatctctatgcattttgacaagttataataaaaatgaataattaagcaacaaacaacattaataaa

SEQ ID NO: 58 - DNA, 5486 bp, Heterodera glycines
cggtgtcatctatgttactagatcggggatcgatccccgggcggccgctcgagcaggacctgcagaagctagcttgatggggatcagattgtcgtttcccgccttcagtttaaactatcaagagagggaggagagggttggagaaggaaaggaaaaaaaaaatgaaggaggagaaagggtgggggcaatgaaggaagggaaaaaagttgaaagaggggatgcatataattaaaaaaatatataattattattttaaaattattagactgtgagtttcttatgggacaaaaaatgatttaagatcttaaagtgaaatttatgtttgagtaaaaaatttataagatcttgagactcacaaaaaggtgtttaagattttaatttgaaatctctccatgcttagttataagacattttttttaaaagttggttgtctctttttataagttgtttttttaatttttaaatacattaattatttttttcttatatatttttatttaattattttttcttcaaatattaatgaaaagtaattaaatggatataaagataagaaatggatttaaaataataatataagtaattaatatatttaatgtgattaattaaattaattatttttttaatatacatgaattaattgaaaaaatcttataattagagaccaagaaagacatacttgtctttcttttcttctcacctctctttatattgtaagaattgtgaaaaaaaaatgaatctaaattatattactttaatgtaactctggtcccagacaaacaaaccggttcatctcgtaacttatcagcatgttagtgacaatggagttcaggatgtttatgactcatttcactacatccttaattttaactaaaactaaataacatttccttaagacagatctttagacaaaaagaagtggattcatctcacattttaaaaactaaaaatataattaagtcttttttatttttatgaacaaattaaaccaatgtacatagacgtaattgttctttagtcacggtttatgcatgtttttaaaaattcgtttatttttatttatttataataaaaaatcattttaaataaattaaaattcaattataaataattccaaactttttttacccacatgtcatgtaattatcacttacttcaatttcgtctttctttggctttttgaaaggttcacgacatattaatgaaagtttgagagtttaattttagatcatataaaattttatatcgttaattatttatgatttattatacatatattttttggataactattataagagtttaattttcaagtattattagtgtatatatttttatgctatcaatcatataaaaatcatttactatatgattcttaaaataattatcacaaaattaatattttttaactatatgacaattcatgattaagtgattgtgtaaacaatttttacactattaatatattttaattaaagtctatttattgaatttttaaaaataaaatataattattaatctaatcgcatcaatgagtgttcaaagtgtcattttattagtgcagtgagaaaaggtcattttagtgaagtaatagatgttgatgttgagtctggtcaaacaacaaatcaatagtcagcaaggaacggaagtaactgacattaagggctcatttaattacacattttacctctataaataaaattctaagttttaactatctaattatactttatttcatttaattacacatctcatttaatctattacgtacattgtaagcatgtaaaaaattaagggcatgcattcaattttttatactatttaatgtatatggacttcgggtgtctaagaagcgtttgtcacaaggtatgttaaacccggggttaggtaaggatcttttaattatagttagcaactagtagttggtttttgtaataattaagggctctatcatggtaggctgcattaatgatttccaatcttaagtttgggtcgaatatgtccaaggttgagatattcaccaatacttcgtttagcctaatgattagagtggtaaaaaattatgaatttgaatctcccactaatataacatactcactactaatatttacctataaaaaaaatcattttccataattttttcctcattatttttttaattggatttgatgggttttctttctcttttaagttttactacacataacaatagtaatatacttttcatgttcttttttttttttttacaaagttgttagtaaaaatggccaaaacaaaaatatgaaactccaagcaattaaaatttaaaagttaatatctgaacatgctttctgttgcgtttatgatgcatgtgagatcttaataagtgacctcacgtttgttaacctctacatgagatccattaaggcttagtgaataatggtgagacaaggtgtaagttaattcaatgtttcgaaccgggtctttgaaaaaatagacttaaattagaccaataaaaatgaagttatgacgtcatgatccatgttgactaatactgtaacactattatttcaggttggaaaatgttatttatactgatattgttaagcacagttcataaatagtttgatttcttaagtatgttgacaaaattcaattttatgattgtgtacataaaaagtattttattagaagaagtaaaactcatttcaataatttatagatcctagattaatcttgtgatagctatgggaaagtattgctttcaacaaaagaatatattttgtataataatttatataattaagggagatagatataaaatgtatggagatgttacgaagaaatatcaaacacataaaatgtggtatgaaaaaataatacaactactttttatatatttttaaatcaaactaatgtaaaatatagaaaatattaatttgatttaaatttgaagataataatataagtataacaatactattttaaaggcaataaaatttattaaaacataattgaattgggatggattcaatattatttttttaaaagcaacccagcatgagtcaattcaactttaattaggctagtttaggtaaagttattttgggttagatggttaggtcgatcaattacaataataatacattatggaaaatacaaaaagacaaaatattaaaaaagatcactggaatgaactacctaattagttaaactcattcaaaaccaagtcattcaaaatttaaaaaatgcaaaagccggttaaaacaataatcatgcacaatcagacagatcacatttaaaatgaaagcataaaataaacccctttgacttgaggacaattaaaatcaaacactccactttaactaaagtacaattaaaaattagtcatgttattaaagattccaatccatgtctaaattaaaattcaagttaaactatctagatctaacactattacaagaaaaatgcatgccctacagagtcacataatgatataactataataataattattttattattaacattttatgtatatcgagttgggccaggttatttgtgtttggaagtcattaatccaacatccaacctaattatacttgaattagctaaaatggatccaaatcaacgcaataattatagttagattgattgaacttgcgggctcatcacaattcacttacactcctaaatataaatggaaaaagatgtaaaaaaaaaatctaaatttaaattcaaatcaattttcatcgaattaaaattgactcaataaatttgacaacctaagtcaaaccaattagcttagtttagatatcgattcagttaatctattcctctcacttgaaattcaaatcaaattagctacatttgtttccgttagtggatttttttgtttattgcccggaatcaccagatgagccgatcaacattttttattttatttttatattaaacattttagattttagtcatttttttggtcctttttttatttttcaataatttttatattcttatgattttatttactgtctcaaaggatattgattttttcatatttatgatttatgacgtagttttttttatcatattttagataaaataattaatgagatatataaaagcgataattataaataaaaaattaaacaataactggtcattaaaaataaaaataaaaattgtaacttaaacagatatatatatttttttttttgtttccgcttcactttaatcgtggggaacaacacatacatgtaagaatttacttcactcgtaaaatacaaccactagaaaattaaaaataacaaagtcacattttttgcttccatttcacggatgctgacgagatcaaaaaacttatttttcaacaactgggaacattctaactcggagaatatgattcgtttttttttatctatattttatttattgttttagatattaatcacatacttagccagcttattgaccggagcaatgtattatttatatgcactgcttaatgatcaattgattaaatatttttatttatatttttacttttacttttttatttcatttttcaacttatttacttgttttatttttcactatctctttctttctagttttttaattttcttacagctgtctagctagcacaaagccagagcatagattcaacgttttcctttatttttacattgttcaacagccctgcatgtgctgtgcgttttttgacatttacaatgagcatatttgttatataggcagggcttgcacattttttttccctgactgtagatatatagatttttaaaatgtttattcggctgattttttttaatccttacaaatgaaagataatataaaaaattttataataactaacccatttttagttaatcaactaagttagactcccaactaataataatttatataaccagctaacctccttgccatcatttgatattttgattagaccataatgcaaattgcaaagagtgcatgtgtctaacttgctaacgatggttttcaagataccggttacataatttatacgcatcatattaaatatttttaattacttaagaagacacgtgttaaataattttatactttttatatatttctaaaaaatatatttttattttataatgtctaacatctatttaaaaaagagaaaaataccatatagagaagaaaaaaagatactatatcagtatttattcttaatgtgttttgatttgcagtaagatttgcgagtattttgacaggaaaggtcagtgtctttgaaggaacggaggagtagcatcctcttaggcccatttcctcgccctattcatcggcacagagaggagcacgaaggggaggggagcggcgcgtagcgggggaggtgggtggcggaagaagaaaagggtggggggagtatgagtatgatggtcaatatggagaaaaagaaagagtaattaccaattttttttcaattcaaaaatgtagatgtccgcagcgttattata

SEQ ID NO: 59 - DNA, 16040 bp, Heterodera glycines
  unsure (1)..(16040): unsure at all n locations
tttattttaatttatttggagttatttagatttaatcttacctggggttattttattttattttatttttggggattctttttattttattttattttattttaatttattttattttattttatttaaatgtaatttattttattttatttgattttaatttattttaatttaattttaatttatttaattttattttattttaatttaatttaatttattttaatctatttaatttaatttaatttattttattttatttaaatttaatttatttaaatttaatttattttaatttattttattttattttaatttattttaatttattttattttattttaatttattttatttaaatttattttatttaaatttattttattttaatttattttatattttcagaacaattctgaggttttccagaattttgagaantgttntggtgtgtttnagaattagnagaantattgggaggntcannagaattttnagaantgttctggtntgtaacagaataatcagaacaattctgaagcattccggaacaatcagaaaaattctggtgtttaaattgtaaaaattgaatgcaaaaacacaaagcaaaacacaaggcaaaaaatcgtgaaaatactcgaaaacacatgctaacatattgaaacacacgttaatgtaacgaaaacacacgtgaaatgttgaaaacgcatgcaaacgtgtcgaaaatacacgtaatcgtgaagaaaacacgtgaaaaaccggaaccggtttaaagaacgcacgccgaaaacacatgtaaaccggttgaaaacacatgcaaaaacacaaaatccatccggtcggtcgaaattccggacattccggacgaatttacaattgtaaacggattgtaaaccggaaggcgaaaacacaaaaaaaatcggcttttttcgacctttgccggggtataactttgttcgaatttgtcgtagagctacgaaatttttttctcacccttcctctcgacgagctctacaaattgttcgcttaccgcaaaagcgtagctctgacggttcccgagaaataaggtgaaaacacacattttacaacccatttttggccaattgtaaaaagccgggttttttttctttaaccctattttacaaaaaatttttgctggtgcgaattttttccacacgggccattttgtagagaaaaccgagctctttcgattggtaccggtcccgtggcgatccgttgagccctttaggagagggaaatcgtttagtgggtagcccccccgttatttttatatatagataactaggcgtcccggtagatggctgcgcaattgatggggtcggctggtaggccacacgaggggtagatgcgtaaggtgtgcaccgtcgcggttgttagtgcagtagcagctcaggcgtagatgcgtgtctggatgttcgtgcagcagcagctaccgatagatgcaatgaatttaaaaaatgccgagcctagccgtttatcatcctattactgtcctaacaggaacatgcgtcagaaaggaactgtttgatcttgggatgagattggggcggcggctgtgtgcccagaaatgggggctccactggcaaagttcaaactttggatgagactgaggcggccgccccagaaatggagcctccatttaatggtaccaacagggtcccgctacataaaaaattcataaagttattaagcaaaaagtgaaaataaatttttaaaattaggggtgctttcaaaaaacagggattttcaaaaaaattttgctggtgcgaattttttccacacgggccattttgtagagaatcgaaagggctttcgaatgttaccggtcccgaatggatctgttcgggattcgtttgatgctaaattgtgcaagcttttggtcacgcatttttatgggggtaaccgttaatttttaattatttttaaattgctttagaaattttttataatttatttttatttatttccactattttgggttgcgaggcactctgaataattgtcaaaaatattactaaaaatttatgaaaaagaaaacaaaaacattaacaaatgataagataaaattgtacaaataaataaaaatttaatcaaaattccaaatattttttctctttcttctccttttcctccttctcatcctcctccattctttctctcaggagggtctcgcacatgtgcagcccttgttcctcgtcattccgtgggtcggtgatgtcccactccagttgacggtcgccaaggtcagagctgccctcccggatttggtcgatcacgagctggaaagctctacggggcgcgattggttgacgaatcacactcccgtaggcgtctctctggccgttgcgaaggtcttcgtagacactcctgtatttttgataaattttttcaaactttttcaattttttattaccaagctcggatcacaaagtcatcgtccggaggtcgggctgatgttgcgctttgactttgctcagcaaagtagtctttgtaggactgactatgcgagtctttggtcggcctaaacaaacattttatgctatatttttttttatctttttcaccatatgttgtctgggatgttgacggggcggcggcacttcggacatgtccggttggtggtcaacgaacggcgtaggcagatggtgtggaagatatgcttgacattggtgtcacagggcagctgagtgacgagatctccgcgaagcagtggttccgtgcagacaccgcacgtctcgttgttgtctcgccactgcccttcttttttgctgctcacgatctccatgtgtacaacattaaagttggggtgcggaccgggagctaaaaatttttttgcaaataatttttattctgtttgttacccttatcgtcactgccgcaatggacatcttccacataatctgcctcttggatgttcagtcgctggtcgatgatctcccgtgcccgtatggcttcggggtcaggctgaatgatggcgatgggctgctcagtcgtcaacatcgatgaagcggactcaacatgctcaggttctgatttattgtattttattatttttctatcattaaaaattatttttaccggcatttgcttcactgaagtaaagccgactaactgcatgttgtggttgcttccgagcgtttcctggtgacggcagagttccatttttgccactctcttcaaataatatgaaaaaatcacaaaaaattatatagcatttttactttttgtttcagcctttgttggtgtagaaatttgcgcttgttgttgtgtgcgctttcgtgttgagtcctttgccaggtgttgttggctttttggttgttcaagcttgatccggcgcatctttcgctcaagcatttctgcttctctctgctccttctgtattcgttcctctgccagccttctctcctgttcttggtgctctcgattgtagcgctggatctccagttccaattctgtcggccgtaagggctgctctgcggatgcgtctcctataattctctgagaaattattttgaaaatgtccaattaccggcaaattttcgccaatactgctgctcggctaatgctcgctgttgccgctcaatcacggcctggtgttgtgccatcagttcttccacatcggcgtcagcatcttggccggccatctcgagaatttcctcgcagagagagcgtatcgcggcgtcagaattgaggactacaattaagttattttattgtttttacttattttttgtttgttacattgctcaaaatcaattgttgctccttgttggacagctgcgcgaaattcttcatccaccatggcgcggaatgcatggtaccgttgtatgatacgttgttccattttggcctctctgtcccactgaagattgcgcactgccaaattattctgtcgatcgatttgcttgtgcagatgttgttgcactatagccagccttgcatccatctgtttctttgcttcttcattcctcctttgctgctgctgctcgcgttgtaattgcgacttttcggctgatgtcatctttgccggagtggagaagcgggactctgctgctgctgctgccttctttgcgcgctcaacattgacatcggaggctctgattttgcttggcgatgcacttgttctgcgccttgtcggttcgtccagctgtcttcgacgcgttgccgtttgcgaagtgcgaacggtccgcttcttcttcatctcaacttcgatctcatcctttttttccgacaaaatccgacgcaatgctgacaaaagtgcgtccaggtgttgttgatcctggctgtcttttttgctcttcatgaaccttaatttattattgtttgaaatattttttgaacatttttaatctcactttggaagcgactttaatggcgaaaagaagctggagcctttcttctttgggctgttgaagttttcgcagtcgttgtagactttggaaaatttgtcttcaaacttgtcgtcagcttctttccattgttcaccaagcgtttgaagacggtcgctgcaaaattcgaagtcatcctgccaatccttcagacttgcaagcgaggactttgcagagtcgatttggcgaagcgcttgccaaagcataaggtaattccttattgcattgtagagctctgccaatggcttgcgaagcttgtcaaaggacttttgcagcgcagcagagtccgaggaaacgggtgtctgtcggatgctttcgaacatggcctgttgttgtttggcttggaattccgcatctgtagccgcacggatgtgttcgctaagtcgatgaatcgacgcagtgcactgttgcagaagatgttgtttctttgccttttctgcttcactgatgttttccttcagcgtctccgtgttcatggccacagcatactttgctgctagcaacagggttttccgcgggctttcagaatgaatttcgagcttgttgcctcttcgattgacctcgacagaaggagctgctgctggttgttggcttgctggctgttgtttagccattttaagtggtccgctgtccaaaacttcacgagagggttgggccgttgttgttggctgtggttgagctggagaacccattgcggcagctggtgtcaatgctgcaggtacgtagttgtcgtcatagacaacttcgtttccggctctttccgcggaactacgtggcgccttaatatcttagtaaattaaatattcaacattaaattttgcattacaaaagtgacggtgtcaaagtggttgtggccattgtagtagagcacaatagcattgttgacaggccgtctgtccacgtgggttccaacgtcttggaccatcgtgaagttttggagctggtccacaggaacattgcgcagagattgctacatgaatttttaatattaaaaggtatgatttgcgtttttatctacccgcatttcgccgtctgggaagtagacatatagatgttggcgattatcgttccactgcggtctctgttgctcaatttcgcgttgcgtcagcgttgtcatgatgatcacgatgggccgttgcaacaacatggccaacagcatgctgtcgttcacctgagcccagtcccgttcttgttccctccgtccggcatactcctccaatgttgttattccttcatcagtgccgtggagcaacatgcggtcaatgcgacgcaaaaagctctccctggtgttgtagttgggattctgccgcaaaaacagccgctgatcagcaagaattgttcggagaaatgtgcacattcgcttgcgaagttggtctgcgtggttttctgatccgaacaatgtcaagcaaatggcattgaagaagcagttgccatctggttgggcacgcatcaaaaatgctttgcttgctgttgttgatgatgttgttgcttcagcgtgctggtcattttgcgcagttgactttttctgctggactttcggaactggtggtggaacgacagcaacgctttcgccagaagaccggttggatggtcctggttttgagtcaattgccagatgttttttggcgtgtgtgtcttttgttgttggtgttatctgtggcgtttttgctgctgtttttggaggcgttgttgcggccaagctactgactggtgacagcgaacggcaacttgacgccgcagagcttgctcttgaccctttggtgccctttcgctcgcttattttgcgtttgatctaaaaattgttcgtaaaattttatttttaaaaaatgaataatgcaccagttgccattggattttgtaaaggcgttcatcagggcgatcaaaaggcaccaaacggatctcgccgatcttctttgcgtccgatgggttttgcgcaagccaactgagcaaagcgtcaaaagcagctcttgaagcgacatctcgcggaatgccgcgctcgccagttccaagtggtggaaaagcctattttaatcaataaaatcagctttttaaatattatttttttacaattatctgcgtttgctgttctccattctttttcagctcattgatcagctcctgcagagatttggtgtagcactgcttcaaactttgaatgtcatcagcagtgtggtcccgtcctttgcaatttggagtggccacgtgagcaataactttaaatttttaaatttttaaattaaatttcgctttttctgctcacattttgctttttcagtcaaattgccatatgttggtgtgactgcgacgtaaccatcaggaactcggccttgaatggtttgtcgaatggtcttcagttgttgttgtagaccttcagaatttggctcacatgcacggaggatggcgttgtccgtgttgcctcgcttgtcgctgacaagcatgtcggcacgctgcttcgtgatatcacccatgacaatctttattttgcgaagattgtccagggtgatatcatcagcgagtggttcgtcaggcgaagatggtcgtcgtgagcgtgttgttggtgtcctaaatgccgatgttggtggctttggtggtccttttccgtcgtcatcgtcgtcgtcagagtcgtggtctggtggagggcctcgtgggtacttaaccaaagagttattaaaataattgattgtatcaatttttactgggtcattcgggtcgtccggaggacccattgtggcggtgtcaaggtcttctttgtccagaagctcgagcatgacgatgtttttgacccgtctgccggtgttttttgtgcagactcggatgttggtatcctcccgaactcgggacaaggcagtgtagagctgtccgtgggagaagcactgtgacttgtccagaagaactccgacatgtgacagtgtttgtccttaaattattagatcacgaaagttaaaaaaccaaaaaaaagaaatttaccctgggacttgttgatggtcataacactgccaggtcggagcggaaattggatgcgctcacatcgtataggaccttcatgcagagccttcgggtcaccgccaaattggaaccgcgccttgtgcaggtcgtgctcatctccacggtgcgtgccggtgaggattttgcaacggatgatgttttcgtagagtttcagcacttgcacgcgagttccgttgcagagaccctcttcgaccgagatgttgttggtgaccatcatgacggctccgactttgacgcgcagttgatgttgcggaatgccaggtggtgtttggcgtattaaattttcctggttgatgttggctgcgatgttttcgagctgaagagcatcgacatcatcaacaattggcacggttatcgcggtgtagatgcgatcgatgttgtcattattgttaccagcgttcatcatgtcctaatttaaaatttaattagcactttatttttccatgaaaagtattttaccataattttgttgttcaactcaaacgtttccttgttcagtgggcagagaattgcgcgctccgacaatttttgccagttctcaattggcttatccagcaactcttgcgggaagacgaactgcaggagggcgtcacggtcgggttcaacaatctgcttgggcagcttgactcgttgttggatgtcgttgatgacaccggtgccgactcgcctcaggaagtcacggtattgttgttggccggactggagtcggtggttggtgaccagacggtgcgttgtaaagtgcttgaagagagcagagttcttcacagacgcattgtactggtcaaggtggccaccaccaggcacaacgggagtcagctgcttccaatctccaccaattacgactgcctgaacaatttattaaaaaattgtttttccttagctgtccatcacctttccgccaaacggcagacttttcaaaaggtcagtcggaacaacaaagcgcagcaggcgatcaacatactccaggacgtcacggttctgcatgctgatctcatcgataagcatgccgtcaatcttgcgaagcatttcagcgaaattgctctcaaggtcaacgttcagtgatgttgacgcgtcaatgtgtcgttgtcggcaaagtcgcttgtgaaccgtttgcccttcgtacaggagttccgccgcaatgcctgttgttgccattggcaaaaagttgaacccggccgccttcactttggcaatgatcttctaaaaattagagaataatgctttttattttcaataatgcctaacattataagtgaaggtttttccggcaccgccttcgccagtgaccatgaacagtcgaggcatgttcaggtctttgtcgtcaaagtctccctttcgcagttcgtttgctgcctttacaccatcaaacacagcgtccaccaacatttgttgttcgttgtttggcttcggatctgctgtgtagatgtcggcgtagcgcttccgcattgaggtgttggcgttgtcggcgcgcatttcctcgggtagtcttgcgttgaccaagtcgtcccggaagaacaccaactattgtatttaaattcttttattttttttattttgttaaaattgctacctgtatgtaatcatcctttgtcagttgaactccgtctggtcttggaagcccaattttttcacatgctgtttggaaggttccgtcttcccttttgtcggagtctggatgcacaccattggccagcagaaaccattccaacgcgcggagcacgtattgtcgttttgcctctggtgtagcgttgttaagcgaccaaacggttagccaggtgttggagatctccatcacgtagtcgaacaggtccattggtttggacaagtttgccgtggcgaagaagacggctaaccatcttatgcactgtttcggtctttttttggttgcgaaagcctcccgaatggtgcgcatccacagctcgttgtcgttgagcagtccccgggcttgtgctgcttcaacaaaggtccgatgaacggtgccattgtgtctgcgcagatcttcccaccctgttgggtcctcgacgacaagcaaaagaaggcggattgcctagataagttcattagatttctaaattaattgttatttttaccaaaaggtccatgtttgtaggagacactgtcttcagtcggcacagctttagtccctccaacgctccaatcacgtatggctgccaacgacgatttttcttgtcgtaacgcagttttttgtaggctgtggcgtaagttaggtgtagtgggccatccgtgctggagcgttgtttgttgaaggcaaagtatgcggtgagctgggtgtttcgctcttcaccagttttgcgcctctcttcctccttttcggcagcttcgacaagtgcacctgctctttcttcttcatcatcaaaggcttgatcaaccgcaattcggtgaccttccgggccatggacgtccagttcatcgacctttattttttattttttaaaatatttttgtgatttttacttacaatatgtgagcgtttcacaagcggagtaccccacattgacatgaccgcttccatcgatgtgatgtagcgagccagtcgcaactggtgatactcatcataggcgagcgtcccttcttgaccgctgatcttgatgaacgccatgtcggctcccttcatcacgtacttgcacaagtacttgacgcacccatcaccagctacgaactcgacattgatgctgaatattttttaaaattttgtccataaaatattctagcatactgagttttgtatttggaagacaaaaatgggttgtaggcgacgacatgtgcgttatcctttttgatcagctttccgtagcggtccttgtactcgaacactcggccaaattgttcaggattttgttgagcttcttcgccactcggaggaggaggacgacgacggtagcgcgggtaagcattctccgagtagacgttgtcgtactcatacggcttctatttttcattacttttattaaaattgttttcaaagtaatttacaggaaattttttgacgcattttccatccaccagacaacgatgttcagcacaggtgtggatgttttttgttgtcacggtggtgtaaagatgccgttggagatgctcatcccgtgcattttcatctggctttggtggaatttcagcacagatgtactcgccgatgtagtcctcgggagttcgtattctgcctccgacgcgcattgcctcccagtccagaatcaggcagatgtggacatgtggcattccgctaaaaaaatgtttatttttaacttaatttttgtttcagattttaccgcttttgatgttccacagaatagaaccatccttttagcgggcccatgaccattcgcacagtcaagtcccttttcagctcagtcaacttgtcgatgaagaggcgagtcacaatgtccggtcggtcgtaccacgtctgttgttgtccattgttgtcttttggaagcagcaaggtgaattcttggcactcggggtccatcgtgaacgtgatgagcagatcaggcttgccaatctcacggcagatcgtcatgcagttggcgaattctttttggtagaactgccgcgatcctctgaagtgctcatcggtcatgatgacgcgaccgatttcgccagttagtccttagcaatattataaaaattattagaatgtatttaaaattattattcaccttggccatcacggtacttctccaacatattcatgatggaggctggcgtgaccaatttcttctttccaagcagacgcttcatgtactggacccgttctgcttccattctgttgttagctgtgatggagtacagctgcgccaattttccccactgccagagccagtgatgttcgtcatgccagccggcaccgcgaatctgggccatgtagcggaagaattggttgcgagagacgcgatctcgtggtctgaagacgcgctcaaacgctcccaaaaattcttcatcttcgccaagctcgtccttgtcatccaatgctttgtcgtcgtccttattgctgatgatgttttgttttgggtcgaatttttcgccctccttcatcttgagtggaagtccatcctcttaaacatactaatttattttataatttttttatattcaccaaatccaaattgtccttctgggaacatcagcggaaatgttgctggatcaatttctcttcgccaccatttcaaatgttgctgtcccgtgccttgtcttccaagtaggataacttcataatccatgttcggcagcacattttggccagagtccacaaagaactataaaaatattttgcaaataatttagacttttttattttacttgagccagaatatgactgcccgcttctgtctcgacttgcagacgacccgggtggatttgtttaagcatatggtcaggtggaagttgcacatcaatgggttgagcctcatcttcttttagtgtccgttcttggcctcttttatttgttcccacgacaagcatccgcaaattgacgcgctcatctgcaggaagttggttgaatgtttccgctgctgtttcgtagagcttggccatcgggtgtaagttgcgaagcatatcgtgcagttcagacagcaaatcggcctttatttttaaaatatatttaaaaataatttttttttacattgagctcaaattgttcagcaatttcgcccaagcgttcgtgtgcttgtgttggcgggatggtgaacagctgtccatgtagcagcggcagagagccgtccggaggattgtagtcccaaaggacgtactggatcatgttgttacacttgacgatccggaagaattcctcttcacttctctgcgtgatgacatggccgaatgacaagctgttgttatatgcaagcacatgttccattagatgtttttgctttcgaagggttgttgagtctttgttggtaaacagtgccttataacacgcaggctgttgttggagtgatgtgtatcgcgctgccaagtcgacacgacctttggcacaacattttgaaaatgctgcactgcctgttgcttcgttgttgaagagcaacgctgcacaatgtggacattttgatgtgccctttaattattaaaaaatttttaaaaaagatatattagttttttacattgccaagagtgttgtaatattttggcatgtgctttgaggactttgcagcacaacctaatccaaaatgtgttgtttgtgcgatgtttgcacactgatttgttataggagtgtgcgatggcgtcatcgataaactttggtggcttaatgttgatggtgtgcgtcggactcgtgagcttcttcttggagccaatgaagaaggtggcggcatcaacatggaatcaattgatgcattcgaaattcttgacgacaatcttgggcttttcagttgttcatcacttcgtggtctgccaccaataattccacgcggcgtaacttctaattgcgccacatccggatttgcaatgccgcaggatggccttaactttatttttccaaaaaaatgcaatttcctatacctaaaattgatctcctcaacgccatgccataatgatgagcagccatttgggcaacaattttttgatgcagtattttgccttaaattttatcgataaaattattattaaactgtataagttaccagcatatttggtgaaaataagagtgacaacattgcaggtaaactttttgttcttgaattcccgaaggcgtaagaacaaatagttttttgcataaattgcaaaatccaggatgctggacaccacaaccaatgcgttggcatttgccattgttgtcagtcaatctgttattttattatttaattaggtaattttattgtaaaattacattttttcaagagtatctgcatggatgtccatgtcatgggcattctttgtgcaataacagccacattcatatagtccataaccaatcttctttttacagcttttacattttataaatgcattttttttacatctttggttgtgacatcgcttgtaatgtccatcagaagccctgaaattaattaaaacgtatggtaaattttattgcttttttaaaaatttatttgttgcccaattttccgaattaatcgatttgttttaattttgaatatttaaattaatttaccattttgcatattctccttcccaatgacacttgtgaccacaatcaatgatggcgtatcccatttcttcgagcacattgtttttgcattttggcgcaaagaaacataaatcattcgtttcaaattgccctttcttgcgcttttgttttgaaaggccttaaatacagtaagaaatttatgaattaattattgcttcgattttcactttattataaatttacgaattttttaatattgttatttaagcaattttattaccctttatagatatgtctaattctttagcacgatcttgtgtcatttcatcaaatgcattttgttcggtaggatcctcagccccagactcagatgacatttcatcataaattgttgagatagcatcaactataaatataggtttaattaaaaatattttcaacaaattacagtataaatcatctgaagcaatggaggatcggttcgatttgatccgtcctcttgaagatcgcggggtttcgctctcagatgaacttggaggccctataattacaaattgattttgaaaactattgttccttcacttcctgcagattgcattgtggatgatcctctaacaaaatttcgccaccatctatgcaatttgaatcggtccacgacagaatcaccatattgttttttaattgcaagcattgcggattccttgtcatgcgggttcgctttgtatttgtacaaaaaatacagatattgagattcatcagacagtctcagctttgaattattggtatttgtttggtctccaccaccaccacctcggaggttgaagtaattttttggttcttaaaaattattgtatactgctcaattaagtaagatttaaataaccatttttaaagaaaaggagaacatcgaatttgttgtcgattaattttatttcagcagaattatgcgcaacagttttctggttagagcaaacaattctttgtcgaccaatgattttattctggattttttacaaattaaatttattaatagttgtttgcgttatatatttgcaatattaatttttttttcattatagtaccgtttttgttttttcagatcgcattccatttgtcatttttttgtgctcttgcgttttttggtgatttgtccctttagatttagtggaatgtgatgtctaaattttataattcgtctaatgaaatttaactaacaatattattacctttttttcagtcaaattttgcaaaatttgtcctgcttttttgagaaacactgtagaagatgttttttcttcaataaaatgttttcttaacggcatgctaattttgtatggtgtaactttcttaaaatataacttaagaataataatttgctctataaattgcttaccttaattccaaaaattatgtcgctgtacgttctcagttttggctcacaatgcattccttcacaaagcatagttggctcgttcgcaacaattttttgcggtgaaacggtgttcgtttgcaaaacggtgttctttaaataataaataatttattaacgacaattgataagatttattatctattaaccggttttcgtgaaagaaccgtagcatatgttgcaacgtttgaagccacgttttgcgtatttgtcgtttgctacggaaataaaaatatatttttgatgtttatatattttttgttataaaattttgtttatgtatatatatttatttgtatgaggaattatttaaattttttttaccgtaattggctttctgttgatataacactgccaatttgtttcttccacccacgctttcgagacaaagactttttttgcagacaaattcttgttaacactctataaattttttattattttcggtaagtttttgatgttcacctcaaattttttttcaacaaaattgacgccggaccatccgttggacgtgatccatgggttgcagtttccaatttccaaacttttggcactcatagtctgtaaattatttggaacactttttttatgtatttaatttatgcacttttccattcacaactggagaatatccaattggcgtgaaaggcttttccgccacggttttcagtgccttagcaggaacaggcttaaatgcattgtgaattataaattgaacagagaattcatcaatattacctttccatttttcacggtcatccattcaattttctttttttcacatttcaacggcatttttttggcacactcattcactaaattcttttctttgacctataaaggtggacataattttaattaaatattaaaaagttagtaataccggagccaaaccaacaatcggtccacagcgctgggtgcgaatgcgctggttgcgctcctttttgctaagtgtccggtcaaaatgcgcgtcaaggtacatgcttaattcaaataatattagcatttaatacttctcgttataaaatggacatttacccttccaaatttctgcgcagcacttcattccttttgcccaggtgtaagccgacctgca

SEQ ID NO: 60 - DNA, 5037 bp, Heterodera glycines
cttcattccttttgccaggtgtaagccatccatcaaaatgtgcatccggccacgggtccctcacttttccttgcacttcaatgccaacgccccgcgaatgggccacattctttttcgcctcttcggcgaaaaccttcatctccgtaatgaggcgacgaagttgcgccgcaatccctctatcttgcgcaaaagagtacgccgaaagcaattcgttacgctttcgacgatcttcgtcccaatttcgtccctagatgttacatttcttacatataattgatttcaacgaagctaattaccgggattggtttcttaaacaccgttaaatcggtgtttggtggcacttccacacctgatggacgcgccaaacgctcaggtgaaggcgtcacacgaacaccgccgcacggcgatggtgatcgctcacgttgcgtgccacgacgggcatagaagaatgccgtcgacgactctttagcaggcagaaaatgtgtcttggttggcataattgcaataggggataggtaaacagtaggaaattgatcgtggagatttttgagttatctgaatggtttatgaacgccaatattcactttgaaaaagttttaaataagaaaattcaaaaaaagtgcggttattattttattattaaattctaaattgtattaatgaaattttttgtgaacgaatgttgtaaatgttggttttctattaatattgttttgcgcgaagcatttttttgtgaagatgcaacagtaattattaaacatttgaaaactgaaaagggacaaggaaggaatgtaggagcaaagaaaggaaggaaggaaggaaggatggtcggacgggcggacgtacgaaatgaatttcaggcagataatattgtgatgggatatcattttttaatttagtagaaataaatattgtaatagttataaacaaatttattcaaatccaataaaacttgtgacaattatttaaacacaagtattaaagaatttaaataaaaagtttttttggagttttttcgctccagtccaatccgggaccaaaattcaatacacagcgcctataaaaaaataaataattatcggactaaataaagttagttgtttacaaaaaaattttgctctggcgcatcaataactttgtaacaaaagcagcgcctgtaaattatttggggcatttaaagaaacagtaagtttatttttgctttcaataaaattatgcgtgctcttttcatcatcaaatttttggtgacaaaatacagcacctgaaaaagcaaaaagcaatgaacagttgaaaagcatgtgaccaattttggcttacaaaaaatgttttgtgcggcgcccatcattactttttgttgcaattaaccagcatctgaaaaagtattgaacattttaaaagcatgtgaccaatttttgcgtaaaaaaaatgttttgtgtgacgccaaccagcacttttgttgcgattaaccaacatctgaaaaagcattgaacatttgaaaagcatgtgaccaatcttgtcttacaaaaaatgttttgtgtgacgccaatcatcacttttgttgcaattaccaacatctgaaaaagcattgaacatttgaaaagcatgttaccaattataacgcacaacctcacgagctcagaatatttcagggcattcctgaaaaattaataaattaagcttgtgtaaaaatgttaattgtttttataaataaaattattgttgttcatttgtttgacttatcttttttttgtgagtttcatcatcagaagtgttccgtttgtcaatacctgaaaatgaattgggattgattttttttggtaaaatgtgtgccgaccggaaagaatgattgcattgttaagcaaaacttttttgtttaacaatgcaaattttgatataacattacctttttacctttacctttaaaactacgcgcgggggtaggacccacctataactatatacaatctgtagagcaaatattaattttaatttataaatagccggaatgcatgaactatataaaattagtgaaatgatttttttaaatatttctgtaccttttaaggacatttttttgaacatgaatgatttaaatgtggtataacaaatgtataaaatgtccaaaaaatttgattctccttttcttttattttgaattgtaaaaattattatagagatacctttttattaattcatacatatccagcaatttacaaattaaaattatttgaaagattttttgaaacgggaaaggagagggagagggagagggagagggagagggagagggagagggagagggagagggagagggagagggagagggagagggatagggagagggagagggagagggagagggagagggtgagggtgagggagagttaagaaacgaaaagggtgttggatacggtgacggagacgggctgagttgtagacggagaccaaatggagacgtttgagaaacgaaaaatgtgatggagatagcaggcaagacgggctgagttggagaccgagaaggagagaagagggagatggagaccaagatgtaaatgcagtatgtttgatagagagttgacaaaccaaaaattaccacgataatggagacggtgatgaagcgaaaatatgatataaaattaaataataaaatttaaaataacaaaatttctgcaccaatcttttaaaaattattttctctattttctcgaagagttttgaatctatttctaaaaaggagacgtgctgagttggagacggtgaagaaatggagaaggttaagaaacgaaaaacggtgatggagacagcagccaagacggactgagttggagaccgagaaggagaggagagggagatggataccaaaattaaaattaactctacgaaaaatttttcagagttttgaagatattcataaaataaaacttaatcgaaatgcaaagtttaaattcaaattttaaggttaatgttgatgtgagagttattaaaagttttgatcaaatttttaaagataaaactttagtgactttttcaaaaaaattttatttaaagtaaaaattttataatatttgttaaattttctaacataaactaaaccaattaagccaaataattttttaataaagacaattcaaaataatcaattcaatttttgttattttatattttttttcagcataataaactcaaaatcaaaaaatgaaatctgttgtttatattgaaaatttaaaatgcttcactcttaagcatcggtttcttaatcaatttgttctttctttgtacgccgaagagtccgcaacctgaattttaataaaaataattatctcatagtaaatttttaaattaaaaatttaataattttgtgcaactgataatttgttaatattggaaatttagaaaattgtgcacagaaagggacatgtagaaaaaataatgtgttttttgaatttgggaaaaataggaaagggaaagggaaaatgtttttagaatttggtaaaattatgaaagggaaagggaaaaggaatttagaatttggtaaaattttgaaagggaaaaggaaaggggagagggaacgggaaaaggaatggtattttagaagtttggaaaattatgaaaaggaacgggaaaaggaacgggattttcgattttgggaaattattaaagggaaagggaaaaggaactggaaaaggaacgggattttagaatttgagaaaattatgaaaagtagtggaaaaggaataggattttagaattttttaaaattattaaaaggaacggaaaaaggaacgtgattttagaatttgggaaaattatgaaaaggaacgggattttggattttgggaaattatgaaaaggaacgggaaaaggaacgggattttagaatttgggaaaattatgaaaaggaacgaaaaaggaacgggattttcgattttgggaaattattaaagggaaagggaaaaggaacgggattttcgattttggaaaattattaaagggaaagggaaaaggaacgggaaaaggaacgggattttgaaatttgggaaaattatgaaaatgaacgggaaaaggaacgggattttcgattttgggaaattattaaagggaaagggaaaaggaccgggattttcgattgtgggaaattattaaagggaaagggaaaaggaacgggaaaaggaacgggattttaaaatttgggaaaattatgaaaatgaacgggaaaaggaacgggattttcgattttgggaaattattaaagggaaagggaaaaggaacgggattttagaatttgggaaaattatgaaagggaacgggattttggattttgggaaattatgaaaaggaacgggaaaaggaacgggattttagaatttgggaaaattatgaaaaggaacgaaaaaggaacgggattttcgattttgggaaattatgaaaaggaacgggaaaaggaacgggattttagaatttgggaaaattatgaaaaggaacgggaaaaggaacgggattttggattttgggaaaattatgaaaaggaacgggaaaaggaacgggattttcgattttgggaaattattaaagggaaagggaaaaggaacgggaaaaggaacgggatttttgaatttgggaaagttatgaaaagtaaaggaaaaggaataggattttcgattttgggaaattattaaagggaaagggaaaaggaacgggaaaaggaaagggattttagaatttgagaaaattatgaaaagtaaaggaaaaggaataggattttagaattttttaaaattattaaaaggaacggaaaaaggaacgtgattttagaatttgggaaaattatgaaaaggaacgggattttggattttgggaaattatgaaaaggaacgggaaaaggaacgggattttagaatttgggaaaattatgaaaaggaacgaaaaaggaacgggattttcgattttgggaaattattaaagggaaagggaaaaggaacgggattttcgattttggaaaattattaaagggaaagggaaaaggaacgggaaaaggaa

SEQ ID NO: 61 - DNA, 1937 bp, Heterodera glycines
gggattttagaatttgagaaaaatttgtgaaaagttaaaggaaaagggaattggattttagaattttttaaaatttttaaagaaacggaaaaaggatcgtgatttttagaatttgggaaatttatgaaaaggaacgggattttagattttgggaaattatgaaaaggaacgggaagaggatcggggattttagattttgggaaaattatgaaaaggaacgaaaaaggatcgggattttcgattttgggaaattattaaagggaaagggaaaaggatcgggattttcgattttggaaaattattaaagggaaagggaaaaggaacgggaaaaggaacgggattttagaatttgggaaaattatgaaaaggaacgaaaaaggatcgggattttcgattttgggaaattattaaagggaaagggaaaaggaacgggattttcgattttggaaaattattaaagggaaagggaaaaggaacgggaaaaggaacgggattttaaaatttgggaaaattatgaaaatgaacgggaaaaggaacgggattttcgattttgggaaattattaaagggaaagggaaaaggaacgggttttagaatttgggaaaattatgaaaaggaacgggattttggattttgggaaattatgaaaaggaacgggaaaaggaacgggattttagaatttgggaaaattatgaaaaggaacgaaaaaggaacgggattttcgattttgggaaattatgaaaaggaacgggaaaaggaacgggattttagaatttgggaaaattatgaaaaggaacgggaaaaggaacgggattttcgattttgggaaattattaaagggaaagggaaaaggaacgggaaaaggaacgggatttttgaatttgggaaagttatgaaaagtaaaggaaaaggaataggattttcgattttgggaaattatgaaaaggaacgggaaaaggaacgggattttagaatttgggaaaattatgaaaaggaacgggaaaaggaacgggattttggaatttgggaaaattatgaaaaggaacgggaaaaggaacgggattttcgattttgggaaattattaaagggaaagggaaaaggaacgggaaaaggaaagggattttagaatttgagaaaattatgaaaagtaaaggaaaaggaataggattttagaattttttaaaattattaaaaggaacggaaaaaggaacgtgattttagcatttggtaaatttttgaaaggaaaaggaatgagattttagaatttgggaaaaatatgaaaaggaacgggaaaaggaacgggattttcgattttgggaaattattaaagggaaagggaaaaggaacgggattttcgattttgggaaattattaaagggaaagggaaaaggaacgggaaaaggaacgggattttaaaatttgggaaaattatgaaaatgaacgggaaaaggaacgggattttcgattttgggaaattattaaagggaaagggaaaaggaacgggattttagaatttgggaaaattatgaaaaggaacgggattttggattttgggaaaattatgaaaaggaacgaaaaaggaacgggattttcgattttgggaaattatgaaaaggaacgggaaaaggaaagggaaaaggaacgggattttagaatttgggaaaattatgaaaaggaacgggaaaaggaacgggattttcgattttgggaaattattaaagggaaagggaaaaggaacgggaaaaggaacgggatttttgaatttgggaaagttatgaaaatgaacgggaaaaggaacgggatttttgaaaattatgaaaaggaacgggaaaaggaacgggattttagaatttgggaaaattatgaaaaggaacgggaaaaggaacgggattttcgattttgggaaattattaaagggaaagggaaaaggaacggga

SEQ ID NO: 62 - DNA, 1215 bp, Heterodera glycines
ttctcaggtcataacttttttgtaagttaatcatttttttgaaaattttgaaggataatagaaacacttagggctatcgaatcatatcaacagtttaaaatttagttgtttagggcgaagttatgcataattttatgtcaaaaatttccatttgatggttttttgactaacgcccattttgatggtttatgactaacgtcccagcacccaaaaagaataaaaacaaaaaatattcgaattgtagttgcttttgcaatattatttccctaatttttaaattttttgtttgaattattttgtgattaggccaaaagactttttcttcggcttatcctccttaaaaccatattttacattgaatattgtcaacgcaaaaatattagaaaaaaaagaggacattttcaatgtttcggattaaattttctggaaatcaggaaaactattgtataaaaaatcaggcatttatgattaatagggatgccaaaaatatggatataaaatcgcaaaatatggacataaaatggcaaaaatcgcgaaatatggacataaatggcaaaaatgtcaaaatatggacataaatttttcaaaattgagtgcaaaatttcttcaaatttattggttgaaattgcatatgagatacatttccaaattttttgactcggtaaggcgctttgacaaagacggctttcgttttgcaattagtcggtcaacattcggaaattggtctcgaattttttcggcaattctgtgcaatattttagaagaaaaaaaacatgaaagttaaatttattaatttttttagcgcaaaatcaaccacaaaagcgaaattttcgcttttttgcttatttttgacataaatttattaatttttaagaaaatttaaatttattcaatattctcgagacattttggcgaaaaaatgattttttgaaaaaattttcggtttttgggctcaaaaaaaccaatttagctgctgggggccgttctaataaaggtttttttgaaaaatgccaaaatatggacataaaatatggataaaaatgccaaaatatggaaaaatatggaaatatggacataaatcgcgaaatatggaaaaatatcgaaaatatggatatggaaacccatcctagaagcttcaagccatgctaaaaacatgtttttcgtgcgtttcaggccctcaacagtctaggaaaaaatatggatatccatatgatt

SEQ ID NO: 63 - DNA, 4112 bp, Heterodera glycines
tttttttttttacattaactaagcaaaaaccaaagacccttgccccggtgaattatcgttcgtcagaattgattctccgccgcgatgattgatccaaggattccccctcttccccgggcgagttcttatttgaagtgaggctaattacagttgaaaaagagagatggatgagaaataaggaattataaaaataaaatattttaacattaaaataacaaaattccatcaaaactaattaaatgtttatagtaaaaaggaattaaaaaaacagttattatattaaaatcagacggggggggggaatgagtgtcgggatgaagggaataaatgttacacccagagggtgaatgggaaagaatggaaaacaaaagaaaacggaaaacgtaaaatttcaaataataatttaaagaaaaaacttattaaatacgtttttggttttaggaggtttaacgagacccttttttaaaaatgaatttgtttgaagtgatggaggactggtaattactctcacttttattgaccgccgggaagggatagggcggggataattatgacgttaaggggagctttggtgcttaattctggaaattttgatttggatggacgggcgtggagggaattgatttgcactcaaatagaaatgaaaaaaagagaaagtggaaaacggaaaggccacgcaaaataaagaaaattcaaaagagattttaattgaagtaatttatttaaaaaattgctacagtataccttaaaataaataaaacaaattaaaagacaaatatcacaaaatcgaaaattaaagcaaattaaaagataaatatcacaaaaaaaatcgaaaattaaagaaaaataaaaaattaaatatcacaatggtaaagaatttcatcacaactttaatactagggatgccattttatgaattaaaatacttaaaaaaattgatttaagacaaaaaactcaaaataaaagtaatcataaatgttgggtgaaaaaagtaagtcaaggtgccaatttgtattaacaatttcaggcaaaatccaattatttctttgctaaaatgtggttttaaatcatctaaaatttacttttcgtttttaaaattgaagagacccaaaataaaatggcataactattacatatgcattaccatcaccattcaaatttcactccccaccacgccacccactattcctcgtccattggctcttctggcccgtgaacccgcgccttttttgcactcggcagcttttccgttgtcgcacgtcgacgaggcgccagaaaacggcgtccgcacaccgcgcatttgtttggcggtgcgcggacaccgaatgggttcgcgaaggttgagcatgatggcagcggaagtggcgccggtgccagcggcggaagagcgagtggcgcaagtactgggcccatttgcggcggccgcgggcaaaacggcgccatgccgatttgtggcggcggcggtaaaaacggcaattgtggtggcggcggcgggaaaaccggcaattgtggtggcggcggcgggcaagacggtgccaaagggcgcggcggcgcgacccattgaggcccctgaagttgaaagacacataagatttcattatttttttgtttcgcaaaattttaccgcgtttcgtggcaccggcaccgtccacactatcatattgttgtttcccatttcgttcacggcaaagttccccgagaggatggagtcgcggatgagcttcatgtcttgctggagtttgtggagtgcgatgattttttttaaattttcagtcagctgctctcggtttgcggacatgtttattgctaaaaaaatgccaaaatggaaaaagtctgggaaaaagtctaaaaaagtttaaataacaaaaaaaattcgacagtagactttcaaaaaaaaaaaaacaaacatacttaggggaggcgctctttgaaagatggccgggtttggcgtgctaactaaacgccgtccgcctttcaaatcgtgtaatctggcaaaaaagcggtaggccgggtcctgccacatacaaatgttggaagcggtacccggcctaccgctttcggacaaactccttttcgagcgtgccttacgagagggtgggggaaaggatttcgagcgatgcttcatcatcattacttatggtcataaaaactggcgcttataaagcccctcatccatcacctaaaaaaagccagctaattgactctgtctgggtcaggtggggggggggggggtgcttttatgaaataccgtcagttccattaagggaaaattatggaagaaattaaaaattgagctgctaattgagagggttattaactggcacaaagtgccgacgttgaacgggcctctccattagccagaccggagactaatcgacaggtcaattaattagaccagactaatggacataccggtctgtctgtccattagccagaccggactccattaatggaccagtccattaacggcaaaagtaccaaccggaccccactaatggaccagtccattagcggtcggtccattaacggcaaagtgccagccagggccccactaatgaaccagtccattagcggtcggtccattacggcaaaagtgccagcccgggccccactaatggaccagtccattagcggtcggtccattacggcaaaagtgccagccggaccccactaatggaccagtccattagcccactaatggaccagtccattaacccactaatggaccagtccattagcggtcggtccattaacggtcaaaagggtcagcaggacccactaatggaccagtccattaacggcctgtccattaagtcttaatggaccgaaaacagcggtatataaatggcctccaaagctctctggctcattgtcttcaaattgtttctcatcgataaagccccacctgggcctgcctatttcagtcccacccctcttaatgcgcgttattttaccccatcggtcaaatttgatcattgttgaacccgtccatttcagtaccctcccggccatttaattatcaccatttcaaaagagcttcttgttgtttaatgccaaaaaaataggtcataatgtcaattacttaattttttttttaaaatgtttctctgttatttcgaccccttctctaaaatataataacgagttcgaacattgttcgacttttagatttttgttcgaactgctctcaaaatgttcagaagatcattttagccaaggaatagtttcaagggttcaaaacgcatattgttttatccaaaaatgacgtttcgacccacttttcgcattcgtaaaattttcggtaattattccggtgctctagagcagcaagaagaccgaaaaaatcttcgcaacaaattacaaaatgatttagagcaattctcagacaaaaataacgagttcgaacaaaaggtctaaaagtcgaacatttttagaattggttccaaaatgttcaggagaccattttaggcatgggtttaccccgttaggggtaaaaaagcttgtattttcgtccaaaaatgacgtttcgacccacttttcgcagttcgtaaaattttcggtaattattccggtgctctagagcagcaagaagaccaaaaaaatcttcgcaacaaattacaaaatgatttagagcaattctcagacaaaaataacgagttcgaacaaaaggtctaaaagtcgaacatttttagaattggttccaaaatgttcaggagaccattttaggcatgggtttaccccatatggggtaaaaaagtttgtattttcgtccaaaaatgacgtttagacccactttttgcagttcgaaaaattttcggtaattatttcggggctctagagcagccagaaaaccaaaaaattttcgcaactaataaaaaaaaaatgatttcgagccattctcagaccaaaatagcgagttcgaacaaaaggtctaaaagtcgaactttgttcgaacttctcccaaaatgttcaggagaccattacagactagagtttaccccaaaagggtaaaaatgctcgtatttttgtcctaaaatgatgtttaaacccacttttcacagttcgaaaaatttttggccatcatttcggagccctagagtagccagaagacc

SEQ ID NO: 64 - DNA, 4876 bp, Heterodera glycines
  unsure (1)..(4876): unsure at all n locations
taataggctaaaaacttctattaacatttttaggtaacaaaacacgaaanaatttaattaatctttttgttatgcttcaattataaaagaattataaaatcacttaattttttcgaaaaaacaaaattttaattttaaaaattttctctaaattttttgagggtaaatttacaaaacccaanaatattacaacatttaattttttatcatggttttggacaaagtaattttagaaagcgtagatgagcattaaaaaatgttaccgatttagttatgcattttctaaaaaataatttcgacaaattctcagtcttataaaaaaatctatatttttttgggaaattttcgaaaaatttctttcaaaattaataaaaatacgaaacgtatgaaaaagtttgttgaaaaataccattttctactatagaaaaaatagatcatttaaaaatccgaaattatataaacaaatgtcccaacttttaactaaaaaaaaaacaaagaaaaataactttatgcgcctaaccaaatcagttccgctcttagcaatttcgtgtatttcagtgccattttcttacactgagcgtatcggttctcccggaattgaaataataattatttatcatgctgtgcactcattttaacgcttttttagctttcagtgaattcatttttttttattcaacggtaaaaaaacaacaatgagcggtgagaacaagcttaaacgttttcaattcgtgccagcttccaaccaaaaggcggatgaatttcccgcacagcttaaggaattaagtgaaattataaagttcaattctcccggtaccttctttgtacgcgcggtcgttgacaacattcaatactgtctttaccaagtgattatctctctctctctctttctctctctctcatttaaaccaaaacctaggcgtgtccaattaagaccggtggcctcgtgtgtaaaaaaaaaactcaacgacgagctgtactgtgaatcatgtgatcatcacgctaccaaaccactgagcaacctctacttacgcatcgacttgcgcgattgtcatgacattgagacgagcaagcaaataactgccttttcggcaactgctgttaaatttttgaatgtaaaaatagatgaattttcacgcttagcgcagcaccgtcccaaaaaacttgccttaattctccaatcaaaaattgaacagacagttgctgctaaattggtcattaaggttgattttagcaccctttccatttcacaaatccatgctatgttgttaaggcaaagggcgagacacttgactgggttattgcttcaatccatgtgcctgagcaggaagaagaggctggcggtaatctggcaaacaaaaaagtcgttgaaagtgaagatggggctgaggatgacgatgacgacatctacacaattgatgatgctgaatgttcacggatgccgcctaagcggccaaagaaaaatgatgagtagaaagaacggacggacggataataaaaggatgccttaggcaccaatttcttataattatgtagaaatttgaaaattattttaataataatgtattagaaaagaaaagctccaatttcttttacacaacaatattttttactgttcaatcggcatgtatctgaattcaagctgcaattattattattatttcatgaatgtttagggccctaaaggcacaaaaaagcgtcaactgtccgtttttgtttacgttcacaggaaaaaatttttctgctggagcgatgaagaggggagtttctgcgtcagcaacggctaccgattccgcagacttacggacaccaaacgatgcttctgctgctgctgctactgcttttattggcgaaaacttaaacaaaaaacgagcgaaacggtcacgaagacaacagcgacgatgggactttcgcacagtcgccttctttgagcagcgctcctcctcctcatcagagtttgatgatgctgatcaggacagcaaaagcagcgcaaaagtcgaccattgtatgcaaataggctacggtagagcaccagcagcagcagcagcagcaggtaattcacagcggaacaacaacaacaacaatgttgacagcggcggcggcggcggcggcggcggcggcggcagtggtaatgaccgccgaagcgaagcagaaaacaacgccagcaatccggaagctgatgatgatgatgatgatgaaaaaggcggcgctactgctgaccaattgtatgaagagaagcagcactctgtgcatcggctggagcgtttcgcactgcagcggcacgtcaccgagtttgtgctgaacggtcagcatgagaggccggacgaggctctccgcgacgcatttgaacgcatcatcaaacgagcaatacgcaatgcggagcagcagcagcagcagcagcagaatgaacagcagtcggggaatcaggaggaggagcagccacaagacggtggcggcgccgctcaacaaagcccaagacgacgagtgacaaagattggaatttttctggatggaaacggtacttcttttttttgtttgttttggcaaatgtccccatcgaacatccatcatcatcatataggcctgactgaccctattgtgctaccgatacggccacctgagcagaacacagccgacactctgatgggtgaactggaaaagctgggacagtcggacggagacgaagacgtgcatggcggaggaatgagcaagcgatccctgttgctcagtgaaccggttcaaattgtcatcacctgcattgcaccgccggttggagcagctccgcgcttccaccattatcagcactggggttacaatgaaaggcagttgatccgaatacggaatgtcggtgaccatttctgcctgttccacgcgttgattgccgcccgttcttacactgatcatgacttgacaaaaatgattgcaccacagcaacaacaatgccatcaaggggacgtaagcagcagcagcagcaacagtgatcatcttattaacgtgccgtccgctgctgcaacagcagtgatgaggaggccggatttttgcgcaaatcatgaagtactgaatcgtcttctgtccagcccgggtcgaatgcaagaaacggtccgggggttgatgctgcatgccggcattgaccctgaagggcaagcgtacggggtggagcatgtcccgcatgttcaacagcattgggtcagtgccattttgaaaatgctttctgctgccgccacataataatttggaaaaaaacgcacacactttttaacaggatcggctctatccgggaatgtaccgcattgtgctgtttgaggaccgccctgaggaactgccgaggcctatctggaaggggccgatggggcgctgctttgtggtcgctttgttcatgtccggcggacatttcgacgcaatcaaaaaagtcaactgttttttcaagcttggccgtaaatattgtattgactgcgaatgcgtctacaccactgatgccaaacacaccatatcatgcaaaagccggtgtgctcagtgtacaagaggttattttgtgggccgtgtgcgcaaaattttgttcattgttgttgttgtacagtaggaccacagcagccatgtgcgagcgaaccaggcgtcagcatacattgctctcaatgcaatcgcttctttttttcacgcatttgttttgatgctcatcggagcggacaagcgtgcagactgctgaaacgatgcacaaaatgcagtcgaacattccaaaatgatgccaaaaacccgcaccagtgttacaccagtttttgtgggcgctgtaatgtacgttttttttttaagcggacggataaggacaacaaatttttcacaaaaatgcgcaggtataccacgaaaaagatgctgcttgtttcatcaaaaaaattcctgtcccgaaacaaaagcaaaactaccgcattttgtgctgggacacggaaacgcggctcgaacacctacaagaagcgggtcatcagcggcacaaagttaaccatttgtcggtcaacatcacgtgcacggaatgctgcgattctgcgacaggcgaatgcgtagaatgtgcgatatgcacaaccgaggagggaattttgtgcagaaagaaggactggtcggttcttcttcctttcttaatacatgcttgctcacatttttgccgacaggagtgaagcgaatggtgatgaaccgctcagggattttgtcgaatgggttctccgtgcttggagcaataaacacaagacgtatttatgggtttgttgtttgtttttttttgcttcactgactattttagcctcgaattgatcagctcaaattcaggcacacaactcttctcgttttgacggacatttcgttttaaagtatttgggcgagaccagtcgacgtccagatgtggtcatgaacgggcttaaaatttatgagtttcgattgcagcatagccgtcaaaattctctgctcatctggagagattcttgccttctgatgcctgttcgtctcgatcaactgccaaaaactttcaatttggactgtgcagagaaacctttttttccctatgctttcaaccgaaggtttttccgaaagctgtgacatttgtcaaaaaaaataatgcttttaagggaaaactatgacgtgaggcttccgcatttaccgccaatagaagactactgtgctggctcaatgaaacgagaaaaatacgataaatttgtcagttggtaagcaaaactaaagggttatttcagtggtgggggttccccatttcccataggtatgaggaaaataaaacaacaacacccttctatttgccggacgagcttcaatcatattgccaaaatgatacggagaggagggtgaaggcgattgtgcagttcagaaaaatattgatgcg

SEQ ID NO: 65 - DNA, 11932 bp, Heterodera glycines
  unsure (1)..(11932): unsure at all n locations
atttatgagtttcgattgcagcatagccgtcaaaattctctgctcatctggagagattcttgccttctgatgcccgttcgtctcgatcaactgccaaaaactttcaatttggactgtgcagagaaacctttttttccctatgctttcaaccgaaggtttttttccgaaagctgtgacatttgtcaaaaaaaataatgcttttaagggagaactatgacgtgaggcttccgcatttgccgccaatagaagactactgtgctggctcaatgaaacgagaaaaatacgataaatttgtcagttggtaagcaaaactaaagggttatttcagtggtggggttccccatttcccataggtatgaggaaaataaaacaacaacacccttctatttgccggacgagcttcaatcatattgccaaaatgatacggagattcttctgaaggcgattgtgcagttcagaaaaatattgatgcgtgatataacagggggatacgatgtgctacccatctcgtgcactattgccaggtaaaaacattgattgtgtgatcatgtgaaaaaaggagaagaaatgttttaagcatctgtatgagcatcttccgggcccaattcctttgtgagaatcaacttgccattgtacccgaaagagggtatgagcggaacgacagagccagtgtgtttgctattaaatatttggattggcgtgctaaaactgatgcggttaaaattcaacatgcgggaaacgggatggaaaagcggtggagacagtttaaattggacggttggatagaagagcaaaaccgctgtattgaagtgcttggctgctactggcacggctgtgagcgctgttttgatcccggcgacaaactggtggacgccaaatcatgcagagaactgaatgaggagaccaacctgcgattgatgcagcttcgtgaaggcgatgtggacggacaaggcttgcaggtcgaagcagtttgggaatgcgaaataaatgcgcagttggcctgcaatgccgaaatgcgagcctttttctctgatttggggatggacagagggcctattgaacccagaggagcctattttggtggaagaacgggcccattgaagctatttgcagagccaaaggaggacgaaaaaatatcagtttttgatatcataagtctgtatccttttgtgaattatacgtgcgaatatccggttggcataccgaccatcatacggccaatggccgatgaaatgtgcgttaattggacacggccggagcagttgccataccgcggcattctgcgtgttcgagttgtccccccacggggtctgcgcgtcccggtgctgcctgtaaaaattgacgagcgacttttgttttgctgttgtcatcattgtgcaacgatgtttcgcaaaaaaagcacgcgccgcccacataaatgtccacacacggatgcacaaagatccttcaccggcagctacacgcatattgaactggaaagagcacttgaacacgggtacaaaattgatcgtctttggagagcttggcactatgatgaatggtaattgtctttctgtttaaaatttgtatgcgatattttttttctctataggagcgaccaaatttttaaagattatgttagactgctcatcaagttgaaggtttgtctgcagacttttgacccatctgtttaatcatgtgttttttttgttaagattgagtctagcggtttccccgagggagttagcagcgcggatcagaaacagcgctatgctgatgagtatcggcgcatttacgaagtaaacattgaattggagaatgtgaaaaaaaatccggggcttcgattcattgcgaagcttatgcttaacagtctctggtttgtatatatgtccagccgattaaggtgcagcctatttttaggggaaaattcagtatgagaaacgaacttggcgcaaacaaggtcatcaccagaccacaagagttctttagtctgctctttgatcataaaattgtaagttcataacgtatatatatttttattggcttaacaacaaaaatgtgtgtgtgtgtccaggaggtttctgcaatcgtaccattctctgatcaagcgctacgcgtgctgtacaagccaaagaaaaacttcgtttccgaacatacaacaagcaatattgtgataagtttgtggacaacaagctgtgctcgtctcaagcttcacgactacatggtacaagtcgaccaaagagaagattctgatttgctctatacagtaaacgggttttttgtgagcgcactatttttgtgattttaaggacacggacagtgtcattgttctacataagcgggacactactccacttgagactggagagtttttggggcaaatgagtgaggagtacttggattacgatataaaaacgttcatatgcggaggttagtcgtaaatagcttattcaaaatttttatgcattaaggtgccaagcaatatgcctttcgtatgcgccacaggcggacaaacgaactggaatttgtccaaaaaatacggggaattacttttgatgtcaacaacagcaaggctctgcaatttgacaattttgttgaaaaggtgctcaattatggtaaagttgatgataaagacaacgacgacgaccacgatagttctgtttcgcccgctgttttctcctatcaaaagataatgccaacgcgcgacagcaagatcataactcggaagcagttgaaaaagtatttgccagtgtgtcaaaaggggatcatcaacaacagctatgaagtgttcccttttgggtatgaatgatttggcgctcaataatgtacacattttctaacattaaaaaatattgcttaaatagttggcacaacacacacacacaagaatatatctgacagttgttgttgttttgtctaaattttataatttgattttgaaaataatatttctgcgcccttgctgcgtgtctgtcgtctcatctaaatcaaatggacaatggtaagaaaggagagctcaatgatcgcaaaggtgtgaaacggcgatacccattccctctggtgtccgcaagagcacaagattcatggtaaaagtgtaataagataccgcccaagcttccgatcaaacacaggagaaccaaacttgaacaaatggaggaaaagtacgccaaaatggaagaggaaatgtcgtcggaagacagcgatgatgccatcgattttttccaagacaccattgaggatattgtggaaaagtgggtccacgtggcaaacatgtttcgatttaattgttatattcctaataagaatcaaccgttccgaagaaaaaattaaaaaatgggaggagaaatgcagcagcagcagaagtaagatggacaccatgagcacaatgatcgaatggtaggcacaaatgctgctaatacatgttatttgtttgataaaatttccagcagtggtgtggtcaacggcgaaattgatgacatggatgatcagcaggacgatgatgatgctccaacgtcaactgtttatctgaatttgggcaaagacgagcgcaccgcggaaaattattaaaggcctaaatagactgttatacaaatttaacacaccaaatgtttgaaacatttattcttcatcatgattatgttagagaaaaatagtaatagttagaataaacatattaatcggtcttttgctcttctgaaacaacatggagtaattcaattggaaaattgtcctggtgactgttgccaccaaattgtacaacacatggtaattggggatatttcagcataatgcgatgacgcacatataaatgttgttgaacagttattcccatgaatccacggtaggcaaacatcatgttggctccatgtcgggacagcgcatctgcggaaacagctacattccttttcaggtgatgggtggctaatgacagtttgttcaagaatttcacattttcttccttccttttctgaagcattttgtgaagccaagttggcgaacatcggttgaatcggcagagcactctcaccaagtcgcgtcgttctctttgtcgtcgtcgctgttgcttgcgctgtgcagatccaactcgtccactgctagctggtaataactgctgctgctgctcgctcgtccgcaacgtgagagacattccggcgagtcgcccggacaaatcatcagatccttcagttccacatacagaggttcgctcctgaatgtaaattttatttatgttttttttggtatatgttttaatttaccacactacgccctctgtcttcctcttgggaaagcatgttgtgtaaagctcgagtccctcgacaaggtcaagtgacccttccacgtacactggttggtttctgtgctcagtgtttgcaatatgcacacagtcgactgcacgcaacggattcggaaacaatgactggccgtctcctgttggacaattttttatctcctccttaaggtaagcgtagagctcgtcaatgttgctcagtccgtaactgtcagtcaaatagcggattgcacgctgcatacaaagcgcacagcgaacagataaatttcaaatttagtggagaagcagcccgcgcgcgcctatttgttcagagcggggacgtttagaaattctgttgatgaataatggaatgatctgtaggcaaaatcggcgagtttatataccgattcctgacgacttaagctatagtgatgatgctgtcaccgttgtagaattataaacggtagattgttgggggtatgggccgccccctgtaccttgcaataaagacattgagtgaatcaggtcatattcgtccagctttgtcacagcggcatcgctgtttctgttgctccgacggaccatacgaatagcacatattccgatcagtaggaccaccatatcaagcaggtaggttaatgtaaacatcaagttctctgcccaatttgatgagggatgaactacactggatgtcgcagctgatcgtgcaaaatggccgtcaccacgatcgcgctccttttcttcaaacagaagaaaattgaaacgagtgtcgctggagttggtcacaaactggagctgtgagaatgactgattatggtagccgcctagtcggaacttatacacacgtcttctcctaatcaggtacacatgatttgaagcaatgaaataatccgttttttgctcgggcaacaatccgacaaaagtgcttcgaagctggtgtgtagcattgttattgccatttcctgtaacagcagcagcagcagcagcagcagtgttattcatcagccaccatcgcgccaagtctgagatggacagctcattgatgcgccgttctctcttgtctaccaaatacagccgagcatcgatgtggtcaaataatacgcgtccatatgaggccagttgatgtgcaactttttgtttttgaccacgcatcactgccacttcatttgctccattttttaggtcgaaaataaaaaagttgtgattgccatgttcaaaacatgccaatggcaatgcgtcaggtgtcagctctattgttgtctctcccgtgcgcatgaatgtgtgaacatcagtcagcgtgatgcgccacatagcatcgctgttgtatagcagattgacatttcttatcctttcaactgtgcaggctgtgttgcgattgtacccaaatagataggcagagggtgagtgtttggaaaacgatcttagggagccgtcaaaaaaatttggcgtgtcaacgctcagctcaacatttatccattcgccccgagacaaatggcaaatagtaacgcttagaagccaaattaatgcaaaaatcattatttttttctgtaaagcgatttgctacaatgctcaatcgcccgcccttttatacatgaagggatagtgtacatgtatgcgtacgtgtcacaacaccgccatctcagtcccgtttaaagcgcaggacttattaccaagtttcggacaaaccatttggcaagaaaatccgcaacacttcgtgtgcgacgtagcgtttccatcactttacagtatggggttcctgagcatctgcttaccagaaaataaatacaaaaatgaccacaggcatccgagttgacaaactgaatttgctctttgtttatgtgaatttttgaaaaattgttcaagtatgatgacaaatccgcattcggttcagcacccaagctgtcaaaatattcaacagtacgtgcatttgacacgtaacatgctatccaatgttcaccctttgtgccctctctgccagtgtttattaccatacagtgagggaatcttttacgttcaagtggaaccttattggacgggaagacgccaataaatttatgcttagttttttgtaatctgttcagaattaaatgaatttgcaacgaattcattttagcaagcgcccagattatttatacacttccgtctgtgctgagcacacgatctgcgttaatggagaggatggagtcaaactcgccgaggatcaacatttcataaccgtccgcttttataggctgctcaaattggaccttaacagtgcacgtaccctgacggattagctcaaatcctgccgtatcctctagggtggaggtcatcgggatcacaaaaaatgcccatccgtttaagaatcgttgcatatcaattgacactgttttattgttgtctgtttcgtcgagcccaaggccagcatacatgtccacaaatgctcgtatgaagcgttgttgtttgttgtcgggccctccctcgaacgaaaacaggtacggagtggagggaaatgtttgtccatttgcctcagcactgagcgatcgtacatgcgcatgctcaaagttgaacggtgacaggtgacgggctccggaataggcatccgttgatacaaatgtacagatcaggcgacgaggcagcgttgaggtgaacacgttatgtgacagctcggttcggcctgtgcccaaaaacacggagcgcatttccaccttacgaagcgcatattttgcggaagaattctccaattgtttactaattgcaaggtttaggcttggtgttacgtctacggtacgcacataaatacgcatatcgtgtagccgaatacgatactcatcagtgttttcgttccatttttccgtaccatcagcatttacggtcttccaaggcggcgtttgcagaagaagcgcatcgctatttcggtgaattgtgaaaacaatgtcttggttgttaagcatcagtgcattctgatgtgcgagatcgaaattcagcttaaccattgtttcacacattctgccatccgaaaaccgtgccgcccgtttcatgaaaccttgattttcactgctgttttggtcaatgtcatccacataataacatgcggcctcgtggaatgccttccggacttccgcagagcagcccagctcctgcataatataggctcggtagtggtagaaaatcgagctgtcaaacacctctattccagagatgtttattttaagggatcgaacgaaactgttcccaaaattttgtattacgcccacattccgatcttggatacgtcggtggtttgttggcacccattcgccggcagcatttttgtactccatggaggtgagcaaatacaaataggtcttgctcaagtcacaatattgactgtctgaaaaaagtcgaaacagatagggacccgtttgattcagagcggacaacggtaacagttctctatccgttgtcttattgattgccacgttggttggcgggagagagaaaaatgataggcttccctccaagccttccacactatctttgtctatttttttaattacactcattttttttttaagaaacaaaactgtttttaattttcctgtgtatgcacgtcacacgccttttggtatcccttttatacattttttttttggtcgtcagagcaactcaaggtgcaaatgtaagttggtcaattacatgtctctttccctttgtcatcactgaacttgggtatttcttcttcttattattaacgcttgatttgttttttgtcagtgttgttgttgtcttggcggcaccctttccacactgtctcagtttttcagccaagttctccataccatgttttgcatgtgcttgaattgactctcggagcgctttgccctgggaaatgtcttcaagcactcgattgccggccgtaagtccttcacgtgacaccgtctttagcaaatttgacgcaaccggcatcaggaaacgggccacattcttcagaagaccggcacctcgttgatagcgggtgccaacaaaatattgcatttcgcccttcccctcttgctgtagtgccaaaaaaggcgcccaatctacagagtcgggattaaaaggtatgtgcgtcattttttttcggtgttgatcaaaaaagtttacgcctgaaatgtagcgtgatgatgcaagtaccccagttaaactttacgtatcgtccaaatgcgttctgaatttcaatttggatttcagaaattcgtttgttttgaagagaatggaaaatttcattggtatatataacctcgggcacgtccgtccctcctggtgttgcagatacattaacaaccctcagcaatggagccatcttatcgccaattatggattcatcaaccagtttaggagcgtacacatacaattgtttaacgccgccggaaaggtcgggcatgtattgtgcttgttctccatcatagagacgaatactgttaaatcctagaacatatgccaggtgtttgctgacatcaatttgtaccacgcctgatcctgttttcagcacaaatcgttgagcaagctcattgaaatgaaattccgcggcagtttttccctttctctgttcttcaacaagccttttgaagctcgcttcagcttctccggtatatttatgatgctctaaaatcagcttaaaaatttctcctctcgttttggctgaagaataatattgatgctgtttctcatcctttttcttttcaatcaactccttcagagcttcacctcttgtaagttgccgatccgagtcggatgaaccatgaggcggcggcctcagcttgtcctcctttacaatattttcgagcaactctttgagaatctggcctcttgtgtgaccttctccgctgttttgcgtcacgtcacgaatgggctctttatctgctaacgacaacattttcttaagcagctctccatgtgtctgctcaattgtaattgctgagccagtgagactttgagcaccatccctttttttggcaatcatgctcaccaatttatgacctcgcgatagtaaatcgacggcatcgctgtcatgatcaccatccctctcagctgatgcgctggtgcctttcttttgttctagcttctcttttagaacctcggcatgggtttttggctctgctactgctttgccgtcattttgcaactcatttggtgtcgacgtggctatatcttgttgttgttgtattttctctttgagaacctcagcgtgggtttttggtttttccatcgaattattattatcctgatccgacttttctgtctgcttcacttgaacggcacctaatcgctcctttaacgcctctccggcggtcaatgcagatgaaattggtgaagagaatggagaggattgttgctgttgtccgtcacgtttctttgcctcaaattccaatgcggcaaatctcttgcgtctgtattccagcagttgttttgctcggtcaatttgctgctggaacgatgagtgctcgtcgtcctttagctgcttctgtgccgttttttgttggagttcttctatcttgtcgaactgttcccggagaccgtcgtagttgttatgaattatttgccaataattggtcgggtgtctttgaaaaaattcctgaacatatacgctattctgttcatggctgctcttttcatattcctctctagtttttcgcgaggggtcatcactgttggcgcgctgtagcacagcgctctcaaacaaattaagattgcgcagcaagtatttgattttttctctcagcttccctgtctgttcattaagttgcacaatttttgctccatctctttcaccgatatattcactcattttttcttgcaaaccggacaaatattttgtgaagatcagtcgagactcgttcagttttttttcatgatcatccggatggtgatggaagaattcccgtatttttttctgctgattctcaggggtgtcgtcatcacgacgcttcgctgcccgcttaagctcctccagctcatcatcttttctcttgaggcgaagccttaaaattttcaattcaccttcaagttcattttttcttttctgctctgtaccttcggcaccatgttccctctccttcgtatcaatctcctctctcaattcaaccaaccttttttccaactcttcaattttttcccaataatcgacagggtgatcgtaaaaaaaaagctccgtaacgtcaatttggcgtttcactttggcggctttctgtgatgagagcccaaaccgctgtttatacgcatcattaattatatcatttaatgtttgccttaaatgcccaacactagagaattgcatactcggtatttttagctcaatatccacaaaacgtttgtcatccgcaaatttaaaatttggatttacaagtttaatgctgatgaagtcgtcatcatcaattccgacagatgggaatgaataggggtagataattgatgaaagtgcaaccatccagtttgcgtccaactcaagcgtatgtggaagcctgacagtgaattttgaggtcgtgttccctggtccaggtgaattggatggtagtaccacataaaattcgtccattttttttttatttagcttcgcgctcttttacaagatcagcgtcccgaatccacttgttatactgatcggaatgcccaatccaacggacaaggtgttctttgactccttttcgggtccgagattttaacacttcaaccctgtgggttgtgtccttctcactggttttcaccaactcctgctcgtagaagacacccttaatctcttcaccttgtaaatcgcgaattctatatgagggaggattggttggtttaacctgtgctattttgaatagctcgtcagtaaagttgggataatagccttttgtaaactctcctttctccttgcttatgcgcacagtgtcgcccagtttatattttttgttgttattattttttgctcgtttaattgaagaggtagttgatgaattgggcatatccgcttccttatataacctgtgccatagtggaggtgcatttttgaatgtcactgcacttggtttcacccccgtggtccgatttacagaattattcaaattttccacaattttatcaatcacatccacccacctcgttgtattattttcactaaagtagcgataaagacgctccttgattgtacggttagccctttcaatcacaccggcatgcagatgtggggaatacatcacatgctttataatgtccttctttttccaatagtctaacatacgctttgcttgaaattctagcccagcatcactatacagtttattgagcagaacattatttcctttttaaacaccttttcaaacgcttctatcatatgttcactctttttagactcagattcggcggtaaaaatgcgtcgactaagcacatcaatacaaaccaataagtaacggtatccatcgttttcatctttaagtgtattcattatgcacaaatcacattgccagtcagtgtgaagaccgcttggaatagtctttaggcgcggaaatttattccgacgcggtttaaacagagtgtaggttcgctgatcatgcaaaaatttttgaacatcgctaataccaattgatttgttatgtttttttgcttcttgccagaccttgagagcccctgcgtagcttgccggggagcgaaggtcataataaagggctctagtagcttctctacagttttgcccantattgctgg

SEQ ID NO: 66 - DNA, 4584 bp, Heterodera glycines
atttttgtgatttttttaaaattcttaggggtctattttctgaaattttttcaggtcaattcttaggggtgttttttcatttttattgcatttttgagaaggatttttccgaaaatcccgaaaaggcgccaaaaatggcgaaataggcaaataggcattaagcacaaaaagtgcaaaataggcaaaaataggcattataaaagtcatcgtagacaccccaaaccaagcggaaaatgcttttttcgtgcttatctaagcgtattaggtgcgcagaaaaaagaagccctaatgatcagtccctgtaatattatacctaatgaaataaatttgaaataaaaaaggttcaaagcgttcaattatgccattcgccgttcacttatgtgccgatggaccaaacaatgtggcggtgcaacggaagtcgctgagtcggctcgaatttgtggacatttttgtaaatgacagagaagcgatatatgtatgttttgctatatcgtatttcctaaaatggcttttaaatcaaatatagtttactttagaaattatggaattggtaccattttattggatttttgggtcctaaataatattatctcataaaatgattttatcatgcaacttcaaaattgattaattcaatgattgtccatgttctgaatacaggatttatttaatatttggccattttccatttttaacaaaacaaaatcaaactatcatattttgttaagaaaagatatttatgcctttaatcgccaattacctggctcgtatttttattttattttttcatttctttttgccagataaaacaataaaaaaatataaagttgggagtttaattttatctgtactgcttggtcttattgtattagtttttgttaaaataaaaaataatttgtttgctcacaatttgcaaccggcaaaaaagaaaaaaaagacctgatcaaaataaatggtcaattttgaagtaattataaaagcattttatgtaataaaatgattaaaaaaactataaaattaaaataattttacaattcccacttctttctccagcactttcactgttttttgtcattgtcaactttgacactactgaattattgaatttttacgccactttaactcttaggcaattaaatcttgccttttttgatgttttgtttaataaatgataactttggttttttaaatactattcagaaaattttttcataaatattccattaaataaatctctaaaaaatccccccgtcttcatttattatcggaaaaatcaaaatttaatttccccattagtaaatttgcttcgactaattcccatttttttttttttgcaatttttaaatttaactctggcttttgacgaatatttccacattttacccgccagcgaaaaacgaacggagcggcaaaaccctcgccccgtcaaaccaatgccccagggcaaaagtgaaaggggcagcgaaccgccgccccgccagcgcaaaaagaaaaatcacgaaaaaatgttataatattttaaaaactgggttttatgatattaaatattaaatcattgcatcgcccaatgcactgaaacagcaaatttagtagcaaatgcataaaaaattacaaaattcaaccattaaaatttggattggtgggggtattcaatttaagttaaaaatttattttctgtaaattcttggaaaagcaaaaaagtttttgagaacttggggggaggaggtccagcggttccgataggcgccgccgtagaaaattttgaatatttaagggtgatttgttaacagattttcaccaaaaaatgacaaattttttgcgattttttgtcaatttgttaagaaaaaatgtgagttattttttggaagggcgatgggcggtgccattggcgctaaaattttaaacagattttcactgaaaattttcgatttttcggttaaatttagcaaaaattaatgattgttatgacaaaatgctaaaaatttgatttttttacataaaatgtacattttttacactcatacgcaaaaataccggtttccaattacatggaaatgaatacagttaaaattttctaagcacaaagccgaaatccgagtacgtacttggcatccaagtacgaatccgagccctgttataacagattaaaaaaaaagaatttttcacaaaaaatgaaaatcagaaaaaaatgaatgaaactggaataaattgaaggaaaaataggcaaaaaagttgggcacaaaacgtactcttattcatagatatattaaaaaattaaatttaataaattcaaagcaataaataatgaaaaactcagaatttcgaaaaaatttttaaaacaaataagtgttgaatattttcaggatatgtgataaaaatgtttaaaatagattctaattttatatgatgggttgaaaatgcatttatagaaaaaaatgaatgttttgtgtttcgaaagttgaaaaatttctagaattaaatttacataataattgctctgaaagatgaataaaaacacccagcggcgcaatttccaaaccaatttctgatcacacttttcgggaaaaaattcataataaattagaaacaatgatcacgaaaaaaagtgaactgaccttgaaaaacatttacgaatttggattactttgctaaaagacttgtgttataaaaatttctaatataatttttttataaacttagaattttgatcaaatagatacaatttaaattaaatttttgtcctcccaaattaaagaccaaattaaataaattatttatccaaacagaaaaaattattgaatttgcaaaatgcaaaatgaatctgtgttttgcgttctctgacataaccgttgtttgatcaatttattcacttttttcggaaaagaaataaatccgaccacagtcacaaattctatcattttaaacaaaacaataaataaataaaatttgtccaaatgacttatgccctcagatattccaatttgaagccattaaaaaccgaattaaatctctcaggcattatgtgaccaattaaggccaattagcgcccgaattaatggtgtgtactgttctcaaccacttgcttctgtttgccggtgctgaatgtcatccgccgagctctccaacactttgatctcttttggcggcggcatttccatcgccggatcaggcggagaacccatgccattcagatgattattatgctgatcaacaattttttaattggtgcacaaattggaatgtgtttcaaagcgtctaaaaataaatttacgatcagagaccaagacttgtcgagactgaattaactaaaaaagaatggaaaattaaacaaaaattttgaatgaacataccaaaaggattgaaagcataaatactttccattttttcactttttttttgctttccttcaatttattccattttctttttgaatatttggttcctttttgctagattttctttttcattttattaaattttctaattttttctcttttttcttctgatttttcatccaaattttcttcttccttttcctctcattttcctccaaatatctttcgttttttttctcgtatgctttgaatatagttgactttctttatttttgtttgtttgatttttccgaaaagatattaaaaaagtaacgtcgtattcttaattagctgctaaaattgtgaattggtcctaaataatattatctcataaaatgattttatcatgcaacttcaaaattgattaattcaatgattgtccatgtcatgtttctcttattcaattcagtgacatatttcaactccatgaaattgttaaaatataattttttgggttatattttttcatgatcaatttgcttccaaaatacctagcccatttagaagcgttttaaaacaaaactaaattgaaatttggggtaacgacagattttggcgtcgatgaatttgaaaattttaatgcgattattttcttcacaagaggcgtcggcgggagaaaatttcgcaaattttttgccatttcttaatagcaattttgggtttggggtcaaattctgaaatttacacaaaatttttcaaaggttaaaatttgtttaatcaaatttcgtttttattttcacgaattcccattcgcaatcaatattttatcataatgggcgaaatgtttcataaatatagcgcgccctctttggaatttcttggggttttatgggtcggtcgctcgctgatcacgaattaaaagaaattaatgacaaaaatttgcctattaaaaatatttttatttttggtaattatttttttattcatacatcactttcttataaatagcccatttctttcattttaaatatttcttaggggtgtattttcccgagcctaagcttttgactttttttggctttttgccggtcagctcttttatgtattttccaaattgaattttctgagagcgctagcgccctctttggaattgctgagaaaatgtctttgtggagatataatgagagtttttaaaatgaatgcaaaaatgaaacacttcttttgcttttatgaaaatttagcattttaaaattaaacggtattttttcaa

SEQ ID NO: 67 - DNA, 7349 bp, Heterodera glycines
  unsure (1)..(7349): unsure at all n locations
taattggtcacataatgcctgagagatntattcggttttntatgctttcaaattggaatatctgagggcataagtcattnggacaaattttatttatttattgttttgtttaaaatgatagaatttgtgactgtggtcggatttacttcttttccgaaaaaagtgaataaattgatcaaacaacggttatgtcagagaacgcaaaacacagattcattgcaaattcaataattttttctgtttggataaataatttatttaatttggtctttaatttgggaggacaaaaatttaatttcaaatgacttaaacaaacaaataaaaccaacttggtcggaaatgtgcggcgcacactgtcgaagcataacagcacaaagtagacgaccatataagtgccgaacgagatcaagcagagccagtagttgtttttcgcaaattccattaggggcggatggacgaacggaacggcgcacatcagagagacaaccccgaacttaacttgggttcatatagcgaaataaacaataagggaagggaccgaccattacaccaatgacgaggaacactttgcggacaaaagcggcacgggtgatcggttcgctgaatccgtgctcatctatgggcatgtcatcctcggcactgctcagattcgtgtgcacaaatccggcacgaatgctctcctctttgaagccgagttcatttttggacgttccttccccgataatgttcagttccatggccccatcatgcagctcctgtttctgctccttttgctgtccgaagtatgccattggtcgtttgttataaatgaatttacttaaatgaaaagagaaaaattagaaaaacaacgaaaatgggaaaatgctccgtggtatttcaattggaattttgtaaaaattaaaagagaaaatgaatttgggatgtaagggacttgaactttggaccaaaaaattgtaaaagcttggcattttttatctcggcactttatttcatttgacaaaagttaaacaattttcttaataacatacggcaaaatcttggttaggtttaatgaataatataagtgatcggttgccagttgaatgtgacaaaaactaatttccaccgctttaaataggcacaacaaaggccaaatgaaaccaaataggagttgttacacaaaagaatatgattgttgtaatcattttgttgacaatttgttcattttggttttagcttcgaccatcgttaaaattattacatttttcttcacaggaaacgatttatttttgccatcaaattgtgcgcaaaagcactggtttagacctgttcactcatttcattttttccccgtcccaaatttgcgcaaaagcactggtttttgctgtctttacatttaattttggccgtcacaaaattgcaaaaaattatttttcattttacgcaaaaaataatgcaaacaatatgtgatagaaatataaaaaatcatataaaattaaatagatatatttttaattttcattttttaaaatgctacctaaatccatgatgccattttattatgaaatggctaactccgattttcttaatgatttcggcgtaatttttttacattttttgaatcttttcttctttcttgcttaactttttattttatcttattaagtttttcaataattatttttctttttctctgttctttctttcttttttctttaatattttcttcgtctttttctgcccattttctccaaatatttcatcaaatgattttatttcaattttttcttttctgagccaatttttatttgtttggatggacaaacaccaaattaaaatcttgcagcgtaatccaatctattactattcatgaaaaatcagagctttcaattgaaaatttcaaaattgcaaaagcatgttttaacagatgttgttgaccaaaaacgaccagcgaaaaacaaacggagcggcaaaaccctcgtcccgtcaaaccaatgccccagggcaaaagtgacaggggcagcgaaccgccaccccgccagcgcaaacagaaaaataacgaaaaaaattgttataaaattttaaaaaccgggctttttataatattaaatattaaatcattgcatcgcccaacgcactgaaacagcaaatttagtagcaaatgcattaaaaattataaaatccaaccattaaaatttggattggtgggtattcaatttaagttaaaaatttattttctgaaaattcttgtaaaagccttaccaaaagtggccacatttcgcgaagtgattgtgttcaaaaaaaagcggcattaaacaaaaaaccgggcggaataattttgaaaaggcattatgcttatgttgaaaataattctgacaattaatggcctaaattaaaatatttaataattaaatttattttaaaatttattattttatggaaaattaatgtgtcaattgtcattaaataaagaaagaattcagaactttgagctaattgctttgaaaattgatataacaattagttaagattaaatttatcaatttgagaattaattcactttgtctgtttctgtcaatgttggcattcgcttttctaattttgttcacttctccatctgaatcggaaattggaattcctaggatttcaattgatttaatgagaaatgaggcgaaaacaaatcattgaaaattgattagcctagcaggtggccagccgaaaaaatgttttttcaaaattttttagctttttaggctctcaaattaaaatctagaaaataggcagtaataacttgaaaagtagcttaaattagatgaaataaaagcagtagggatgctcgaaaaatcattacaaaacttagcaaaattttgattttattcggctacaggagcggtatcgagtatcggagtcaaaaaacgatatcgaaagcgcttcgaatatgattaagacattcttaggaataaaccacaagataagaacgccacttgtttcacatataaattattgtgggcaaacaaagattttggcgctgttctaacaaaattatttgaataaaaaaaaagaaatttgaaattaaaataaatttacaattcccacttctttctgtagcattttaacacttttttttgtcattgtcaactttggcactgccgaattaatgaattttaggcgccaactttaactgtttggcaattaaatattgctatttttgaaatttgtttttaaccaaagcattagaatggagaaattatttgatcgtttatggcgagttttttcgtcacattttcaatgaaaattgctactttgtaaggatgattaataaagaatttccgtaaatgcgatcactgttggaaactgacagaatttcacttaattcggtagtactttatgggtgctttttccgaattttaattgtcaaaaaaaacttttgggtttatttaacgtttgagaaaatttgatcttcgattgctgatcgtaggcgtagtgttaattcttcaaaattgtaaaaaagtgatttaaaaagcaaaataaaaattaaaaaattaaataatgtataaattctatttaatagatgatcagtagggcttcttttttaggcacaaaaaatcgcgaaataggcacctaaaataggcagaaaaaatcgcaaaataggcattaataggcacaaaaatcctcgaataggcactaaaataggcaacaattttttttttattaacgctttgtaggtattaaaacaagtaaaaattaatttaaaaaatattttgcttatatttcaattgttttaaagttgttttcgataaaaataattttttaaaccaaaattttatgaagaaaaaatgattaatttttggggaagaatttttgtgaattttttttaaaattcttaggggtgtattttctgaaattttttcaggtcgattcttaggtgtgttttttcatttttattgcatttttgagaaggatttttccgaaaatcccgaaaaggcgccaaaaatggcgaaataggcacaaaaataggcaaataggcattaagcacaaaaagtgcaaaataggcaaaaataggcattataaaagtcatcgtagacaccccaaaccaagcggaaaatgcttttttcgtgcttatctaagcgtattaggtgcgcagaaaaaagaagccctaatgatcagtccctgtaatatacctaatgaaataaatttgaaataaaaaaggttcaaagcgttcaattatgccattcgccgttcacttaagtgccgatggaccaaaacaatgtggcggtgcaacggaagtcgctgagtcggctcgaatttggggacatttttgtaaatgacagagaagcgatatatcttttgatgtaccgtatttcctaaatgccctttaaatcaaatataatttacttagaatttatggaattggtaccattttattggatttttgggtcctaaataatattatctcataaaatgattttatcatgcaacttcaaaattgattaattcaatgattgtccatgttctgaatacaggatttatttaatatttggccattttccatttttaacaaaacaaaatcaaactatcatattttgttaagaaaagatatttatgcctttaatcgccaattacctggctcgtatttttattttattttttcatttctttttgccagataaaacaataaaaaaatataaagttgggagtttaattttatctgtactgcttggtcttattgtattagtttttgttaaaataaaaaataatttgtttgctcacaatttgcaaccggcaaaaaagaaaaaaaagacctgatcaaaataaatggtcaattttgaagtaattataaaagcattttatgtaataaaatgattaaaaaaaactataaaattaaaataattttacaattcccacttctttctccagcactttcactgttttttgtcattgtcaactttgacactactgaattattgaatttttacgccactttaactcttaggcaattaaatcttgccttttttgatgttttgtttaataaatgataactttggtttttgtaaaatcatcagtagggctgctaattttatgtaaatactttaaatactattcagaaaaattttttcataaatattccattaaataaatctctaaaaaatccccccgtcttcatttattatcggaaaaatcaaaatttaatttccccattagtaaatttgcttcgactaattcccatttttttttgcaatttttaaatttaactctggcttttgacgaatatttccacattttacccgccagcgaaaaacgaacggagcggcaaaaccctcgccccgtcaaaccaatgccccagggaaaaagtgaaaggggcagcgaaccgccgccccgccagcgcaaaaagaaaaatcacgaaaaaatgttataatattttaaaaactgggttttatgatattaaatattaaatcattgcatcgcccaatgcactgaaacagcaaatttagtagcaaatgcataaaaaattacaaaattcaaccattaaaatttggattggtgggggtattcaatttaagttaaaaatttattttctgtaaattcttggaaaagcaaaaaagtttttgagaacttggggggaggaggtccagcggttccgataggcgccgccgtagaaaattttgaatatttaagggtgatttgttaacagattttcaccaaaaaatgacaaattttttgcgattttttgtcaatttgttaagaaaaaatgtgagttattttttggaagggcgatgtgcggtgccattggtgctaaaatttgaaattttgctcttttttaaacagattttcactgaaaattttcgatttttcggttaaatttagcaaaaattaatgattgttatgacaaaatgctaaaaatttgatttttttacataaaatgtacattttttacactcatacgcaaaaataccggtttccaattacatggaaatgaatacagttaaaattttctaagcacaaagccgaaatccgagtacgtacttggcatccaagtacgaatccgagccctgttataacacgtggtgagtcgaagtgcaaaaagtccgaatgagtgatgatcagaagaggcgggtcatttcagtaccgaataatattttaattaattaataacctgaaaaactatcttatagttcatttaaaaacttgaaataattcatgcttgcataacttttggtgctgatcaaaaaagtctcttacaccaacttgatcagatcactccttcctagtgaccgggacacccaaaatacactgaaaatcggggaattttcgaaatccctagggggcttgaaaattttttctagagaaaatggacaagctcactggaaagagcacaaaattctctactgatttgacttttgaataatggggctacgacttcttcataaaaagatatacttggttgaaaatttgatcaccataaaaatgatcaatttttgatcagcgtcataattttttctagaagcattcaaattaagcattcttggtatcatttgatagccctaagtgtcctctccaggaccccggcacatgcgacaaaaacattggggtgcttttaaatggtacatatatgaattttatcctttttctgtcaacactatccttggcctgttggttgtgctctggatttggctcttgggttcgggtcccccttatatgttgccgaattaattgaattaaaacaaaaaccctgggggtgttttaaataacaaatatataacatttgtccttttctgacaaaactatccttggtctgttggttgtactctgggtttggctcttgggttcggatcccctaacttctgggtgaattaatcggattaaatcctctcatgggtttggacccccgcccttgggaccaaaaccatgggtggtctggacataaaaattctggtacaaaatggatattttttttggggcggaaaccgtttttgagtagatttagactagaaaaaaatgtgaaaatatttgaaatcatcgtttcccacgtccctttctcccagggggtattatttatgtaaagtcatttgttttccccaataaactgtttcaaacctccatttttacgcaccagtgaatagttatgttttatgtgaattctagaaccgtatttgagtagattatactatgaaaaaattgaagaaattttgaaatcatgatttcccactcctcttctcccaggaggtattattttgctaaagtcttatttttcaaaataaacgttttcaaccccatttttcgcaccgtgaatgttatttttattgaattctgaaccggtttgagtagattagactagaaaaaattgaaaattttgaaatcatgtttcccac

SEQ ID NO: 68 - DNA, 5109 bp, Heterodera glycines
atactactatagataaaaaaaaactagaaaaatgggcattagaaaagtcatcattgaaatcactaccaagtggaaaagcattttatatgctttgcctaagaaaatttggatattttttagaaagaaaagcattatttaatataaataatggcaaaaattttatggtcatttcattatattaaggaaaaaggttggcattccaaaataactgcttaaaatatgccaaagttgcttcatattatacacaccgtttcaaaaaacgagatgtgtaccaataaatagagagtgccagagaaaaacattatctttttttctctaattttttgtcttcttttggcgtactatctaatatttttgttattaggaaaaacaacattcacttcgaacagcataacttttttttcctcaggcagaatttcttttaattttgcatatcgatagagaaaaaaatactgcatctgtctatagtgaattcatttttgtctatggtcaaactcaaaagttacaagtttggaacacccatatcttttttctgattcatcaaattgcttagcatttgcttagaaaaagcttctcctgatcaggaactttcgaatgataccatgattgtccaatttggttggcaaaaagcttcaaaaataattcccaaaattcgtcattttttaatattttggacaaaaataaataaaaatattcatgttgcacaacggactcgaaccaccaccctttgtccctttactatcttacaaaaaccactgagccacacatgcaaatctttttggaactgggaggccaaaattgaaacggtgtgtatatggactttttcgcaaaatgaatttcatgtggattaaatttatattttattttggcaaaaatgttttgtaaattattatttatcatatatggcaaaacatttccgctgtcaacatatgtacattcctactttcaattgagttttttctaagaattattttctttaagaaatgcacatgttattcatataattatactatcagtttcaacttccgtttatttatttgtacattaatattttagataataacataaattgaaccaagcaaaaataaattaaaatttattttttggataaaaggttttgcttaatttcttattatcggatatgaataataaagttcaagagtcttggtcttgtaccaaatttttggccttgactatgagggtgaaggttttcgaaaaaatcagctcataactaaatttgcactattggttttattcactgcgggcgatgaacaacgaatgaaaaagttcgcgagggtagaattaggaacccaacccttgcgcatctttgtcatttccttccttgatcggtcagcggcgcacattttgctttcggcttcttaaccatatgttcataatgaaaaaagaatgtggaaacttttacccgtcaccgaagatgcacaaaaatccggataaatttcgggtaatgcccattacaagggtcgtcgcaacaaaaatgtgttcttccgttgaaatttcgtatttttttccacccataatcacctaataaaatataatttgccacccaaattcaatgaaaacatgcctgaatgtagatggtcaagtaaaatataaagagcaaagccacgacagatgagtaaaaaatgtgccggaaaagggtggcaatgatcggtttgagaaaaaacgggaaaaacatacaacggttgaccgtagccgaaggaagaccaaaggataagcagaaggccgagtatcattaacaccatagtgatgataaacacaaagccgagcaaactgaaagaacggtccacccattaaatgtaaaatccacgaaatgacgaggtttttgagtaaagggaaattgatgaacagagctgggacttatttagaaataaaatttattaagctttaaaaagttgggtttactgtgttcatttctttgttgtcagtagagcccagaaatttcaaatttgcggatctcgcatagggattgaagctcaaaattttttgcgggacggtatcccgcgggattaatcccacaaatccagtaatcccgcatttaacttcatgacatgaaaaagccaaacaccaaaaagggcaggaaaatgcaatgaataaaacacctgctagtaatatcgcgtttcgtgaccattgttaacagtgcgatcccaacacatgaaacggtagtgatccccatggccaccaaaacggacacggacgaacagaaagcggttatgacctaaattattccaaatgaaattagtttgtgaacaaaaatcatcgcacttaccatggcgagaaaaccaatggacaatgtgaggatggcagtgaaaatcaaactgagatgcaaatggtggaaaaccgacgaaaacaaacaaataaaaccaacttggtcggaaatgtgcggcgcacactgtcgaagcataacagcacaaagtagacgaccatataagtgccgaacgagatcaagcagagccagtagttgtttttcgcaaattccattaggggcggatggacgaacggaacggcgcacatcagagagacaaccccgaacttaacttgggttcatatagcgaaataaacaataagggaagggaccgaccattacaccaatgacgaggaacactttgcggacaaaagcggcacgggtgatcggttcgctgaatccgtgctcatctatgggcatgtcatcctcggcactgctcagattcgtgtgcacaaatccggcacgaatgctctcctctttgaagccgagttcatttttggacgttccttccccgataatgttcagttccatggccccatcatgcagctcctgtttctgctccttttgctgtccgaagtatgccattggtcgtttgttataaatgaatttacttaaatgaaaagagaaaaattagaaaaacaacgaaaatgggaaaatgctccgtggtatttcaataggaattttgtaaaaattaaaagagaaaatgaatttgggatgtaagggacttgaactttggaccaaaaaattgtaaaagcttgacattttttatctcggcactttatttcatttgacaaaagttaaacaattttcttaataacatacggcaaaatcttggttaggtttaatgaataatataagtgatcggttgccagttgaatgtgacaaaaactaatttccaccgctttaaataggcacaacaaaggccaaatgaaaccaaataggagttgttacacaaaagaatatgattgttgtaatcattttgttgacaatttgttcattttggttttttcttcgaccatcgttaaaattattacatttttcttcacaggaaacgatttatttttgccatcaaattgtgcgcaaaagcactggtttagacctgttcactcatttcattttttccccgtcccaaatttgcgcaaaagcactggtttttgctgtctttacatttaattttggccgtcacaaaattgcaaaaaattatttttcattttacgcaaaaaataatgcaaacaatatgtgatagaaatataaaaaatcatataaaattaaatagatatatttttaattttcattttttaaaatgctacctaaatccatgatgccattttattatgaaatggctaactccgattttcttaatgatttcggcgtaatttttttacattttttgaatcttttcttctttcttgcttaactttttattttatcttattaagtttttcaatgattatttttctttttctctgttctttctttcttttttctttaatattttattcgtctttttctgcccattttctccaaatatttcatcaaatgattttatttcaattttttcttttctgagccaatttttatttgtttggatggacaaacaccaaattaaaatcttgcagcgtaatccaatctattactattcatgaaaaattagagctttcaattgaaaatttcaaaattgcaaaagcatgttttaacagatgttgttgaccaaaaacgaccagcgaaaaacaaacggagcggcaaaaccctcgtcccggcaaaccaatgccccagggcaaaagtgacaggggcagcgaaccgccaccccgccagcgcaaacagaaaaataacgaaaaaaattgttataaaattttaaaaaccgggctttttataatattaaatattaaatcattgcatcgcccaacgcactgaaacagcaaatttagtagcaaatgcattaaaaattacaaaattcaaccattaaaatttggattggtgggtattcaatttaagttaaaaatttattttctgaaaattcttgtaaaagccttaccaaaagtggccacatttcgcgaagtgattgtgttcaaaaaaaagcggcattaaacaaaaaaccgggcggaataattttgaaaaggcattatgcttatgttgaaaataattctgacaattaatggcctaaattaaaatatttaataattaaatttattttaaaatttattattttatggaaaattaatgtgtcaattgtcattaaataaagaaagaattcagaactttgagctaattgctttgaaaattgatataacaattagttaagattaaatttatcaatttgagaattaattcactttgtctgtttctgtcaatgttggcattcgctttctaattgtaaggatgattaataaagaatttccgtaggaattcctaggatttcaattgatttaatgagaaatgaggcgaaaacaaatcattgaaaattgattagcctagcaggtggccagccaaaaaaatgttttttcaaaattttttagctttttaggctctcaaattaaaagctagaaaataggcactaataacttgaaaagtagcttaaactagatgaaataaaagcagtagggatgctcgaaaaatcattacaaaacttagcaaaattttgattttattcggctacaggagcggtatcgagtatcggagtcaaaaatcgatatagcgcttcgaatatgattaagacattcttaggaataaaccacaagataagaacgccacttgtttcacatataaattattgtgggcaaacaaagattttgtcgctgttctaacaaaattattgaataaaaaaaaagaaattgaaattaaaataa

SEQ ID NO: 69 - DNA, 24040 bp, Heterodera glycines
  unsure (1)..(24040): unsure at all n locations
aaaanaatttcagatcgctaaatccgaagatttttgcgctntaggccaaaaatctttttttcttttgcgtcaaaaatgataaatttttgctcttttgtggtctaattttcaaaatatgctaaattagggcttcggtggttcaaataggcgccgctgaggaaaattttttttttgaaatttattgaataatctaagaaaatgtgaaaaagtatcaaaaatttgtccatttttttacaaaacattattttatttgtaaagcacagattttaaaatattgaaaaaaagccaaaaatatttaattatatttacggatagatattggtgttcaaacaaatccggtctctattcatgaggatgataaaattcagaaaattgcctacactcattaatccacgaacaatcctagccaaatacatgctcagtttttcataccatcccattaccgtatccgactttacaaaaacaataactgtatgattgacgcatacgagacacaaataaacattatttgtaaataaaatttcctttttaatctttattgtgcaaactaaaaatttattaataaaaaaattcatttttttcgtttttcttttgcaattttcttaattctgcacaaattgttgtaaaaaaaaaattggcatcaacgagcgccacaaccgccaccacatccggcaccgccacaaccagctgcgccaataccgtagccaacaattgcggcaccgtacaaagctgcattgtgttcatccctttcacgggaacggtctctaccagcagtgccatgatgataatgactatcattaccattttgaccaccaaaacagccaaacagaccaccttttttgtggctaatggaacggttatcggcaacgcttttgtcgctggtggcaccaacactttcattggcattttgttctaaaaagattcaattgaaatttaatatcagaaaattatatagacatgatttgcttataaatgagataattaaataaatttttgttattcggcccccaaaatgttacctcaataatagtttaggtggcagcctaccccggccccccgtttactgagaagtcaaaaacagttttccaagaaatgaccaagaaatgaattttttaggggcttaagggtcggagagtccgaatctgaatgcgaatgcgaaaatttgaattttccactttttgtttgaatccgggttcggtgttcgacatagatcaaaacgtgtccagactattgcgccacggacatttgcgcccaagacatttgcgcctatgccaaaaattgaatttcaattaagttttttcaattttagaggtcgtaacagcaggcgcaaatgtgtgttaacaatatcaaaaagaatgaaagttcggattctccgacccttcaacataaattaactttttctcaaaaaactttcagtttttcgaaaaatgaggggggctgccatctaaactattaccgttagctgtatttttaagtaattttatgaattagcctttaattttttttttacatttttttaactttgttactttgctcggatgtaaattgcgtttcggcaattgaatgtagcattaactgttcttttgtgttccgtaaattcattaatgcattttctttggattgagcatctccactttcaagttgagaagcccattctttcacctgttaaattattaaaaagacaactgccattcggaattttaaaaatttaaatttagcaatttaaaaaaaatttcagtattttaaatgggtaaaaaaaagattatttcaaaaaattatttactatataaattcgagacgcgcatataaaaaatgaattttgaataatttaatttaagtcagagccgagttaaaaagagaaacttctttttggcgacatattttataaatttagtaccaatcaaaagcattaagatttgttaaactatttctaaacgattaagcaaatcacaaaaagtttaaagcttgaatactgtgcaaaaggttataattttaacttttaactattttgcatctatgccaatcattctgagttttgattagctaaacgcttgtcaagaagttttgactgataccaagtttaatggatttgatcaagaaatcaaaaacaatgattcttaagtttttcttacagacaatgaatgattagtgatgcccaaatttaccttattgcactcgtcactacatagggagactacttcaattatcgattgattggcttcgcagctttttttctctagctttttttttctcttgcctatatgtagtctctaaccgcaattaatttttatttatttttgaaatattttttaaatttaaatattttgattatttttatttattttttaaatttaaattttattaaattaaaagaaaaattcaaaaactgtggaatcgaacctttggttcaggccgaagccttaaccactcggccatgtagcactggggaaaaaggaagttaaatttgtttatgtttgttacccgataaacggtgagaattgaatgaaaggaaatagtatgtctttcatagaaaaaaaggatggatggaaaagcggccattatttttgtaacattctttattttcagcaaataaatttttatttttaaataattttattcgcaactaaaaaaatgttttttgttcgatggaggcggagtgtctccctgtccaaacaattttcttctgctgctaaagcattcgcacatttcacttttaaaattgcaggtgttaaccccataaatttcatttcttattcaatttaagtttttattttttatagaaaaaatgatcccagggcagcaaaatgttggcaccccattccaatacactaatccaaattgtcaaaacggtggtcagcagtttcaggcaatttattttgttttattttacttaagtaaaaccaaaaatttgtgtatttaaatttctttaattttatttagccaatgatcccgaccgcacttgggattcaccccatgtcttcagtgatccatggcactccttcagcgggcacatttcagccaactttttcaacagtgccacaggcaattcaaattcattaattaaaaaaattctttaaaaagtcagatttaattattcaaatgggtatttagcattttgtttctcatccttttgggatgggtcaattgaatggcgcctatcaaatgcccgggggttaccaaaactcatcgtctgcttcacaggcaataaattattcaagtcttttttctttaaatacataatttttaaattatttagcaaattgttgtacctccgagtcaaatgcctccgaatcaaatgcctcccccttatcaaaacgcctctcttgtgcatcaacaacatcaggcatttgaataatttttatttaaatttattatcttttgtttgttaatagtttgtgtccccagcaactaaccaaatgccgggaaatttccaaaatgcctctttcgctcaggcaatcaaataatataaatctaaccaatttttattagtctatttagctttttattccgtcagctcaagtctcgaataatttaccacacgctcaacacaataaccaatcatttgcacaggtttaaaaatcagattttaatgatattatcaaatctattataacatggattatttttgagttttaaaattaaaaaaataaaaataaagtttttctgcatttaaaaaaaatgatattgagatgcgaaaaatactttatttggtgctatattaattgagaaatttttaaagaagcgataaaaaaaatatcttgctaaagttgttgatctttgaacaaaaaaaaaattgtataattttaaaattctttagaagtttaagtcatttttagtcaaatttacttattaatgtttttatggaattttcgggattttttttgtaattacagaatctacggcaaatcaaaaaattaaagaaattttcagttggcgccggcattgcgtgccaacaacaatcaaatgatcacacatgccatggttggcccacaaaatgccgataattcgcagaatttgcaggcaaataattcaaaaaaaattgtttttataaaacatttattttttttgtttcttttagcccacgaattggtcaaatcatttgcctggtacccaacaaaatgtcgggccccatctttcaaacaatttccaatcacaacaacaacaaaattgccagaatcttcaggtagtgtattcttttttcaaatttaaattatcaaatacactttgtttttattaaaacatttttttgtttctttcagcccacgaatttgtcaaatttgcctggcatccatcaaaatgtcgggactcatctttcaaccaatttccaaccacaacaacaacaaaattgccagaatcttgaggcaaataatttcaaaattttcacaatttttgtttgaatttcaattttttcagcaatctcgccaattatcagaacaaatggtagtcccaggacttagcgaaaatggcacgacttcgtttgattttatggttaaatcggtctccaatttcaatcagattttaccgtaagaaatttacaaaaaattcagttctattaatttttttgtaggccaatacaattattcgtttcctctttggatttccgtgaggctcaattaacaccgaatggtccaatgcgtgtttgtaatgctatcctaatcaacggggagggaaagaccgttgaggtctcagcttggcgcttacaagcggatgtgttagcatcagccatgagaggctatttgtacattttcgtaaactgccgtgccaaaccaccgcgagaacggaccaattgctggttcagactgaacattgatgccatgagttcatacatggtacaggtccaggttcgagcgttgagcgtagcaaaaaaaaaatacgagattattttagccacatattgcagtgccacaaaatacaattgctcccgctcaaagccaaccgttcggttcaattatgcctaatgaaccgccggttaaacctttcttcagatttttaaattaaagtctattttcacccccagagatcacaaattgtcaattccggggcaaatttagtggctattcaaagccaacaaaatgaaaattccgtgcctatcacgcaatctgccccggtaaaaagtgttgtatttcagacaatttgatttttgaatttaatttatttcagtctaatcccttagctcatgatcaaattttggtgcccagtggggcgaactcgcatcacactgatgagatagtggaggtgttttttatacaaataataataataataataataataataataataatggcttttaagaccattttggattaaaaacttttttttaatttttaaataacaaaatattcttgacttttcattttttttattgaaaatatattcaaaaaaagtaattccttatgaagttgttttgaaatatagaaaataaatgtatttaaatgtatattagtggaaaaaaatcgttaatgttttttcaaggtcgaacgcaacgaatcagcgggacagggaaatcgccaacagcaactgagacgttcgaatgttgatcacggacgtttgcgacatggcggggacgacccgactgaatcagtgcgaaatgtacgcgtctaagaaaatgcttttttcttatattttttcatttaaatttgccattttttaatttacgaatttttttgttaccatatttaaaattcaaaaacgttctttatgttaaaaaaaatttggggaatcctaagtggctatttttagcatccctaccgaagacctgccagggcgcaggagcctgttcttgacgagagacccagcacgtcagggggtactgggttaactcgtcctgagcggcagtcccgccaatcggttcgtccttcagttgacctaactttgtcatctatagtggaacccccgcctcctcccggcccttacccgcttagtaaaattaagcgtttacccacttgtcaaattaaccaatcgcatattaacgagggtattgagtgctcaatttgtggggaactttttgttatggatagtattgtctctgctctacaatgcacccatctttatcatctcaattgtattaaaaaatggctcaaaatatctggttcttgcccattatgtaaaatctctctcgattaattttttattttcttttcaattatgtttcactcttcatataatggattactttgtgtgcctttcaaaatttatgatctttatttattttttgaattactttatttatttaatttcaattaagatttaggatgtcgccttcataatctttaaaattttatgctctttacctatttttgaattatttttttgttatttttaatttcaattaaatttgatgtacgtctttattattttgaattatcaattaaatctttaaactattttattcaattatttttttaaatcatataattgtccatttgatttattatgttattatgatgctatgtcatattttggtgcattaattaattgatgataaatactgctggtaatttaacaattaaaaaattacctatgattaatatttgagtaaaaaaaacggattatttagttagtaatttaaatgtttaattggacttaaattaatttagttaaaggtcttttggtaacatattttgcaataaaagttgaaaattcggtaattccttgtagtcctatgttaatcttttattaaacattttaaaataattcttttataatattttgttttgtaaagccttttggaaaatttattatgttattatgatcctatgttatgttttgtgaattaattatttgactgctggtaatttaacaattaaaaaattacctatgattaatatttgagtaaaaaaacggattaattagctagtaatttaaatgtttaattggacttaaattgatttaattaaaagttttttggtaacatattttgcaataaaagttgaaaattcggtaatttccttgtagtcctatgttaatctttattaaaacatttaaaaaataattttacggtttttaatctattaaagtttttgtttcttgtataattatattaaaatgcttttattttacttattttttaaatttatttttttaaataaaagataataaatttgtttgcgttattgttgtaccatatttattaattaacaagaaaattaattttatttaattatcataaatttataatttgtataattttatgtaacgagctaaaaactatgtgcttatttgccaattattatttttttcatctctataatcaatgcacttgcgttaataatgatgatgaatatgttaagtaattgtcgagaaatttattaatttttttattgttattgttaaattatctaaaatttatgaaatgaatgacaaacttggtttaatctttaaaaagtggatcatgttgattatagttaagtattaaaaaaaaaaaagtaaatttaaacaaatttggttcttaaattcatatttgaattttttcaatatttttgaatgcttttttttgaattaaatgtcaaaaatgaataataaatctttcttaacatgtacacttttgctaaaaaaaaaaaaaaatgtttattacttattattattagcaaagttcccaaaataaatcagctttttttaattttttttttttttgctgtttaattttgaaattatgattgtttaaaaaattttcgtcttacgtgttgtgttaaaacataattatttaaaaatctggtatgaacaaagttttggatttcatagttttttttaataaatttttcttgaaagtttaattttttttttcattaaagatggcgcgtcaaaatctaaacgaatgctttgtccttgaaagaacgacaccaatgagaaatgttatgcgcaacacgaggggagaaatttgtgaattgcgatttatgccgcttgaggaagcgcaccgtcccgatctcgtacttgaagcactcatccagcatttgcttgatagagttctagctggccatcctcgtccactcatggtcggattacaacttcatccgccaggattcgacagaccatatgtcatccgactccgtccaccggaacaaaataatgcagcggcgctcgcagctgccattgaacggctcaatgagcagtccgcggccgggattgatctactttctggcacaacgatcacaaaagtgctcgctgtgtggccactcgatcccattcgtggcgatccgcagagaggcggtttttaaacaaattttattctaaagattaataaattataattaggagcatgtgatctaaacgatgaacatcatgtgtcgcacaacgtacaatccatcgtgcgcgtagagaatccagacgaccgtctttgtctagcacgtgccgtgctaatagggcttcgagaccgtgaaaccaggatgccaaatggaggtggccgtgacgcactccgtgcgtacgttagacatcaaaatcaacatggacctgaagcggtggctttgctgaggcgctctggaattccacaccacaaggacatgtacacgctgcaggacgttgggcaactgcaacggtggttgaacaatgcttatggcattgggcagattcggctcgttgtatttgagaaagagcatgaataccggatcgtgttcaagggagaggggtaagccttggttattaaaagtataaaattttcttgtccaaagaagtgcggcacaattcaatctgtgtctcttattggagcgaggccacttcaattatattggccgtattgagcaaatttttgacgtgccaaactactgcattgattgtgagcgcagagctgacgcgcgttatcattcgtcagggtgcaaaattgtgtgccgtctttgtttgcgatttggacctggttttccatgcaaaacagaaaatgtgaaattgtttttaaaatttaacaataaaatatatatttcagcttccaaacggcgtgacgagcgcgagacaatgcgcagagtgtctcttcatttttccgaacgacgactgtttcaactatcatctcgtcaatcgtggtcctgatcaaattgatggacgtggtaatcaacaacggatgccaatttgtcagtggcgtgaagtatgccgtttatgtggacgtgtctcctatattggaaagcatcgctgtcctcaagttcaacttggtgatgtttgtcgacactgcagaggccaacacaacgctgatctaccatgttttatccagccactcatggatagacctcaaccaatcaacatcatcgacgatcaagaggcgcatgacaatgaccttgtcattgatgatgatgaaaatgacgacgaattgccgcttcgtttgtgcttcttcgatgccgagacttcgcaggaacggccgctgcaattgaacaaccaagtggctcagaagcacgtcccattgctcatcgtcgcagaagtcatctgtgatccgtgcattaaggccggaatcagtgtcaatgacggtttcgaaagaagagcgcctggttgtgtttgtctatgtggaagagtgagggggcagcaaatgcgtcagtggtcttctccgccgtttgcaaacgcacatggagacaacacaccaactccagatggggcgccgaccttcaatcaacggcgcttctatttccattcttttgacaacggagaagctgaagaccctgtggagcaattcttggtttttttgatgaaccatgggtcaaggaaggcgcacactgtatgcattgcgcataacggcgggaagtatgattttcatctcgtactcgaggctctccatcgccgaagttacccgcctaaacggctctgcaccactggactaaaaatttattcaatgaagctttgtggccggaatcaacgccgcattacgttcaaggattccattaattacttcttctgtgagcttgatggactcgtgaaaagtttcgatctaccagctcacttggcaacgacaaagccatttttcccgtatctgtatatccaacggcaaaatctggttaatcgtctccaaggacttccgggtatagaattttattcaccgaatacaatgaaggaggagaagcgacagaaatttttgcgatggcacgccgataacaatgagggagcccaattccaattacgagaacagctcattatgtattgcgtaaacgacgtggcaattctacgggagtctgttctacgctttcgacaactcatcggagaacacacacagggattggatccctttttggtgtcgacaacggctgctgggttagctctggccacactccgtcgctgttttttgccgccgaatcggcttgtgcactcgccagagggtggatatctacgtggacgacgggcctctgccgaatcgagacgttacatccgcttctttgagatggaacaccccggagctcaagtgcagtgcgcggattggtcggtgggcgaagcacatgtggatgattccggataccgactcgacggactttggcgtcgagacccaccccttcgtccacttgccatcgaatggatgggatgctattaccacggtagttggttgttgtctgtttggtagaaaatagaaattataagggtgcccaaagtgtttcccgaaccggtggcagaagcttgccgcggggcgaaccgctgaggacttgttcgagaggacgacgcgaaggctttgggagttggaacatcagcatggattcgaactacacgtcgtctggggctgtgcgtggaaggagcagctccgccacgatccggcgctgaagcaaaggttcgagcaagtgttcgtcccatacccactggatccacggagcgatgggttgcgcggaggacggacggagcccttcaagctccaccatgtgtgcgcagatgacgaggagatcatctgcatcgatattgtcagcttatatccatatgtcatggtgaatttctctttaatgctcttctcaatttcgtttttcacttttagaaggtgaatcccttccccgtggggaacccgcaagtcatcacgcgcgaagtgctcctccaacccccgactgttccactcccttggaattgtgcggaaaacaacaccttccgtggtttgctgctgattcgggtcctccctccgcgacacatccgtgtgccattgctgggctaccgcaccaaagatggccgcttcacctttcctctttgcgcttggtgtgctgaccgccgacaacaaaggccatgtcagcacggagacgacaagcgttcgtgggtgtgcgcgtacacccacgatgagctgaacaaagctctggggctcggatacatcgtcactgacctctttgaggtaaatttaagatttaaatttgtttttttagctaaagaatcaaataggtctgggactacgaggagtgggacaacacgctcttcagctcctacatgaacacctttgtggggctgaaggtgcaggcgagtgggtggccggaggggtgtgagacggatgagcagcgccgagcgtttgtggatgacttcatgcacacggagggcatcgccatcgacccgaccaaaatggcattcaatccgggacttcgactcatcgccaagaccttggcgaactctctttggtaattatttttattttttcttttaaaaataactttaattaaaaggggaaagatggcacagcgcgtcggctacactgagatcaaatacacgcgcactccagcggagtttcacaagctcctggaggacccgacctacgacaaaatggactttgtccatgtctctgacaacatggaccgagtcgtcgtcaggaagcgccccgagtttggcaaggccccggcaaccaactgcctcccagtggccatttacgtcacatcgtacgcccggctccacttgtacaactacatggagcaggttctggccctgggcaatgctgagctcctctactgtggtaatttttcaaatttgtaattaaattacgtaataaaatttagatacggactccatctactacgtcaacaagattggagcaccgttcgtccaggagggggaagcattagggcaaatgaagcgtgagcttgtggaccgccgaattgtggaattcattgccggaggaccgaaaaactacggcatccggcacactgccagagacggaactgatgaacgtgcgaacatcaaaattaggagttttcgattgtcgtacgccactcaacaattgctaaattttgctgctgtgaaggaactgacgttggctacgtataatatcgacggacccatgtgagttgcattatatttgtaaaaatgaaaaaaataaaaatcaagtgatgatgttttggacaacgaagacttgtatgtctatggaggcgctgaacaccgcgccatccccatcagctttcctcaaattggtcgcaatgtttacgccgacctctacactcacgaggctcgcaaggattatcggccctactacgccaaagggcgcgtgcgtcccgggatgcaaacccgcccctttggctatgtagaggaggaagcccgactcattcgccaaacacaaatggtgcaccaacaactgccacccgcatcttctccaccacaaccgaggcccgaacgaagaaagaggcggctaattgagcccgatcccacccaggctggccattctgggtggttttcataaattgtgattttcaattgatatgaattttataaattttaacgaaaatagtttggaataatatttgacaaaaatttaaacgcatcactcaattcttcaatattcttggcgccggtgacaatcacttttcccgatatgtaaattaaacaagtagttccattttccattttacatcgtaaggccggaaaaattgatgggtcgtaaatgccacccaaagttgtcaaaagtctttcgactctaattcgttgagcaaaagttttcacaccaacaatgttgaccacccgcagctgatgaattttcaatgtgttgttttgagtgtgttgtattcttcttaaaatttttcgagcaaagtaattggctctgtctgggtgggaaacaccggtgaggacaacccgagctgattgaaaaataagagctgcgacagttttggcagaagtgcgaacacgcatgataatggcatgaaaacggcgagggttatactcagtatttattccacgttgagcaattgttaaaaactgttcaggagtaaacggacgaacatttattttaaaaacagcagtacaattagatatggaaatcatctaaataataatagacaaaacttcaattggaaaaaatgttttgtgatctccgcctccaaattctacaacacatggcaagttgggatgacgcaatctgatcccatgtttgatgtagtaatgcattctcacctaaatatttccaaataaataaaaattttgcatcaaattaccgtgattccgaggtaccctcggtaagctggagccgagtgggcatccagaatcgagagatcattgcatcgaacggggaagttccggattgtgggtcgaaggtgggaggttcgcaattgagcagagcgcaaatgttcaacaattttgcggcgctttgtcaaatccttgaagagcacgtgcaattcgttggcggagcattcaaattttttgcacaagtggtccacaagagggattgggcgttggcgatgctcattgcaagaacacttttttggcgtgtctaaacttgcattttttttttaataagaaaatttattcaaacttgttattggctcctctccaattgccccgagtggttctctcttttcctcctcgtcaatgaggctaatccaactcgggtcctcttttggcggttctttgtcctgctccatttctgggtacgcattgttcagccaatcagtagcaagaattaagtccatttttaaatgaatctaaattcaaaatttatatattatatatatatcataattaattagagtaaatattaaaaatggagcaaaaatttgatcatggagaattacaatttcgtcatccattcacaatgatcgtgtcggggagcacagggagtggcaagtcagagtggataatccgtcttttacaaaatttagagaaaatgatttcatttaaaattgaaagagctatatattgttatggggaactgaatcgaaatgttttaaatatacagcgcaatgggaaaattggcaatgtgccagtcactgttcacaatggtattatgtcagaagagcaaattagagccatggcgaaaaaagaaaaattgcttttaatattagatgatttgctagtgaatttgagtagtcgatatttagattctctatttacacgcgggtcacacaattggggcatgagtgtaattttggtaacgcagaatttatttaataaagaattgcgtgtcgcacgtggaaattctcattatttggttttgttaaggaatccggcaggtgcccttcagattaggacattagctacacatttattcccttctaagaccgcccactttatggaatcatatcgagacgcgtgttcaaaaaattttggatatctcttggtagatatgcacccggagagccaagaaatattaagattaagaacaaatatatatgataaaaacgttgttgtttacgttccaaaatgagagtatcccaattaattcaaaataatttaaaatttttagaaaatataggcaactcaaaaaaggtaagtgaggacatagaaagagccactgatgaacaaatattatgccttgttgaaatctgtctcaatattttaaaaggaagagttcctttaaaatacaaacatttgaagaaattaaaatcaaatgcacaattaatacgttgcctttcacgcactcgttcttcacaatcagcgaaaaaaatattattacaaaaaggggatgggcttccggctatagcaggactaattgcaaacattgctttaccatttatttcaaattttattgaaaaattataaatataagataggatttaaattgtaacaaaagaaaatgcaacatacaagacgttatttactagttcctgaggaaatttacgagagcctaatatcgtccccacaggatggatcaccaattggattggttcgctcaagaattaagcaaataaaaaatgataatgaaataaatgaggagcagagggcctttaaatatgaacaggaatttaaacggttcaataagctgaaaaatgacgaggaggaacgcccagttgatgttaaaatacaaaatttgcaggaagtggcagaaacttttccaaaaccttttaatctaataagaaaatctgctataccacgacgacataacctaaaacttggtaaaagaagaaaggattatgttgacgacgacgaagaagtctttgacgatgtcaagataccgaataaagatgatattttgaatttcatttacaaaaactctcaagccctgggaatctctgaacaagggcaaatacttaaggcagacggacgcccgtttataacaagtaacgttgaagatattgttgatcatttgacaaaaaaggatagaagtgccaataagaaagatcctacggcactcaaagaatttgtagcgagagcaaaacaaaacgcagtgttgagtaggcgtctcttttctgatggtcaaactggtaagggaatttataaaaagacaatgttaaaattcaaaccatcgttatggagatgaaaaaacaatgtttgttagagtttttatacaaagacctaaattcacccgtttcattcacaagcgttgaacccttgcttagagaagctaaaaaatatgaaacaaaaattagtcgttcagacattctaaaatttttattaacccagcgcacttatacacttcatagacaagctaagcgccgttttcggcgtttgccaactctcgccccaggtttacatattgaatggcaagcagatttggcaatttttgaccgtctttcaaagtataatcgtggactcaagtacttgttagtttgcattgactccttaagtagacaaatatttgttgagccaattaagtcaaagacaagtaaaaatatgattaaggcatttgaccagatattcaaaagaactaaatatattccatggaaaattttgactgatcaaggaaaagaattcacagcacgacctatacaggaatattatcgttcaaaagacgtagaacatttttgtatgctcacttctcctcaatttcatgctggcatggctgaacgtgccaacagaagtataaaagaacgattgtatcgttacttcactgagcgaaatacttacaaatggattgacgtaattcaagatatcgtaaagggtataaatcattccatgaactcaaccattggaatgagacctgtagacgtaacctttgcaaatgctgaagaattgagaaaaaaactatacaatgaagcagctaaaaaccctagaggaaatcccaaatttcatgttggagatcgggtccgaattgaaaaacacaaacacgtgttccaaaaaggttatttgccccggttcaccaatgaaatatttactattgcggaagtacattctgagagatcacctattgtttacaaaataagcgacgataataatgaaattattaagggatggttttatgcaaatgatttatgtagaatttttgaaaatgataataaattgtatgacattgaaagaattttgtcaaaaaagaaaagaaaaggtgttgaacatgcgttggtaaaatggaaggggtatagtccccaatttaatagctgggttccattaagttcaattactgtgaaaaatatataaaaactcttaaaaaactttttttttttaataaaatgccttctaattcgttttatattgtactcccatcaaatacaaatgttgaagggaacagaaccaattcttttcggacacgtataccacgaaaactacaattcaacacggaatgggaagtaggcctcgctgtaattgtttatccccattcttggccttcaatcggtactgcacaacaacaatttgttgaaattgagtggcagacaggaaaagcgttacgcattgaagttccaccatcaaatgtcacaaacccctacgaactaagcaagaatttgtacaaattattgggcgagggaagtgatcacttggcaaaacaactgagaactacgcaaaatgctttcctacttgtgataaataaggctaggcggtgggcaagagaagaatatattaaaagaaaggtgaaggagaatagaagtattcatgatgaagaaaaacttctacacgcgctgcttattgacagtgaatcatttatcgagttgaaagacgtggatcggggtcttattgctgaagagaaacatgctgaaacaagtaaagtaccgctgagaatttcgaccgatgataaagattcttatcagaagaaattgaacgaatacttttcaggtttaagtgaacgagatttgaaccttattgatgattttatcaaagcaaaagtgaaatcagagattaaaaaaatgacagaagacgaacgtatgatccttgaggcctcaaaggaagtgggaatgggagcatggcttcaagcttatcgtagaatatggcttgcctgtcaattcacctatgacaataatagaaatcgttttgatttaaattttgatacgcgttacgtaaagaaagtaaaaatcacagcgcaacttgcctatattctggggtttgacaacacagaatttttggaaccagaaaacgaggcaagattcatgccggacatgaacggaggagtttcttcatttaacgtatacgcacctaatctcattgaaccaatgatgattggagacgtaaccgctcctgttttacgaattgtaacaattcgaggaaaacccgatgaggtaattgaggaacaatttttagcgatacaataccataaaattttgctaaaagaaatttcggagatttttattgaaattcgtactaatagcggaagtctcatgccgttccaatatggaacatgtacattaactttgcattttcgaaaaaagtcctatttttaaatgaataccttagaaattaataaaattctatcaacaaattcattgaccaaaaatcatttccttggctgttttgcagctgatcaaatacccagtggggcaataataaaatttccacactgcatggtattcaatattgatccaataacctcaaaggggtcccactgggtgtgtgtttactgcacttcaccgttacacattgaatattatgattctttgggaatttggccaccaccaagtttttacatagcaaattatttaactcgctatgaacaaatacgttatagcacaatcccacttcaatctttaaattcaaatacgtgtggccgacatgttatattctttttgttcaacaggtgtttgggttcagcttttgaaaaaattgtaaatcttttacattttacaaaaacaactcctgatacaattgtgaattcttttatgaggaaattaataataatataaatagttgaaaaactttcaaattttaaaaatgcatgttgattttgatccccttcaagtggattggtccacattttctcaagaattgcacgttcaatatggtggttataacatctttcgcggagttccttatcaaagaggggcaggtgttggttcagtgtttagaagtctcatgcgatttcttttacctattggaaaacaaattggttcatcaattgcacggcagggactagaaagcggaaatcgagtgttaacaaatgtattgggaggtaaagatctaaaggagtcactcgtaaatgagggtaaaacggggcttaaaactctcctggaaaaggcagcaaataatattgaaaaacaaaaaggacaggggtttgattttaaacgttataaaaatgaaccaacacaaaaagttgggaaaaccaggcgaaaaaatataaataaactccaatctccagttgggccaccattggttgccaaaaccaaaaataaacgtatgcgtgttgactttttaggaacatattaaataaatgagttgcccgcaaaagattagtgaaagcagtcctcttgccataaacagtggtctgaatattttctcagttcctccaaccaacgtctctgtaattcgttcattttttcgtgagatacttcctcttgcgtcaataactcaagaatctccctatctttttcgtttatacagtgataatttatggactgatttatcacgaatttatctgtatcttgaaatctcaattgaaaagcacgacgctaatggtaaatggacatcaatagaagataccgacacaaatatagcacccattcaaggaattggacaaacctttgttcaacaactaaaagttacggtgggaaacactgaagtttacgatagtggaaatttgtttccctttaaatcttatataacaaatgaattgagctatccaacaagcgttaaagaacattttctcgggtccatgggatattatcatacggaagcacatgatgattcaacagataagggatttaaagaacgttgtaatgttttaaagggaggaaaacatgcgcaattcctctcacgtctcgattttgatttaggaaatcaagagctctatctgctaaataatttagatttacttttcacaatttacaaggccaaagactcgtttttacttcaaaccttaaaagcaaacgacaataacaaatatcgtttagcagttcatgatgtaaaaatttatgccaaaatgattgaggttcagccttctcttaatatgagtctttacaaaactcttgaaaaacagccggctacatattcagtacgtaaaactgaaataaaatcttcattcatcagtgttggccgttacgagtttgaatacaacgtcttcagctcaacaattcctcgacgcgtgacaatagctttagttggcaattcagctttcaatggagattacaaattaagcccatttaaattcgaaccatttgacttacgcgaaatttcagtacacactggagggatggtataccctgccgtcccttataaattagattttcccaagaattacttcgttagagcatttgtcgacatgtatgaagcattaagtatggcaaattcagagcgaacttttgatattaagatgagtcaattccaaaatgggtgggcattttttgttatcccgttgaattcgaccctggatgatagttgcgggtttgaactattgagaagtggaaccacaagcatacgtgccacgtttaattccccaatcccaaaaggaggcgttgaaatgattgtcatgggagaatttgatcaaatgatcatgattgattacaaccgtcacattgtttccgattcaaaactcgggtaaaatttataaataaaagcactacattcattcgcaaaaatgaataatacaacaaaaccctccatacaaatattatattcaatcgaagaacccaaagaaaccctattacatattttattattatctcattatttaattgcatttccaattatttttctttgttggcttataataattaagtttctcaaaaaacgtggtcatctatccacaagcgaggccgaaataatgttggaagaaatgaaaagtatacctaaacaacagccaatattttacaaaacaaagtagggtaggttttggttaagcagataaagtccttgtttaagcttaagtctacctttttggttcaaatccgtccaaccacatttattaactttttattttttgaagttacaataaaagcaaatttacttcctttctcaccagtgctacatggccgagtggttaaggcttcggcctgaaccaaaggttcgattccacagtttttgaatttttcttttaatttaataaaatttaaatttaaaaaataaataaaaataatcaaaatatttaaatatttaaaaaatatttcaaaaataaataaaaattaattgcggttagagactacatataggcaagagaaaaaaaaagctagagaaaaaaagctgcgaagccaatcaatcgataattgaagtagtctccctatgtagttccatcgaaatgctccaaatgccaattaattacacgtcttttttgaattccgaacctttgcagctgaaaatagtgggaaaaatgactacacaaatgaacactcggaaatgataattaaattaaaaaaaaaaaaaaaaattttcccgaaaaggtttcggtgggatattttttggccaaaaatgggtcaattttttgtgtggcagtcagttaatcagtgcaagggacacaaacggcagcgatttctttgccaaatcgtgcgatattttgcacaaaattcaacaaaggctgccaaaatcaaagcgaaaatttttaatcgaaatgattgacgcgtaagtgagaaagaaataataatagcacaagacttaaattgttacgaattgaatttctgaaatcgcttcatataaatcatacggcgaaagggcactgataacggagttgggcgaggagtcgttcgatgagcgattgtacgggcggcgatctgtgctttatgcgagcgattccgagaagatgagtgccatcagcgagttggcacagccgcgcgtcggatttcacaaaagtgccattgctatttaaaatatcatttacctttcgtttattttcttaattccctctccttttttcgttgccattcacttgggattgaagccgaccaattttatgtatgtgaaggatgatggcaatttggtgctgaaactgatcgacttcgaagatgcccaattctttttgacgtcgtccgaccacaaaatttgatatttggtcaattggaaaaattgcctttgaaattgtcattgataactgcgtttggaggagaaaaggcaccaatgaatggggtaagcatggacaaatgtatcatcagataatacgggagcaaatcccggatcattcccagattcttagtatcattcgatagctcgaacaagtgttcattattagcttgctaaattaagaaattccatcaaaattccttacgtaaggtattccaattgtcgaacaaatgcccagataaagaataagccagataaattttgggtgttggtcaattctttggcactgacttttcttagcttttggtggacgaattttcattgaataaacacacagaagaacaaaatttttttgtttgtttttttaagatggagcgaaggacaatgctttgcaatatcggcaatttgttcttcggatttaagcgaatcgcttctgtgattatcccggcaatattaaagaagtgccgcttttgtactcggaagacccaaattgggtgtggcaaaacggcgacaccattcacgcggtgctgcgactttggctcaaatttccaaagatggcacttttgattacggttaaaaaaagcatcattaattattcaaattagccaaaaatttttttttttaattttaagaatttgttggactttcgacaagaaaacatttgattgactgcttgagggttttggactttatcaacggcttatgctttcatgaagagctgaaaaccgtcagatactccaaaaaactacgcattttcaatcggttaaattttggcgaattcaaaaatattttagaaaaaattaagaaaaaattaattgcttaaacaaaattcacaaaattcatttcatttatttttaattgattttaattaaggaaaattgtcgagcaaaaacatattaatgacatattcacttaaactcaattgaattaaagcgccacttatttttattaattcaaaaaatatctaattgaaatgaagaaattcccatcagttgagaaattaaataatgaaaagaaaaatgaaatgattcagttaatctgtgcagaggataaaaataaacgataaaatgagcttaaatgaaatcgctaaaatttaaatggctattaagttttaattggataaagaaatgattgttttgttgttcgttaaccttgaagattcaatttgatttttaataaaataaaaaagaaatcctttttaaatttttgatcattgatcatttatttggactgttttttcccattttctcaatttcaataaatcactcctcctccgttctgctgctgctttttctgctgttcatctccatttttttgttccccatctttgtcctgtcctgtcattgtctttctataagttctgtacatttccctctcgtcttcttcggcatttctttgtgccatcgattgcccttcatgcgaattatgtgccggcaacgtgccgctttcggcatggccaagcagccaaaaagtctccatgacgccctttccctgaatgcatttactcgtaaaatttctcattagtcatcggtaattaacagtttatcggtctgatcgaccttaatgatcacttcgcctctgctctccaaaagataaccgttgaaatttgtgctcaacaaagtgtgcgtcgctttggagatgtgaattttgttagcttaaatggcccaatgagaatatttgacaaacaaaactgacggcttgaagagctttccattcgcgaggcggtgtttaccgtatcaccaaacagacagtagcggggcatggccaggccttttattaaatcgtcagctgtttttataccattttcatagaatataccgacaactcccgcaacgcatgggccgctgtgcagcccaattcggagacggacgcgctcatttggaaggtcgggaattcggaaagtgtgaaacgctttcaaaaagtccaatgacctgagcaaattgatgactattaacaattaattcaattagtaattgctgctcacatatccgcgcactctttggcgtgcaaattgccatttcgctttggcagtcctgacacgcacaaatagccatcgcctgtaattaaggggaattaaaccaaataatttttggtgtgttttctcaccgatggactccactttgtacacgtcatgctcgccaatgatggcgtccagcgtagtgtacagttcgttcatcagattaaccacctgcagcggccgcatttggttggacagtgccgcgaattggacaatgtccgagaagaatacggtgactgtatcgaactgctcgggctccacggtttggcctatcttcagacggtccgcaatttgccttgaatgttttaaagcaaacaattgccttttttttttttgtttttt

SEQ ID NO: 70 - DNA, 1312 bp, Heterodera glycines
atcaaattgatgctctgaccggcgttcatttgccgcaacctttgacgcactttttcaatggttagccgttcgtttgggacttccgtccaacagtcgcggatcagatgaatctgatgagtttgtacaggtaattgatttaattaccgaaaacccaacccttttctatgcacatgattcattttcttgttttagcatttagtcatttccttaattgtctttaattaccaattccgggtgcaaattgtccaacgcgggccgtatcatcggtctcaatggcaccaatccgccccgcttcaccaaataggcaatttcgtccgcgttgcgtccgagcgttgcgcctgcggtgtgccgcgtcgcggtgcttctgctccgccccatctcttccaagtcgcgcgccgcgccgaagtcctcctccgagtcgcggccctcctcccaacacggggccatgttcaccatcggaaatggcaaataaatgtgcaaatttagacaatgagttaatgtccattttgtgtacttccgtgaaaattaatgccattgtgtaaatgtccgactgttttgagcccacggccacatttatttcggcaccgtccgtcgcttttcgcaattgttcgggagacagccataaaagatctataaaagaattaattaattgattaattattgtaaatttttcaccttttgcttgcattttttgtggacttttcagccatcggagcccaaagtatgagattttcacttgccatcgttcgttgatcaaacaagcggaggatttcagccgaccatggaattggaggggcgaattgtgcaagaactgaaggccctggaaagggggaaaaaacgcttttttacttttataattttgaaattaataattttaattttcgtgagttccttggaataaaaccaattttaaattaagaaattgccaatttatttaattaccctcaataacaaaataaatccatctctcacttcgcaaagctccttgacggccgattggatgaacatcacatctttgaccatggcattttcggacaagatcacatctctgattgacccgcgcatgcaaaagttggggattcggtatcccccccccctccgccaattcaccgctcggcactcggccatttctgcgacagacaatggcgcggcggctgtcgttgacccaaacgtgcaaacaatgcacttgtccccgttgtaagtatacagagagaagtttttggactgggccaaactgtccatcgtcgaattggtcagcgcggaaacgttcgtttggttggagcggagagagtggtgaaaccgctctgcgcca

SEQ ID NO: 71 - DNA, 11379 bp, Heterodera glycines
aaaaataactctgggacttttatttgcatattttgggtttttctgcatatttgatgcatactttgccattttttgtatatatttaagattttttgcatattttgccatttttcgtcaaatattttccgatttgaatatcccttagtaaaaaaattttattatgcctaaaattaaatccaaattaattaatttgcatccctaattttcaaatttttttgcaattttttttttctaaaataatgaaatttgtggttttggatacgctaatttaaaaaatttgaaaaagtgggttcggaaatgccgacaagtggtgtcatttaaattttggaatataatttaattgtttaggaaattcttccaaacccgcactcattccctccctcgtgtgccattctcccctccttcttttatagccctctccgtttgctgtgaaaaatgcctaattcggcgccgaattcccattgcggcgttgagcatcagcacgggctaacaaatggggcaaaaaaggaaattaaaaatacaaacaaagaaatggcaaaatcaaattgttatgctttggctcccatggggtggagggaaatgaaaaattttcaagaaaaaatgtgcaaatttttttttttaatttaaaaaaaaattcttaacaaattgcattaaaatttccaaaaaaaaaagtttcccggcggcggaacctccatcttatcaaggggaaaaattttacacaaagagtaaaaaaacttccgaaatatttctggcatacgggccaaaatttattttttgcacaaaaatgggttatattggcgcgggttcgaattccattgggtgtgtgtgtggtcgtgcagagagacactaagaaaaattctcgttccatttctctttttgtatgctttctttgccgccgtctctcttacaaattagtgtactctctttctgcggaggaaaaaacgcagcgaaaagcgcccttttctttcctttaattttttactacataattttaaatattattttaaatctgatacatacatatttttcgcgccttccctagaaaaggcgcagttccaaaaattagcacttttattgttccatggggaacggttaatcaacggaagtgggaaaatattcgtgaatttaaaatactaatttatgatgggttataaatgaggtagggcagagaaaaatacttttatatttctcttttaatttctccttttgtatgtcttcttttccctcaccgtctctttcactttctcttttttctctctttctttaaaatagaggaagagagtgaggcgcgatggaagagaaagggcaaagaatatagacaaaagagaaatagcatagggaaagacagtgcagagagaagaatttagtgtgagtttttctatgccgctctctctccttttaaaacccatcataaatattctcttccatttgcctgttttttctgcctccccgcttgctgtactccgtgcaggggggcgaacgaattttgtacgccttgcgcgtgcaatttttggacgccctccggggttttaaattttcaaaatgaggctttttgtggttttttgagaaattttgatgctttttgaggtttttggggaaaattcgtcagattttttaaattttgattagttggcataatgtttttggccatttttgtggacaaatctgttaataaattgcattaataattacaaaatttttcccggctgcgcctatcggcaccgccggacccctccccaaaagttttttagtaaaagcgccgcaaaaaaacgattttttacgctcatcagaatttcataaaatgcttatttcaaataaaaaattgctcaaatttatcatggacaatcaaaaatatatcatttgaaaattttaagcgtgttttgaataaactttataaaaatgaggctttttgacacaaaatgaggttttttgcttgccaaatgaggcttttttgatctgggaaccctgtgattgcatttgttttaacgaattgccattctttcaaagacgtgaaaagttttcaaaaatgtctttctttctatccaaactataaatttaagtcctaaattttttgcgccttcccaagagaaagtgcagtccaaaaattaaggttttacccttgaacacatcgaccccacttgtgggtcagtaaagcagccgaaatgggcaaacatttgagaaaataaaaacaaaattatgatgggtctaaactgagggaagagaagagaaaacattcatttattttctcttttattcctccttttctatgtcttcttttccctcatctgtctcttgagtttattttttttctttttctctcttttctaaagaatggaggaagagaatgaggcgcgagggaagagaaaggacaaagaaaataagcgaagagaaataacacagggaaagagagttcaaagggagggagagaatgatgcgtttttctctatctttctctctctgtttttccaacccatcataaatagcctattccattaggctgttccctctccttttccttcgtttctttagccttgcgctcgggcaatacagcgagcaatgaggcctagccgagctgctgttattgctgattgaaaacttttaccaattacccgccttggcctgcgaaagcggtgccgtgtgcaatttttggacgccctccggggcttaatttcatttggcatcctaataaaataaaagccacttgtcaaagccaaaaaaccatttaaaatacattttcaaatgccagatacttccttcggctctattgcactttgtgagtccttttttttttgtaagtccgttcagagtgtataagtccaagctatttccaattaattaaatcaaattttgaatccaattacatttttgaattcccatggaatcgacggaatcagctaagtgggtgcagagttagttccgtgcaaatgtcgtaaatcatttttaagtgccctctattcgcctctcttccttatgtatgcgcacgtgcagcaggaataaaccggaaatgtttttgcaaattgaatcaaacccgttcaatttcaaaaagtgcgaatacaaaaatttgtttgaatgggcgcataagtccctccgtcgctttttcttacctaaatttcccagccctaattatagccaataattaaaaaaaattaaaatgcttgtaatcagaataatctacagaaaacttttgtctcacattgtgccaaacccagtgtgtatggttctgcgacaaatattcctacggttttggtgataccgtaggaattggcgtcaataatgctaattgatttttatgtttaaataatcaaaatcccgtaactttttcacagatacttctgattttatggttgatccatcttttgctgatggctcattttatccattcgttactttgtttgactctggtgacaaaattgaggcgaattttgggcccaatttcaaattcgatttggcaattctctgaaggaagaattaattattcactaatgttttcgatcaatttgctctttttaatcatttttgtgtctttcttcttcaattaaaatttggttttttgtattaatcggaaaattttgtcttttcccaggtgtttaagacttaaaaaacgaaaatttgcaacaaataaaacacattttttccaattatctgctaaaattcataatgttatttaaaaactcgaagaaagctaattaacatggtaaattgattccggagttgagcttaacgacttcgtaattagttggtatgatgatggaaatttccacccggtcaaacattatttgaatgaaatgggaatgatgttctgtattttgttaattgaaaattataaattgtatagtttaaatatgtttctgcgcatgaagaaatgtgctaaaaatagcattcctactttaaaattttgatttggtgagttttgtagtccatataaatccatatttagcgtttttagtccatataaatccatatttagcgtttttagtccagataaatccatacatccctgcttgatagtgcctattaacctgcaaagtttcaaaaaatgagctgagaaacaaaaaagttatggccaaaaaacctcaaaaaattgcattttcctggccattttggcgcagcgcgccatatcttttttaaaacccaatataattttttgaaattttgcaggctaataaagaacatttagacctattgattaatatcaacattattttatttggttgaattaaaaaaaagttatgaatctttaaacttgtctgcgccaaaatgaccccgaccccttagaaaatgcttacaaatatcttctaaacatatagagctttctaatgataaaaagtttgtttgatttggccaacaaagaaaaaagttatggcttcataaagttgtctcagacgcagttgaacccaaccgtgcctatgcaccaatttttcactgccaaatgacacgaaaattcctatttaagcttggcaaattgcattcttcgccccattccttcgatcattcattcagctcgtttcacttttcccttcaattcttaaatcgccatgcttttccaatattaatttttttttttctaataaatttgataacatccttccttccttttaagcctaaatgggtgaacaacgggatgaactcgtccaacgtgccaagctggcggagcaagccgaacgctacgacgacatggcaaaggcgatgaagaaggtggggggtggggggaaaagaggtcgctggcacggctaagcaaaatgtcattttttgtttttttttcagttggtcgaaatggacgccaagttggacgaagaagagcgcaatttgttgtccattgcatacagaaaggcggtcggtgctcgtcgaacatcacgacgtatcattacctcaacagaacagaggccgacactgacgaagaaacagaagcaaattgccaacgagttgaagaagaaggtggagcacgacatggaacagaagggcagcgaggcgttggtcggtggcattggcaaattgcgcactttggcaatctttcaaaaaatgaaatctccgtcattttgaacagtcaaaaggatggtcaaagtgttcagttagttcgtgtggcattttgttcgttcaccttaaaatgtttttgctgtttcaggacttgctggacaaaatcctcatcccgaaggttgacgagcccgtggcaaaagtgacctacttgcgaatgaaagccgacttccaccgctatatggctgagatcaaagaggccgaaaatgacggtaaaaagcgatcaaacccaaacggtttttggatttgtaaggtcatctcccactttttcagatccccagaaggcaaagcagtcgtacgaggaggcgtgggatattgcgcagcagaaaatacggccatcgcatccgattcgccttggagtggcgctcaattttgccgttttcctctacgaattcatgaaaatgccagaagagggtcgaaaattggctcaaaaggtggtggacgcagccgaacaaatcgcattttaaccaccaatttattaacatatcccaatttttgcaggctcatgacgacggaaatgctgatctgctggcggacacgagcggcgattcgtacttggagtccatcggaatcctcgagaagctggacgagaacatgcggatttgggcatcaacgcaagaacgggacggatcatcagaacgaggaaacttctaggatatgccgtcccatgtcacatatgtacaaatattgtaaagtaggcatttgtatcccatgtctgtatatattgtaataaagcggaagaatccctcctcatcacgttgatatgtaatgtaaatattcgttgtttggcggtgtgataaatgagaaagaaaattggtgtcattagagaagaccaaatgtaattataaaaagttaggtcagaaaaagacaattaaaaaaaaatgattctgaaataatttcattttattcgacaaaaactgatgggatttcgaaggtttctgtcgaaaatcaaaattttcgaatttcagatttttactctaaaaatggttaaaatgatctttttagaatttgaattttcagtgagctagtatttgttttgtcttttttaaattttaaagataaaaaatgataaatttgaaaaaatatttttggttttggtcaaattattcttattggaattgttggtgcgaggtcgaacctacatttgtttttgctggataattggtcgtaataatctgtaaacaataattctctctgctttttgctggcgaatccgaaaatgagagagctgaagtgttcattgttgtgggcgtaacccccgcaaaattcaaatgaatgttttgaacggataaaacatcaaaatgcgccaaaaaagcgcgcgcttttgcaaagtttcgaacggaatcccacgtagtgagaacaaaaaattggcgcaaaaaaagcgcgcgcttctggaaaatgccacgcagcaattgctttaggccccgcccatcctttttgggtgaataaaaggggccacaaatttacaatttttgccatttgctcattgcagatgtgccaggatgggtcccgcacccggcccaaaaacgaaggcgacgacggcacaacgacagcacgacgacgacgacaactcagcgacgcaacgaccacgacgacggctgcacagatatgacgacgacaggcgacggcacagcgacgacgacggcacaacgacgcggcgacacaagcgacaacgaaggcaaaactaccgacgacggcacacgacgacattttttccacctgcgcgacatgttcttctgcctctggtgttcttcaacaaatcgtccaccagcagccgccactcgtcgacatgttctccgcccaacgacatgctcagctcgtccaccgccattgtttttgttttttcgggcaaaccaagcccgttagccgtgaggcggcaacaagctcgggacagggtacgtgacactccctggctccgggtggtttgctttggtacacctatgaacggcatggcgggttgcgccgtgtatcagtaatttgtgcctcattgtgggccgatttttggcccctctggggcccgatcctggcgatgaaccggcggcactgaaatgtcccccgctctaaaagttgggaaattgtccagacttttggagcgggggctttttttggcccgtttctggcactgaactgtcccccgctccaaaagttgggaaattgtcccgacttttggagcgggggctttttttggcccgtttctggcactgaactgtcccccgctccaaaagttgggaaattttcccgacttttggagcggggggtttttttttggcccgtttctggcactgaactgtcccccgctccaaaagttgggaaattgtcccgacttttggagcgggggctttttttggcccgtttctggcactgaactgtcccccgctccaaaagttgggaaattttcccgacttttggagcgggggttttttttggccggtcgaagtttcgccacgaatcctcaattttacacacacataaaatacaatggaaatgtactaatttgtgagcaagcaaaggtcaaatacatacaaacaaaatatacacaatattgaaatgctaaattgccaacatattccgatcaccttctaatctaaatctatccattaatccttctgttgctgatcacttggtggagaaattttccgccgctttgtcctattggtggagacagcggcctaaatgaagtgcaaattgaatttgatgatgaataacagctattaattgggttctgagttgcatatatggaatataaagccgagaaatgtggccataattttttttaatgtttttaaaaatggatatttatactttcgtttttggctgaatgggaatcacaaaaaatcaaatgaaattttaaaaattgttcacccgtcgtcgaatccgccgtcactgatcaaaaagtgaatttgattcagtgggtcatcgatcaaaatggatctaagcttaagcttggctctaagtttaggcttaggctctaagcttagtttgctgcttttctcaacattcttttttgttcatttatcagtagaatctgctgatttcacctaattttttccactttttgctaggctaattttaaatccgtcgagaattgttttaattattttgctcaacaaaatgtcagacaaagcaaaagaagcggaggataagatggcaaaagcaatgtaaaattaaaatgccaatttcaattttaaattttgttttccttttttcttcagtttcgtctctgccgattgttggctcaaaagacattgttgctggattttatttataagatttgaaaaatgatcagaaagtgagtagtgattggacggcttattcatcatcgaccaatttgcgttttgtctatttttcttccaccgttaaatcaacggccaatgtcactttgtcctcgtcactgtcatacaaccctttgtccggatccataataaattcctgtgtttttacaaaaaaattagcaaagaaagtggtgtatcatgccaattcgtacaaaaggcaactcatacactgttgtacaaaggcaactctacatttttaggttaagcctaggctttaggcttaggcctaagcttaaggctaggccttagcttaggcttgctcgggcctaggcttaagcttaggctttatcttgtaaaactttattgatttttgtacgagttgcctttgtacaacagtgtacgattgttgccattgacccaaacaaagttgactggtgacacttaccatagaagtgaattttgggaagccccagctcttagctttgtaattgaaaattctgtcaaatttgtgagtaaaatccgccgttccgctcttttgtgaaacaattcgaagggttgccgaacattcgcagctccaacaaatgccatctttagcaatcaaaaactaatgaatgcaattagaaattctcatattttcaccatttttcgacggagggaagcacaaaagataaaagcccaaatttttgtcggtgccgtcttccttatccgttgttatttctgccgatattttccactcaaatcccttcatttgcacggcttcgctgttccgtctatttcccacttctttcgtaaattcagaaaatttctcaattttcatcgtcagtgtcccccagtttgcattggctatgatccaatcagaaactcgtccatgccattgaaattccaatggtttaagctccgtatttgcttcatctacagtgaaatcgatggccaatgttaatttgtcctcattttggttgaccaatgctttgctctgatccatcagttccttattaattaatgatcatttaatttttatttgggcatttatttatttgaattggcactcaccgtaaatgaaatgaaattgtcatatccccagctgttggatttgttgttaaaaaattggtcactgtattctcttcggtaatccgccatttgtgaaacaattcgaagaattgccgaacatttgcaactccaattttcgtcttaaaaactcaattaaatttatttgtcaaataaccaatgaacggatttttaggttttcacctattttttttttgcgaatagcatatgtgagataagcgcaaaaaaacacacatttttcgatcacttttcgatttagaagagcgactttttagcaactatttttgcttgtaaaattaaaaaaaaaaactattttttcaactattcatgcttttcaacaaaaaattattatgaaaaatgcaaaatcttcaaatatgtttgatttacaatttgtgcaaccgaaaaggacaaagatgaggaaattttggaaaattcacacatttattgacatgtttttccaatttttggcaacttttttagcaaatattttggcatttttcagttttttagcaactatttaggtacctatttcgcgttatttttagcacctaaaaatccattccctgcaaataacttttaattggcaccttttcttggcatatcgcaccataagtaaatgcccaaccatttctcattattgtcactgctttccttcctctgatttatttctgcccaaattttccatggcaatcctttgatttgtacagtttcactttgacgttcgctctcgaggatttccatcgcaaatcccgacactttttcaatgtccatcaaaagtgtccctgtcgctttgctttgatcccagatgaatttgtccatttttggctcatcaacagtcatgacatcaatggccaatgtcactttgtcctcgcatttggtgtaaaagcctttttccgggtccatcaattccttaattgtcccattaattgaatcatttaagggacactttaattgtcactcaccacaaaagaaatgaaattaggaaatccccggttggttgaattgttgtcaaaaacacggtcacaaagtgtcccaacagtggaattctcagcaccatttttttgattaataattcgaaaaattgctgatcgaacgcagcagcgccaatgcaaatcttaatggcaattaattatcgctaatgaattagcaataattggtagttaatttacaccttcttctggagcaccgcacgaaaggtaaatgcccaaccatttctcattgttaacgcttccattttttgttagaatttttgccattattttccatggcaatcctttgatgtgcacagtttcacttttacgatcacttccaaagacttctcgcgaaaattccgacgctttttcaatttccataaaaagtgtccctttcgatttgctttgatccaacatgaatttgtccatttttggttcatcaacagtcatgacatcaatgaccaatgtcactttgtcctcgcatttggtgtaaaagcctttttccgggtccatcaattccttaattagccataattattaattaaaattaattaaggaaacaattggcactcacctcaaagctaatgaaatttccaaatccccaactgtagttcatttgtttgttataatcacaaagtgtcccaatggaattctccgcttcgctcatttccgacacaattcgaaatgttgccgaaaaaacgcagtccaatgggttttctatcattgttaaaaaaatgattaattttaattttttaaattattatttaaattgttgtaccgtgttttgttcgctcataccataagaaaaatcccaaatatttcttctcatcagcagcagtgccttcccttatttctgctttaattttccatgccaatcctttgatgaatacggtatcactgaatcggtaacgccctacagactcttcagcaaattccgacactttttcaattccaacgccagtgtccctcttcccgtgcgcttggctgtgttccatcagaaattcgtccatggcttgggaatttcacgagtacagctcggg

SEQ ID NO: 72 - DNA, 3301 bp, Heterodera glycines
tgtccattaagatcgcaaaaaacaattatttcttgctaattattcgtcatgaagcgaaccacgcatcaaacatcactccacctcgcgcaaaacgttcaatggcacctgcactggacctggacccaaacactgttgcactcgcagagcaagaacgacaacgcactttggtgttcattggcctcccggaaagcaatgccattcgcccatcggaacgtgttcaggaagacagggaagccgccacaaaaatcctggaccatcttgaagttgaggcccaaccaaccgccgtctttcgactcggacgttacgacccgcagcgaacaacaccacgcccgctcaaggtgatcatgccaacaaccacacaccaacatatggcactcggaggatggaagcgcgagcgtgctcgactccgttctctacaaaacctgaaccgcctgttcgtccgcccagcgctgaccaaagaacaactcaaggaagaatatgaagcgcgcttccgaaaacgtcaacaaaaccctgctcccgtggcaccagcaatgcgacctcgccagacaaatgttccgactcccgtcaaagaaaatggaccaaaaccgaaggaggccagcgacgacatttccaaaccgccggaaatttttgaccaaacaatcctcgtatgttatgaagcattaaaatcattaccaccaaacgacaaaattgttcaccaaattcaatcactcgaaaaacaataccctcgtcttttcaataaatagttctgtcagacctccaaacatttcctcaaattaaaaaaaaaatacatttattccagtacttaaaatttctcaccaaaatttttcctcaaaaaaaaattttttttttctcttctacaaccctaaaaaaacaaacaaccacttttccatttgttggaggtctgacttttctaatttctgcttctccattcaaaatcaaaaatttggaatttaaaaaaattccttaccgtttgtttatttttgcggtattatgaatgaaaaattctgtttgacatctttatatacacataaaaaaaaaaaattttcaattttcgactttgtcgttttaagcaacaaaatttaaaaagaaaatcaacaataaaagcacgccaattcacacaaccgcggcacaatattatttaaggggctcaaatggatcaatatacggggtgggggaatcaaccgctccctgagtacctgaatttgcaataatgtctttcccccccccctgaaaataagtccccctttttgggttggtggctgttggacggaggctccgtgctgccggtgcttgcgctcgacctgcgcgatgacgacgtggtgttggacatgtgcgcgtcgccgggcggcaaaagtttgatgatccttcagacgggcaaatttggtcagttttttgttcataatgaattgaattattagtaatgcaacaccaaatattcatttagaatgcaaaggaaaggcaaatgaaaaaccccattttttttgagaaaaatgtaaattccttttgaaaaatttgttcccgaatgaacgaataggaatgacaactaaaaataagatttttttattttcaattgaagactattttaagattttcttgaattttgcataggctaataatttgaaccccttcaccgatttctcttttgttttgcaaagttttggcgttctgattcctaaataaaaaataaacttgtttgcgcttcgagcccaaaattatatgaattttttcagatcttttaatgcttaactcaaaaagttacagccttctgaaaaagtggtcctattctaatggaacaaccttttttcggtaaaaaattcataaaaaattcattttgactagtttcggaccccggacccgagttcgaaccaaagtcgaaaattcatttttcactaaaatccacctttattgagcaaaaacgattcaattagactgaaatgaataggaatggggattcatggccattccatgctttgaatcgtttttgggcaataaaggtggacttaggtgaaaaatgtattttcgacttttgttcgaattcgggtccggggttcgaaatggatattatattcgtgatcagcggccccgaatacccctggaaacacttttttatcattaaaaaaaacaaaaaaaaattttatgtggcctaaactgcataagtacccgctttttacccgaattcgaacaaaaagtcgaaaattcaaatttttcattttattttgttgttgttgttcttttgtccgtcactcattgtcagaagacgcccctttttcgctgctttgtcccgcttcttcttcttctgctgctggtggtggcggggacaatggcctaaataaagcacaatttgaataaaatcaaatgctttatatgtaaattgctcacacaatgcagctttggagatcggaaatggaaaagatgacagtgttcaaattgcccaaattttcgtcttcccactgaatcgactccgtcccctcaatttggcatcgcttcattagccattggcaaaccgacccatcgttggctgtcattgtcagcttttcgttggacatttcattcatccattcaaataaggcgctaaaacaaatcaaaacaaatgctactaaaaatatgtaccaaatggaagagatttttaatgcttaattaaatgataatttaaaaaacattttttttttaaattttcaataatttttattgatcaagtttcagaggaattttttttcgaaaaatttaaaattaggtaagcaaatattctatttcaatgtagtcggaaaacaaattttgaatttttcgaaaatttaaaaattgccaaaatgaaagggcaaaaaattaccgtactcagtgtaccgtgttgaatataaaaataaagtgagtacaatagaaaggatgccaattttgtataaaaaatatcaaaacgtattaaaatattcaatttaaaatttgaattttcaaatttgaatgaaatgggaatgatgttctgtattttgttaattgaaaattataaattgtatagtttaaatatgtttctgcgcatgaagaaatgtgctaaaaatagcattcctactttaaaattttgatttggtgagttttgtagtccatataaatccatatttagcgtttttagtccatataaatccatatttagcgtttttagtccagataaatccatacatccctgcttgatagtgcctattaacctgcaaagtttcaaaaaatgagctgagaaacaaaaaagttatggccaaaaaacctcaaaaaattgcattttcctggccattttggcgcagcgcgccatatctttttaaaa

SEQ ID NO: 73 - DNA, 9211 bp, Heterodera glycines
ataacccccaaaaaatggggtttttaaaatttttattctctttttttgtgggaccaataatttcttaaaaattgcacccgatttattactgtttaatagaaatgggtaacattttgcgaaataataaggattctcagttaaaattttataaaatacaacaattttttggcatggccaattgtttgttttggccccttaataataactcacattttttgtgccatttcaaaaaatgtgccgtgccgtgaaaaagagaattggaattgagctgaaagttggaaatgtgtaaagaatgaaaaatatgggtgaatttgtggacggacctcgaggaaagaaaagcaaaaattttcggcaacaaaattctgttgtaaaaaaaaaatttgtttttgagaaaatgaaatttttgatcaattatgatggcccataaggggtgagggggtcaataagcatgaaattaattttgctagtgaatataaaagctaaacttcaaaaaaggatggacaaaaaagctcaaaaattatcataaatttttatgaaattcgacggaattaattttaatgaaaattgataaaataaaaacatatatattattgaatcgatgttatgaataaataaaatcgaaaaatgcaagacacgttttttctcctcaaattgtggctgtttgatgtgtcaacaaatgtttttgtttactacattttgacaaatttttgtttaccatacaaaaattttttttctatgttttgccactgcgaaaacttcaaaaatgtaaaattgtttttgaattatttaataaatttgtcgaaatctttaaatttaatttactatttttaaaatcaatttgaaaggctggcagcagaaatgttgaaattaaacaaaaaaataaataaaatatacttcaaatttaaatagttttaatttaatatatacatacataaatatgccttttttattaaaaataattggaaaataaaaaaatgcaccaaaattagaaacattataattatttgctttcctcaatccaatcagtttcatcatcttttttcactttctttccactctaaagatagtaaatttattaaattaaattgctttaaaattttaataaaatgccattacattcaattcttatgccgaacaagcaattcattgtttcacatggcttctcatcaacagtttttgcttaatggatttaaatgttttacgataaaattgttcatatgtactgtatgtataattgtaaattgttcatactgtatgtgccaatcactttgtttactcggttttatgtgaggtgcagacaataaaggtatgaaatttgatgtcttaaaattagtaaaataggcaactcaactcgtacacaaaattttttatattttttaaaccaaaatttttaaaacaaaatttttcaacataaaaattatataggaattgcaaagaaattcaaatacatggcaagttataatattaagctaccacttattgatttttctatacatatttcgacaaatagcctttatttattgcttacatccacggatgcccaagccgaacaagtgttgttttaaggtagttgtcgtggttgtcggagtcgtcgtggtagtgggagttgtcgtcgtggttgtactggtcgaagtcgtcgtggtagtggttgttgtagttgtggttgtgggagttgtcgtagtttcctctgaactttccgtagtttcgtttgtcgccgaactgtccgtgtttccgtctgtcgccgaactgtccgtattttcgtctgtagtcgcggggattgtgaatgtgaatggggacatttgctacggaaaaaatttcttaaatattacaaaaaaaaattatcctcaaaaaagtaccgaaaatttccaaaacaaaaaaaaggatttattgtccttggattttaccaattttccatttaaaatcagcccgaatctgtccttgaaaattcatcttgaacaatgagggtaaaaacccaactctcctcctagcgaacgcgtgcttgctgttttttaaaatagtcataagtttcaacaaattgaatattcttggtaccatccgatagcttttaagattctctctgtacctaccaagtttttccaaaaattctatcgtttgaaaaaaaaagttttgggcaaaaaaaagatttttaggatttttttgtcgtatcttttttggaaagcaataaaattttatttttatttttttttaaatttgcagttagatagagagaagagatctttaagagctatcaaatgcggagtaggacaaaacgtcgtcagccgaaacgtcgtcgaacgaatttttcgaccataacttttttctttctcaaccaaattaaacattcttggtattattcgaaagcttttaaaaatgctattagcctgcaaattttcaaaaatttttatttatgcacaaaaaaatcagagcaaaaaaaagttcgaattactgggtttttgagttccaactggtcataacttttttgaaacttaaccaaaatttttgagattttgcaaattaataataaacacatagagctatcgaacaacaccaacaattcttaatttgattgacagtgaacaaagttatggttcaaaaagtcttccgacgacgtttcggccgacgacgttttggggtgcaccgtatcaaatgatactaagaatgtttaatttgactcaatttgacaaaagttatgaccattttttcccgaaaaacagtatactagttggcatactgtagacgaggttggttgtcgtccaacaatgagaggtaccatatttttttttgaattatgacagttttaaaccaagaatttttatgaagaaaaaaaatgttcagaaaactaaattttaggaatttttttcaattcttagggatgcattttctgaaatttttagatcatttcttaagggtgtattacttcgtttttatttcatttttggagttttcctttgtgtttatctgtgcgtatttgcagaattttttggaatttacccataaaaaacaaagccctaattataatatttcacttaaaaaattgatcgaataccatatttttatataaaaaatttttttttcgaatttttaccggttgagcaccaaaaagcaagtaggtattgcaattgtgtgcatcacatatgctacagttcacaccatagtccgattcattgaaagcgttattatgaaatgatgagcactgccttttcaaagtcgaatctctgcggtggaaatgaggggacccacgcgtttcggcgctcacatttcggcgctcgcgtttcagcgccagctcgtttttccactatagcatttttctttggcatataaatccaacaatcttggtatcagtcgaaagctcttccttcacatgctttattagccttaacaaaaagcaaaaagtttttcaaaacttagagaacttttattaataaaaaacttcaaaaatttcaacttttcacaattttcatgtatatttttgtaattatctaatcgcgaaacaatagcttagaaaaagcttctaaacatgttaagctttcgaatgatatcaacaattttggatttgggtgacaaagaaaaaagttatagtggaaaaacgagctggcgccgaaaagtgagcgccgaaatgggaacgcagtagacccgaaatgagagggcgagtcaattcagccccggaaacacagttccatcccgtaaggcttttaggtagtaattatgccgaatcaaaacacagacttttctctttctctacctgcagttgacccccgtccccccgtaccggttatcgttgctgcaataagattctgttgccgcgcagcctttgacgaatgcaaatggttgtccgacttaaaaaacacacacacacatgagatagagaaggagaagcttccccgaggggaaggctaatgaatcaattaaaggtgacgattaattaatctctaattggggagagcatggaggggagggtttgttgttcagctggtagaacattgggccggaaggccagagacgcgggttcaaagcttttcggcatttgctttttgttccctcgaaaattcttgagctcaactctgtgtcgcccagtaagaccaagccatatccgatttttacggcgtttttgttggatcgaaattctgatctaattcccaaaatggaaattaagaaaaataactatcccttcaactgagtaccgtattcacaaatcatggaatagcaccgtacaccctcgttgcacagattgaattcatcggcgctgcccttaatccatttgttgtggaagatttcatcaacgcattgtggtgctgaaaatacaaaaatgtaatgtatatattatagtatgtattagagctcgacttgctggatccagacctaggtttttcttggattcaggcccaggccattttcggcaacaattttttgtaaaaatccatgtccatgtcaaatatggaaaaaaactcaagtccaggttatgcatgaaaaaccctggatttcccggacaaaatttagaatttgttatccaaatgatcaatttttttattttacgtcatcaaaaaatgattatatagatttcatattgtcaatttaaatatttttaaatgtactactaagaaattaattgaattttccaagcatttatttgctttttaaaacaaatttcaaaaaaatccagctccatgcctgggtccaggccatgccatcaaaacacagcaaattataatcgtaccgtaagcaacatagaatatttgtgatgcgataattgagcagaagagcataaatgccatggaggatttcgttttgcttaaacaagctggatcagtttcgaatttataaattgggacctctatgtctgatttctcggaattttaatttaggtgcctgaaaatcactcggaaatcggaatttcgatgttcaatttcggaatattgaccaaaaaatcgaatttctcatgctaatccgaaataatgagtccgaatatctcaaccatccccactaaatatttttgcaaaaaataattttattggggaataaaaataatttagtaaaattattttaacagcggtaaaatgcatttacattattatattttacattccatttggtcaaaataaaataaattattcatataattttgcgttaatcttgtcgaaaacaaatcaatttgttaaatgaatcactcgcacattttcagccaattttttttgattaaatgcactcaaaaaataaaatgccgattctcaaatgaaagcaaaaaaatcaataaaatcaaatcaatcagaatgggattcgtcaaatcatttgattttacaaaacgaatttgccccatcctaccaattaaaaattgggacttttaaatcactttaaaaaaaatattttcaacatttatgacaacgaatggtggagcagacaaggcccaaaaaattgtttatcaccaagagaaaatttatttaaaaatgatttataacgatagggagcccaaaatatgcatttaaagtcaaaaaatatttatttattcgcaaagaaaataagctgtcagcagaagggcgaaactcacactttgacgactgtccaaaataaaattgattaccatagagtaaaatgacagaatatattatataccggtatatggatgatcacagtactagggctataaaaaatggaataaaaagctcataaagaatcagagagaatagaaagagcgacaaattaggtggtattgatgcaccacaataatctttaatagaattattaaaatattttttgattcaaaaatgcattttataagtccttacaattagtctatattaaaagtagagaccggacaagactctcggtcggtcttcggttaaaacccgaaaaacagaaaccgaaaaaccgaaaaactcaaaaaattctcggtcggttggtttcgttaaaaaaccgaaaaatttcagacagtatattgtgccaaaatattgctattaacaggttatatcgctccaattcgcgatccggttttttttttgatttttataaaagtcggtcgagtttcgtttttgattaattgaaaagtaatgtgcagggctgcaaaaaatatgcacgaaaaatgaccaaaatatgcaccgaaatatgcaaataaaattgccaaatatgcacaaaaaaacttgaaaattaggcgtgcaaaataattaaaaattttattcctcataaatgttatcggttgttttgtaattgcaaatcaaaattttctcaaggttttcggcagtgaagctcactgttgacccactcgcgcatccattcagatttggatttgtttaataaataatttttttccctaaggaatattcaaataggaaaacatttaagaaaaatggcaaaatatgcatgaaatatgtagaaaaaccaaaatatgcaaataaaagtagcgatttttatatgcaagcccaaaaaacaaagtgtttttcctactatttatagcatggagaagctaggaaagaaaatatgcatttgcatatttttgcagccctggtaatgtgatataaaaattttaaacaaaaatcatgatcatgatcatggtcttggctgaagatgaaaggtcaaaatcagcaatggctgatcaaatctcagaatttggggtcaaaaattcataattatctaaatatttatgtatttttcaaagctctcacaaacctttgctgttagcgtgttctctaccagtaactccgttggaattgatcacatctcttctctgttattgctgcccagccgtctgaaatgatcattgtgcctggctcgatgttttcagcaatcaatggcaaaagcgtagcggcatcacgatttgtgacagggaaaaaccgaactttattcgtgcctctctcaagcatcccgaacacccaattttactgtcgttgcaccattctgcctctgttatacttagccctgtaattgggtgctaatatcaaagaaaatatactcgcttttttaccgaaaaaactttgattcgtcaatttcaaccacgcggcccatcccgcccaaattctcatttgcttgcattcgaaccgcccaagactagtaaattagtaacatgcatatagttagacaccattccccatcatacttggcaaagatctctcataaagttgtaaaaatcgacgattgtcgcaatcgatccaatttcattttctctcattataacttccaaattgcttgttggatgttgtgcccaccattaagccaggcgaagcacttgtttgagtgatatgtgtgttttatcaaaaaacgagccgatccgaacagacattcggcttgacacttcagcaccccgggatgttcgacagtaattacatctccacttaaaaatttttgtattcggatactcaattgtattaatacagtaaatccttccggtgctagtgcatacttgacaagtgccccttggtgaccttggcattcacggcacaaagcagagtttgcgatcaaaccgtatcgcgcaagaaattttaaagttttttccacgccttaatatgaattttccacccgatttttgccaataattgccttcaattgagtcatcgcccagctggtccatcaaaagccgttcataattgaattcagcaagggcttccaatgacccaggcggcataaccggaccatcatttggcaacaaaatactgtgtcgagaacgcggcgctgccataggacccatgcttgcatgtagcaaccttgccgttgagtttccttgttcttcattacacataccgtgttccttacagataattgtcggattgagcttctcaagtttaatacaatttaatttgtttacaatcgtattcagtaaagcatccgcaaccaaacggtagcagtcggaactaaaaaacgggacgagccgacagtagctcttcagttgatctttgacccatccaatgccctcatttttcacttcgttgatcaagcccataaaagcggtgcacgcaaacaacgcatgctgggttcgacttgaggctacccgacttttggggatttgcaacttggggacccgacatttggggacccgacaattggggatcccgacatttgaggatccgacacttagggatcccgacatttggggacccgacttttggggatccgacacttagggatcccgacatttggggatcccgacatttggggacccgacttttggggatccgacatttggggatcaagacatttggggacccgacatttggggaccgaaggacatttgagcaaaagacacttaagaaaaccacggacatttggcaacccgacatttagggacccgacatttggggatttcaataaaacaaaaaaaaaatttaaaaatttaattctaagccacaaaattagacaaaattacgtctgctttagccagagttaattccattgcaaaaaaattaattaatattttaaaaataaaactgtttccggactcaccgcgaggaggcgcagaattttgagcccatactaaccacaacacaatagacaaaccacaatacattttttaactacagtagacctttttccaatttttatttaaagtgcctttcccaagggccaacgggaacagaaatccgtcaaggacattcaaaaagttccagccgactttgctgtctaattgcgtacagcaacaaaatgccgaggtcatcttttcggtttcttatctttcgggtgactttgttcggtgctttaaatgaattttttaacgaattaattttttgtggctgacctgcaaaacaaatctcttccactggtcgccctatttcggtatttatttttccaaaaatatatccagggttgtagtcatcaacattcacactgaattcataagaattcagagtgagcacaaacgggaaaaagtcctttaagatctgtttctcttcgcaagctaaaataattatatcttttcaaaaaataaagatttttaaccttttatttcttgtattagcaaataaatgttgagggaaactgagcccatttccatcaaaattgtcgaggcggtaatgtacgggtgggctttaatgtaggtgcttatacgtgataaagccacagtcaaacgagctaaagccgaaacttctctttgtttccgatgtctctgtttgttcgaactatgagtatttagtagcaacagaattataattgtcaaaaaaagaaattttttcattttctatatattcataattcgtaaagaaatgacaaaaacgggagaagagaattgtgccag

SEQ ID NO: 74 - DNA, 1924 bp, Heterodera glycines
caatggtaaggactgtcgcctgagctcctgtgtcgacattcatttcgatttttgtgccgttaatttcgaccaaaattttccaccgccgtccttgagtcgtgccaatttgtaggcatgttgctttgacttggaccgtgtgaaatgaacggcgttggttctttgtcgtgaatgctcccttccggcaaacattagcaatgtggccttgtttttggcacgtgtggcatgtctcttctcggaagcgacaatctgatctccagtgatcagtaccaccacatgagccgcacggctgggtcggttgtccacgaattgcttttcctcctgtggccggtttttgctgtgccgggtggttttgttgcacgccatttgctgatttggccttggtttttgattctctccactgttgagggcgagttcggatggcatttgtcgaagctggcgtggaaaggagtgacaaagcactatctttaacaatttggattgcttttaactcctcttccaactttttgagtgtgactgtggtgccacttttctcggcttcttccatcattttaagacatttctgcctctaatcgtgatgttcatccctcagtaaaatcaccaaaatcatgcatttgagctgttccttggtaaggctcaaattggcatactcacacgctgcgttgatttgagcaaccaaagaactgatgtcttggtttggatgctgtctgattcgaaagcattcatatcggcggacgaaaagagagcgcgtttcagcgaacaactcttttaatctgttgattgattcagcccacaaagctttgtcgggcaactccgggctgattgtgtccctgtacttcgtgtactcttcgtctccgagctttcccaacaatagtcggactttggcttgctcggttaagtctttgccatcctcttcaatcaatatgccgaagcgtttgtgccactgttcaaatgtttgaccattctcggggtcataaacaaactttgaaattctactgtcgattgagctggccaaattcgcttggcttatgcttgaagcggcatttccttggagcaaagcggtcaaaagttgttgaatttgttcggcgttcattgtccgtcaattgaaattgttgaaaaagtccacaaaatccacacctggtggatgcttacaccgtttggtgctaagctgacgaatttgttgaaaacccgcttcttgcggaacctcacccttcttaggtctattggtttttttttgttgagttaaactgcttcttagcagacctcacaccacctggatgctattggtttttgttgaatttgcagctgtccttgtcctcagtgatgaagaatggctgctgactgcgccaatttgttgtgttcttccacttagaacacacaaagaaaaagaaataaataaataattttattgattcggtcggagggcaaattggaaatataaataaatgaatgatgaaagggaagaacaaaaagtgggaggaggtgtccacttttatggacgagggagggggcggatggacatagaaataacaaataaagtcaataagtcagatcgccataaattcaaattattcactatccaacatcccccaataaacttttcataccccatttttcgcaccgtgaatgttatttttattgaattctgaaccgttttgagtagattagactataaaaaattgaaaattttgaaatcatgtttcccactcccttctcccaggggtattattttgtaaagtctttttttcaaaataaacttttcaaaccccatttttcgcaccgtgaatgttatttttattgaattctgaaccgttttgagtagattagactagaaaacattgaaaagttgaaatcatgtttcccactcccttctcccatgcgggtgtgaagtgtaaagtctttttttcccccaataaacttttcatac

SEQ ID NO: 75 - DNA, 4192 bp, Heterodera glycines
gggtcggtttagtctggccggtttagtctggccgttttagtctggccgttttagtctggccggtttagtcagagggtcggtttagtctggccggtttagtcagagggtcggtttagtctggccgttttagtctggccggtttagtcagagggtcggtttagtctgaccggtttagtcagagggtcgttttagtctggccggtttagtcagagggtcgttttagtctggccggtttagtcagagggtcgttttagtctggccggtttagtcagagggtcggtttagtctggccggtttagtctggccgttttagtctggccggtttagtcagagggtcggtttagtctggccggtttagtcagagggtcggtttagtcagagggtcggtttagtctggccggtttagtcagagggtcggtttagtctggccgttttagtctggccggtttagtcagagggtcggtttagtctggccggtttagtcagagggtcgttttagtctggcaagctgtttttgtcctacattgatccaattctgatttatttctcgaaaattcttttaaattaacaccataacagatttatcagtgttaacaacaaaaaaataacaaaacattgaaaatattacgggcgcatctcataattccgagaaataccaaggagaaaattgatgatgttataggggttaacattgataagggcatggtaattgtgatcattttggtgagcctggttattgttgatggcattgtagctctgcaagagtcgaagaattctcgcatcggtggcacgatatttgggcgccttttgaggaagggagatggtggacaggaagaaacgccatagaagtgatcattttgcttttttcagcaaagacggcatcgttgttgtatgtcttaaaatgaaaaattctattggaaaatacaaaaatgcaatcaatacctgtgttaaaccctcggaagcaattcgcttcttcatacttctcaccaagtgaaaaaaagcagaattgcacacgacaaagtggaaagactgtgcggacagcagcgaccatcgcttgctcgaagtccaacgatatggtgtcaggtgcaaaatttggccatctttggacaatcagttgaagcatccgtgtgtatatcacttcacattttgaagtgagaaggcagtacgcaatcggaaaaacccatttatcacgcctaaaaagacaaaaaaaagtggtagaaaattaaggttttactttgcaaggagaacataaatttgactgaacaaaagcggcgccaaactgaaagtgccatctgcgtacgcatttttcataataccggcccattccgaagtcgaagcgcgagcaaatatcaaaattcttaacacggtatttttaaaaattaatggttttattattttaagtttttacttgtaaataattgacagaaaaaaaaacatttgtaaaaacgacttgccagactaaaacgaccctctgactaaaccggaaagactaaaccgaccctctgactaaaccggccagactaaaacgaccctctgactaaaccggccagactaaaacgaccctctgactaaaccggccagactaaaacgacactctgactaaaccggccagactaaaacgaccctctgactaaaccggccagactaaaacgaccctctgactaaaccggccagactaaaacgaccctctgactaaaccggccagactaaaacgaccctctgactaaaccggccagactaaaacgaccctctgactaaaccggccagactaaaccaaccctctgactaaaccggccagactaaaacgaccctctgactaaaccggccagactaaaacgaccctctgactaaaccggccagactaaaacgaccctctgactaaaccggccagactaaaacgaccctctgactaaaccggccagactaaaacgaccctctgactaaaccggccagactaaaacggccagactaaaacggccagactaaaccggccagactaaaacgaccctctgactaaaccggcagactaaaccgaccctctgactaaaccggccagactaaaacgaccctctgactaaaccggccagactaaaacggccagactaaaacggccagactaaaacggccagactaaaccggccagactaaactgacccagtccgcattagccattgttttggagtttttaaagtcaattctgaatttttacataatttttggcatttttttgaaggttaaaagccatttttgcagtttttaaggcatattttggtgcatatttgggcattttttgggtttttagggcatatttgagggatttgtagtgcatattttatgcgcatatttggcatttgctgatgtgtgtgcaatctaaccaaattttaaagtttctccatttgataactgtaattattatttacttttcagatttagctagttcactgcgtcaacaacgcaccgaggacaatcacatttcaattaatggacaaaattacgcggttgacggacctaatgttaatgttggtgttgaagggcatgatttgagtgtgaatgggagagtttatcaaaacagggccacagagcagtatctggaaattatacaagacaaaaacataagaaatgtaattgtcagtgtgccattatcgttattttctcgcgaaaacataatcgatgggcaaataaacgctaaatgcaatggaaatttatacatcgatcaatcgtcagatggatgttctcgcataatatgcgtcgacgataaaaagaatggcgttgaaaataactttggacagacacgtgatattttcctgaccggtgatgtcaatatttttgagtctgcaaatggaattatctacaactctatgatgggaggaactttacatatgcataattcgtcacttgagtgtgctaacattgaatgtgatgcatctttaaatgtaactcactcaccaatagaacgtaatgcgcaaatgaaatgtggtgggagtttaagtattgatgagtcaccaatgggaaatattcggcttaactgtgatggatctttgcggatcgaaaaatcgaaaatggaaagcagtcagattgatgttggtggaagcattgggattgttaagtcaccaatggcaaatattcggcttaactgtggtggatctttacggatcgaaaagtcgaaaatggaaattggcaacctagacagtggaggaagttcaaccattgtagaatcgccagcgcaaagtctaaagttaaactgtggaggaagtttaaatatgaatgagtgttcaatgaaaaatgttggcattaattgtggtggaagtgcaaccattaagaagtcgaaaatggaaagtggtcgcattaattgtggtggcaatttttctattgatagttcgccaacgggaagtgttcgaattgattacggtggaagaagaattaatttatgaggtcaaacgaatgatcttgttcggaactgatcaaaagttctgaatttctaacataacattaaagatagaaaaatataattattttcctttgtatcttagtatggataaaactataattttaagaattttattcgagatttttactactttatggtttctaattcattagaggatttttttatttttggataggtaaaaaccgaattagtggcgcgcttgcccctttttagtctgagaaaatgccgggaccgaagtgtccaaatcagggctggacgtaattacggattacgtattacggattacggaaattacggcctttttggagttacggattacggattacgggttacggatttttgggatttttccgtaattttgatccgtaactggctttttagattatttttcgagacgatttcttgcaagattattttttataaaatgaatttatttttcaatttttattaaaagactacccatatttcgatttaatctgacttattcttggtaatttgtagtattattaacatacataaagggggggaggaggctagcaaaggggaaaagaggaaatgctaaaaatttggctatttttaacaaaattcgttaaaattctgaaaaaaattttcctcggcggcgcttatcggcaccacccgccccaaaaattcctaattatttttaaatattagctccaaaatcttagtcatttttagacaaaatcttatagcaaattgcataaaatttttcaaaattttttccgg

SEQ ID NO: 76 - DNA, 962 bp, Heterodera glycines
  unsure (1)..(962): unsure at all n locations
gactaaaccgaccagactaaaacgaccctatgactaaaccggccagactaaaacgaccctctgactaaaccggccagactaaaacgaccctctgactaaaccggccagactaaaacggccagactaaaacggccagactaaaccggccagactaaaacgaccctctgactaaaccggccagactaaaccgaccctctgactaaaccggccagactaaaacgaccctctgactaaaccggccagactaaaacggccagactaaaacggccctcagactaaaccggccagactaaaacgaccctctgactaaaccggccagactaaaccgaccctctgactaaaccggccagactaaaacgaccctctgactaaaccggccagactaaaacgaccctctgactaaaccggccagactaaaccgaccctctgactaaaccggccagactaaaatgaccctctgactaaaccggccagactaaaacgaccctctgactaaaccggacagactaaaacgaccctctgactaaaccggccagactaaaacggccagactaaaacgaccctatgactaaaccggccagactaaaacgaccctctgactaaaccggccagactaaaacgaccctctgactaaaccggccagactaaaacgaccctctgactaaaccggccagactaaaacgaccctctgactaaaccggccagacttaaacgaccctctgactaaaccggccagactaaaacgaccctctgactanaccggccagactaaaacgaccctctgactaaaccggccagactaaaacgaccctctgactanaccggccagactaaaacgaccctctgactaaaccggccagactaaaacgaccctctgactaaaccgggcagactaaaacgaccctctgactaaaccgggcagactaaaacgaccctctgactaaaccgggcagactaaaacg

SEQ ID NO: 77 - DNA, 3267 bp, Heterodera glycines
cctgtcccccccccccacattccccagttttttgggaaaagcacaccgcgaaaaaaaactattttgggattttcacctcaaaaaaacaagcagatattctgatcataaattaatcttaacaatttttagattggattttttaaatttaaaaattttttaaattaaaaaaaaattttgaaaattacggattacgccaaattacggccttttttgacccccgtcatgacggattacggatggccgtaactgaaaaaatcgccgtaatgacggattacggatggccgtaactgaaaatcagttacgtccagccctggtccaaatccaaccgggactctactgaccacaataaaatcgccacaaaagcctttataaaaaatattttttatttattatgactagggaccggatttgtatggatttccatatttttttaacactcatttcggcctaaaaaccacgtaaatagtatttttagcttaggcttctaggatgcctttttacttccacccccggtccccgacatttttgggcctattccccgccccgacccccgacatgtcgccccccgaggttcccgaccccgactttttgcccccccgagggctcggagcttaaccctaatttaaaaagaaaaatcaaaattcaataatatgccttaataaataatagggctaattgatttcattgtttatttggtaatatttaaaagaaagatagaaaagcaaatttaatattttcaatttcattcatttggacaaaaaatgaaggcacggcgaattcctttcattcaactgcaaattctgctgctgaagctgatcggagacattgtcaccactgatcaacagagagaagaagcgactgacgcgaatggcacaacggagggggaggcggcggaggaagcgaaagacatggcattggcattggcaatgagcagccgccaattttggcaccaaatgacggacgaatggaattacaaaaatggcaaatttcaaaagccaaaagaagaaatgttttccaaagtttcttaccatgactttggtgagttttgtgaaaattggaaaacaaaggcgacggcagtgaattcttttgtgaaaagttggcaatgcaaaaagggagggaaaagcggcgacggcacaacggacggaacgccaacaaaaaacgatggtaatggaaagcggacattttggtgaaaacccattttttccttctgtccgtttcagtgaataggtacatattttttgatttagttttggaatttgacggaacgaattcaagagggactttcaagaattaacaattcgttggaaggatggcattacatttggggatcagttcttgagccaaaaccgctgtttagcaaatttgcaaggtggcaacacatcgttgatgattatgaaaatgcgccagcaaatggcattagagggaaaggtattaggcgaaatccctctttgttgatcaggacaacaatttgcgtcagattttgctgaatttgagcagcgagcagcacaataccccattcgttatctaagagcatgtgcataccatttggggcagaataattgaaattttaaaatatatgtgacattttgccaacattttttaaaaattatttctcatttgtcagtgacgaaatgataggtaaccttcatgtctgccattttttaatgtctaacttagtttatattagggttgcaaccccgacgtcggggttggaaaattcggggttcggggttgtcggggttggaagtgtcggggttcggggtcggggttgccaaatcgttcggggttcggggtcggggtcggggtttttcaatttttgccttatgccaaatagtcaaaatttttttaatattttttcggaaataatatttattaatttccataataatatttgtattgtttttatatttttttatttcttttttatcagaaattttgtatagaattaatttttttttcttgaaattttaaaattttttattacttttttgttttccaaaacatctttttttcacgtcgctcttttctaaagacttaaggagaaagggtacggcgtccggcggtgccgataggcgccgccgggaaaattttgaaaatttggttagatctgttaacagattttgtccaaaatatgctaaatttttgcgattttgagccaatttttttaataaggtttatgactttttgggccctgtgatgccgataggcagcgctaaattttggaattaagctctattttctaagatttttcaccaaaaaaatttatgaatttcggtaaatttttgtttatttatttatttatttatcgataaagaaaaattgccatcagaagggcggagaccacttactctgatgactgatcacagtaaaatagtctcagagtaagtgaataaatatcgagtgagatcacaggttaaaacaaataataatgaaaaatttttgtttgttaaaaggcataaaaaatgggtaaaagtggggtttttggtgtcgctgatcacgaatatgacatccatttcgactaattcagaatcatggactcgggttcgaacaaagtcaaaattcatattacaccaaaattcacatttatattccaaaattaaaattcatgtggcctaaactgtataagtaccgcaatagcttagaaaaagcttctaaacatattaagctttcgaatgataccaaaactgtttgttttgatgaccagtaaaaaaactatagaaagttaggtacttatgtgtagggaagcaacttttagtgacaaaaatcccgaaatagttaactaaaatagtgagtaaaaatgccaaaatagtgaagaaatagtgacaaaaagtccgaaatagtgacaaatagtgataattttagccaaaaattatccaatgagcttcatttcctttataaaattctcttaacagaattttttgagaaatttttttcatttcttaggagtgtatttttgaaaattttagggtcgatttttagggggtgtatttttctgaaattttataagtcgattcttaggagtgtgtttttaaaaatttttgggtcgatttttaagggtgtgtttttctgaaattttataagtcgattcttaggggtgtatttttcgtttttattgcatttttgttgagaaattttccaaaaaatgtcaaaatagtgaaaaaatagtgacaaaacgccaaaatagtgatttttaactattttagtgacgaagtagccaaaatagtgatttctagtgaccgatactgacatcagaatcgaaaattttta

SEQ ID NO: 78 - DNA, 949 bp, Heterodera glycines
agtacagtacaaaaattactcacctcagcatggcctctacacggattgtacgcgggcggagcggcggttacccagcggcgccggcgtcggcgcgggcaaccgcaaattgggacgcgtttgtggaccgctcgccgttgcattgcacctacaaatttgaccagcacgcgttagacaacatcgaagcgcaaatgcacgaaattgactcaaacgcggccgccgctgaggcagaacaacaccaattccatggtgaattgaatgaatcaatcggctaattttgccttttgaactgactaatcgggctcgattatcgttcattcctctctcaccctcctaattagtttccccgcatcatcccccgctcgaaaaaactaaaatttttacgtctttctaagttcttacaaaataaatttttttctaataaaaaatctgtaaatattcttcagttttagtattaaaaaaactgaaattaaaatttcatttttcggggggggggggggggaggagctgctcccaacaattgtcgatgcttgagaatctctgcctcgtgtcgagattaaagcgattattctcataaaaacctaaagactttggcttatttgagtttccttttaggttggaaaaaggctgtccttgtcttcatcggtttatcacttatcgcttgcgctttttcaatgctgtaatcattaaacataaaaataaataaatcaatttaaaattattttattttttaaacgcaagtttgccttattaaggatgggtctgtgtgccccgtgcaccccggcatgcgctattcttcacagcatcgccagcttttttgcttgtgaatggcttatatattaattattccaattttaaatttatattataattattattattatttttattgacaattaaattaatttattagcatgtaacaaattatgtgccctttttttattagtgtcca

SEQ ID NO: 79 - DNA, 7099 bp, Heterodera glycines
aaaagtgggaaaaaagaaaaaacccaaattcatcgttaaaattaggaatgccattttcgttggaatggaaatggacggattggtggataattttcgatttaattattccgtcataaattattctattcttgccgatcgtgaaaaaaaattgacaaatggggaaaagcgatgtaaaccaggaaaagcgaaaaaatagaaagtgccaaaacatcgctgaagttcagcttacttaaccggagaaacctgcacttctgcttcgtgatcaacgaaccccgaaaaaggttcaagtccactccacaactttaattttgttcaattaaattagataaaataaattatatttttaaaattattttttaagcatttcgcagtacgtaacccgcgtgtcccccccccccccccttgggaccgtcactgggcctatatagtaaacattcgatagagcttcaatagctctagaattttggtccaaggtgatctttcgtttttctgttaatgtaaatggtttatagcttttaaagccctaaattatcatcaactcccgctaaacctttaacttttaatggcaggatgaacttctggctttgtaaatttttatctcggcaaagaaaatttctttttgacaagaatttaccggaaattttgatttgtgtccattttagcatacatcttggctttttgggttttaatctgctgaaaatattttacaaattaaattcgatacaatcggctccctttttatttttttatttagcagaaacgcgaagcggcagtgtctgcgccacaagcgttggccaatcaaccgactgacgttcgcagcagccggaggagagaatctggctgttgaagaatgtaagtgatgttctcataggggagcaagcaggtcgtggcccgacccagaaaaataatttaaaatttccaaaataatgcgcattaactagacaagtagcagtttttttccaaaacaatttcgcataaaatgaccaaatttcgcgattttgctcaattacaaaaaaaaattagggttacggcactgccttggaaatttagtagatttttacaaaaaaaatagtaattttggtgaggttggtcttggaggggcaaatcaacaaggaaacccgaaaattttcgacaaaatactatttttcccttaaaatttcagcttcgtaggggtcttcccgccccccttgggaccgtccctgccaaaccgatacagtattttggaatattttattactgttaccatatgaagtgtttgtttgtgtattcagacgagccgctaacgcccaccctggagggcatcgtgattcttcgcgaattggccaaaaaaagtggcggcgccagcattggcccaacaaccgaatgaccgattgaagcagccgacggaagggacgaatgatttatttattcattcattcttttttgtgttttattattgtgctgttataaaaatctgaacacatggatggatgggtaattaattgttcgggcgggtgatgggtgggaaactgcagttaattgcgactgatctcgaccggcagaccctagaaattcttatttttccttaaaaaattagcttaaaatcgaatttagccatcttttggacaacatctgtcaactaatcgcattgaaaatacaaaaaaaaacaaaatttccggcggtgcacatcggcactcttggaccttccttcgtatgaacaatcggacctgagacaccggtatggcccttggctgagagcccttttatatatattatgtatgatgcacaacggtgctatgtcgaaggacaaaaattgaattgcaaaatttgctaaatttttgactaaatcaactcataacttttctcagacgcaaccaaattgcacaatcttggtgtcatacgatagccttttaattgctttattagcttgctaaattttaaaaatcatataaagtttttcaaaagttatgacaattttttcatttttgcgtctgagaaaagttatgagttgatttagtcaaaaaattagcaacccattcacgaactatttcttaattaaaatactaattagaaaacaaaaagtctacttcacgcccaattttgggtggtcatatgtttacgaccactttttgtatctcaagttaaagtgcacagaaaaattccgaaaaaattcctgctagtttgacttttgatgctgatcaaaaaagtcttttacacaaacttgatcagatcactccttcatagtgatcgggacacccaaaaatatactgaaaatcgggaaatttttcgaaaaaaattcctagggggctggaaaaatttttctgaaaaaaatcattatctccatctgaaagagaacaaactgctctacaatattcaaaagatcgcaggtctctatgaccaaacatgctgaggtatgggcacttcaatttcggtgtctacaaaaagtacagtatttcttaaggaaatagtgcattttacagtagaaatggtcaacattagcctagcaggatgaaatgcataaagtggtcgtaaacatatgaccacccgaaaatgggtagcgacacacaaagtcaaaagtaattcgggcaataacccatgtttcaattaatgaatggtagcattggaaagcccattaaaaaggctaccaaaaatggaaagaatgtacgtctatcaaatagcttaaaaaatttatgaaaggttctttattggaatggcaagtggtcgtaaacatatgaccatgactgtatttggcatgaaattcaaatgatgtttttaagctcatttgtccaacctggcaaaatagggtccggcggtgccgataggcgccgccgggggaaaatggagaattttaccatgtttttagtagattttcatcaaaaaattcccaattttatggattttcataaaaaattggtaatttttggattttagaaaaaattaagcaaaattttttggaaaattgttactataaatggtttcttgcttttttctcccgcctaaacctttaacttttaagggcaggataaacttctggctttgtaagtttttatctctggacaaagaaaatttgtttttggcaaaacttttaccggaaattttgatattcgtccagttttagcacacatcttggctttttgagttttaacatatgttttagtgtttttataatatatatatatatatattgtgtttcctaaaatagagcccggggcctttatttttcaaattgtcaaaaaatcagctgaaaatatattaaaataaatttgatacaatcggctcccttttttatttagcttagagattatttatggtgtgcctgcgccgcaaattccccggcggtcaccgactcgaccgtcatctcgatgtcgcgcaagccgcctgcccggctgttgcgtcagccgatcacttgcaactgcagcttggaggtatgtcaatgatccttttatgtgaaaattctctccccaaaagtgaaaattccctcctcaaaaaacaaaaacttgataaaaaaaaatgatgtattaaaaactcaagtgtaatacacccgttctacaacggcaacgggaggactgctcggcttctaatgaatttcgttctgatgcgccgttcattgcaaccgatcttcttaccagtaatgcaaagcggcggtgtctgcgccacaagcttggcccatcaaccgactgacgttcgcagcagccggaggagagaatctggctgttgaagaatgtaagtgatgttctcataggggagcaagcaggtcgtggcccgacccagaaaaataatttaaaatttcaaaaacaatgcccattaactggacaagtatcagttttttcccaacgaatttcgcataaaatgaccaaatttcgctattttgatcaatttttaaaataaattagggtcacggcactgcctgggaaatttaatagattttcctcgattttaatagattattaccaaaaaatttggtacttttgtgaggttggtcttggaggggcaaatcaacaaggaaacccgaaaattttcaacaaaaatactattttcccttaaaaatttcgggtgcggtcttcctccctggggtatatttgattgttttactactgtgaccgtatcataataatgtttattttgtgtgttgcagatgaacctttgacgcccaccctggaaggcattgtcatccttcgtgaattggccaaaaaaagcggcggcggcgccagcgttggcccatcaaccgactgaccgaacacagcagccggcggaggggactgataaattaaaaattgttttttttttgtcaatcgcgtgtttattttgaaaaagttttgtgctgttataaaaatggaaacacatggatggggcggggctggtggtgggtgggtgggtggtcattattgtctaattaacattgcttttcgagctcctcggaaattttcggtctcgaatagcgctacgaatttgctcgtatgattgggtaaaactgcaattaattgcgatcccgccaataaaaaaagtgcgctctgatcttaaattttatttgaaattatcaaataaaaatgatggaaattttgattagtgacgcacaaaaaaattttattataggcaaataaaaaagaaattttattctttgttttttcaaataatttttcgtgaattttcttacgaacaattaaatattttccgtattttcgacatgtgtgagtccgaaattgacttttataacgtttagtgataaagcggtctcctattaaaaaaagataggccacctgaacactttttggaccattcattagcaatttttaaagatatatgaaaaattgcatttttggaaattgattttaaaaaatttaaaaaatccataaacagttcaagtattcaagtacccgctatgacagaacttattcctctcccaaatattatgctatatttaattaatattttattaatttatttatgcctttttcgtcgaattaaatccaatacaattcaaaattcaagtttcgaatgtcggtaataaaaaatgattgtgagcaggaccgaatttcatttcacaatatgaattaggtaaggagcagggctgggcgaaacttcgagcttcgaaaacttcgcggtttttgggcttcgaacttcgagcttcggcttcgggtaatttacccgaagtttcgggaaaaatacacccctaacaatcgggttttcaaaagtaaagtgcacccataatgattggcttatgctaaactaaatttaaatctcattattagtcttttgttttggattagtcattacatgggtggtccagtgtgttgtgctcttggatccgttcttgatttttgcgttggatcagttcccctcaaagtaattgttttcttctcatttttcaaaattagtgttttttagatgggaattcaatcacaattttaacaattaaaatcataaaatatgtcctttttgaactttttttgttcacaaagtgcactaaaaagttcaacattttccctggcgtcgcctattggcaccgccgacacccaaaactactatttttctttaaaaaaattggctttaaacaacaaaaaattttggacatttttggacctaatctgttaaaaaaattgcactcaactttaaaaaattttcccggcggcgcctatcggcaccgccagacctctgtcccgaaatatgtaagaaaattttttggaaaaggtcccggtctcgactcgataaaagtctcgtgttttttgggtctctgtctcgagtctcgggaaattttcgatctcgaacagcactagtaaatataaattttttaaatataggttgaaaatttgcctttttcacccggagacgcctacccagcccccaatttatcctaaaaataggcttaaagtcgcattctttacattttttgcttaaaatttgttacaagattacgctcaaatttcaaaattttccccgatagcacatatcgtcacctccctaccaaatgcgtttttgagctcctttcttcaatacaattgagcaaaaaaaaaaaataggttttcactagaaatctcgaccctagaaatgactaattttcgttgtatcaaaatcaaaaaaggaaaaatttatctggaaagcctcaattattaatctttttaatttatagaaagctttaattaatttttagtgcatacgaaaaatttgtgaaaaaaaattttgtgttagggtaaaataattttttcaaaaacttcgagcttcgtgcttcgaaaacttcgcggtttttgggcttcgaacttcgaacttcgtgcttagaaaaaaattgggcttcgccttcggcttcggcttcagtgctaagccgagcttcgcccaaccctggtaaggagagaagggtttggaaaagaatttaaaataaattttaaggaccaattcttaagaaattattttaaagaaaataggaattatttataatttcttactatgtatataacattaacatcgatcgaaatttataaaaatatttacaaaaaatatttggcaggaaattcaaatgatgtttttaagctcatttgtccaacctggcaaaacatgaataggtatgatgattgacatttttagacagatataaattgtcatttatttaattttatttgccaaaacaagtgcaacttattatatatttattaaattctctttaaaatctttaaaatgaaaataatttctattctcatcaattttattctggctatctatgaagcaaaaggtggaggaattgtttctttactatcaagaagacaagcaccaaagcgtcgtatgcatttatttgataaaattaaaataattctaaaatatgaaacaataaaatttcattgtaattagacaaaagggtgtttggcctatttggcagcagaatcaaatagtgccctagttataatcttgttgaagtctgattatcgcatagagcggcttatacagtcatggtcatatgtttaacaacactcaaaattttctaccaaatttgatttaaattgattataaaatctcaatatgactatattgtgtatatatgttttatatttcttatagcattttttgtgggctttataatgataccattcactatcccctgacaagaatgtgtacattacttacaaaccatttt

SEQ ID NO: 80 - DNA, 1323 bp, Heterodera glycines
aaatgttattattagttacaaaccgttttttgctacaagaaatataaaacatatatacacaatatagtcatattgagattttataatcaatttaaatcaaatttggtagaaaattttgagtgttgttaaacatatgactagggctataaattgtatgcttttgcatattttttctgcgcacatgctatgaagaaaggggctcaaaaatagcatttctacgttaaaattttttgatttggaggaggtttttggtgcatataaaagcatattttgggggttttcgacaataaatgcatatttcgccatttttgcgtttttatagaatattttggcaattttttgtaaattttcataagaaaaatgtaaaaaaggcgaaaaatacacccctaaggatcgacttttttggaaatagaaaaaatacacccttgaaaaccgaaaaatttgaactttttgtaagaacttttgaaaaaaaaatttgatgcaaaagacaaaaaaaaaagtaattttgttttagcataaaataaaaattcagcaaaaaaattcaaaaatgcatatataaattttgaaattcaaaatttttacaattgcctaaaaaagttcattagccacggtgggggtcggtttagtctggccggtttagtctggccgttttagtctggccggtttagtcagagggtcggtttagtctggcaagctgtttttgtactacattgatccaattctgatttgtttctcgaaaattatttaaaattaacaccataacagatttatcaatgtgttaacaacaaaaaaataacaaaacattgaaaatattacgggcgcatctcataattccgagaaataccaaggagaaaattgatgatgttataggggttaacattgataagggcatggtaattgtgatcattttggtgagcctggttattgttgatggcattgtagctctgcaagagtcgaagaattctcgcatcggcggcacgatatttgggcgccttttgaggagggagttcaccagcgatgcatcgggcgatgcctgcatcaattgatttttgctcacatcgaattgtgttgatgatccaacgtccgttgatgcacactccattcatccggtgcgaaccgaggcgctgtcaaaccaccattgaaccgcggccttccggtgtaattgtccgtgaacctttaaaaaatattgttgattttccattcctaaaaattcaccaatcgaagacgccaataagctgttgagggagttgtgcctccaaagcattgaggccagcaggaagatggtggacaggaagaaaagccaaagatgtgatcattttgctc

SEQ ID NO: 81 - DNA, 2425 bp, Heterodera glycines
aacgcaattacagccaaatcgagaaagaggctttggcactcgtttttgcagtgcaaaaatttcacaaaatggtgtttggcagaaaattcactctgctcaccgatcacaaaccgctgctggccatctttggttccaagaagggcataccgatttatgccgcgagccgactgcaaagatgggccttaattttgtcaaattacgagttcgacatcaaatatgtcaacacagcagcatttggacaagccgacgtcctttcccggctaattgcaaattacccaaggccagaagaagacattttgattgcaaacatttgcacagaaacggaatgcttcatcaacagtgtattccaagtccaaattgatcaattgccattgacagcggctgagattgcggatgcaacagccaaagacgaaattctctcagaaatttcgagactgtcaaagaatggttggccaaacaaatgcaacgacccaaacatcgctccattctttccgaaacgagacgaaatcgtggaagtggaaggttgtttgctgtaccaacagcgcgtcatcatcccaggaattttacgggatcgagcattgaaggctttacatttgtcacatccaggaattgtgcgaatgaaagcgctcggacgccgtcacatttattggccaggattggattcggaaattgagaaaaccgtcaaatcctgtgaagaatgccaaaacgcacagaaaaatccgacaaaaagcacacttgctccatggacgccaacaagcaaagtcttcgaaagagttcacattgattttgctggtccatgcgacgacggatttatgtattttattatggtggactcctactcaaaatggcccgaagtctgccaaatgaagagcataaattctcaggccacggttggtttcctccgatcgatcatttacagactgggagtcccggaagaaattgtgtcagacaatggaacacaatttcattccgccgattttgccaaattttgcacagaattcggcatcaaacacactttcaccccgccataccatccacaatcgaacggacaggcagaaagattcgtcgacacgttcaagcgtgcaatgaagaagtcttcgaaaaacgacaaagattgggccgagaaagcgctcctttcttatcggacgactcccaacgcgacatcgaacggctactcacctgatcagttattctttggacggaagctccgtaccaaaatgtcgcttgttcacctgaggggagagccaattgagcatattgatcatgaactgatcagacaggcgaaaaaggaatatgcttcaaaaatgtctaatcaatttgacaagaagcacggagcaaaacgcactgattttggtccgggtgaccccgttttactcctcaattacaggaacaacaaatcccactggctgcagggcacaattttggaaagggttaaaaattccccaacttttcgagtcgaagtaccgatcttgggaggaagaattgtccaccggcacacaaatcagctgcgccgacgtttcatcttcgaagatgaacaaaaagtgatcggaatcaaccgattcacattgatcgtggacaaaatgatgagcaacagcaacaacccgagcagccagctgatgatgttccccaattggcagtgcgcagatcagaacggatcgtcaagccgcggcaattttactcgcccagcccgatcaagaagcgccgccgccactgatcaggagtgattagaatttaagaagggaggtgttagagatagtgaccattgacatttgtgatctctgaccctttgtttgtcccttcttccctcccccatttctgtctatttaatgttgactcccttccccacatttggacttccttcattcattctccaattttattgtggcataaagccaatcgatattcgcctctctccgtcaccaatttattattttattttcttcaataaactttattgcttatatttgttgtcgttcctttgggtaaggacacaacagtttcattagtattttataattttgttagaaattttaaaagtgatataccaataatttagaaaataagcaatgacaggcagattattaaggcaaaaaaattaatttatattatttattaattttgcgtataggaattaaaaaaatttataggaatggataaatataaaaatttcattaagataatattcattataattaattaataattaccaatcaacaataataaattaaaaatttcataaatttgattaattgcttaagttataaagcagtgaatattttattttttgtcatggtcatgcaaatatatttataaacattcttaatagtttatattatttttgttttatttatacttttcatctctttttttctgtcatttatattttaatgtttattttattataattgaacagttcggtaaaaga

SEQ ID NO: 82 - DNA, 6128 bp, Heterodera glycines
gggggggggggcgccgaattttgaagccaaaccaaacaatgtggggcgtggcaaatcgatggatggataatgaagcaggttagtgccatgccgtggatgaatgaatggccatgcaatgccaaaattgggcggggaaaggcgaatttgtggccaaattaaaatgtggggctgtggcaaaatcgatggatgataatgtgatcgctacagtgaggcagactagtgccattgtgttaaatgggaaataatctggctcttttatactccactcactcaaatttttgcgtcaaaggtactcactcggccgcttcgcggcctcgcactcttcttttggcattttcttatggcataacagttcttccttgtttcttgactttttcttacgcacaacatttttcttctatacaaatttttcaaacaaattctcattcattcatttaaaatttcattactatatacgttatattgacaaggagtttcgtttcaaaaactaatttgagcttaacggctaatgggacgggtctgaaagtagtggaagggtcttacaactttttgaggagaatccgggaaaactatagaaaaaaattcagcgcggacgactgagtcccggggaccgatttctcactttttcttgcgtttgacggcccataactttttttctgaaaatcggatcaaaaaattcccgctgtgagggccctaagtgaaaatgttgcctaaaagttaaaaaaaattctaggcctctagctctaaccccctgggctgggtgcttctagaacttttcagtaccaactttgtccagttcagtccccgttgaataactcattaggctttgacctgagcgcagggtggccagcagacttattgtagagctttaaaagcccgatttttccaaattttaaaatttcgaaaattttcaaaatttttcgagctaggcctaaaaatcggttttcgggtttttgaattttaggattttttaacgatttttcccagagaaacgaagaccacttccaaaacatagtttttcgagctctatcgattggtaatttttttggaaaaatttcgattttttcccggaaatagaaaaaatttttggcctcagcgggacatttgagtcctgggcccataactcgtcaggggttgattttagcgaaaaattgtcttagaacatttttgtagagcattttaaatgctatcgaatggtgtactacatgatgtaaaattttcggaaattttcgagctaggccccctagaaattttcggaaattttttttcggacgaaaatgggggtgaaaaatatttttctggggtaaaataaggtgctgagtacgaatatgatgtctattttaagtttcataatttttggaattttttaaaaattctttattttttggcaattttttggcccttggaaatttgggctaatattggaaaattcatatctagcctaagggttgactaattttgagcaaataaagctttaaaaatagagaaaaatcaggagaattttatgggatttatttaggttttctaacatcaacatgaaaaaagttattccagaaattctggaaattttagatttttcagaaaaaaattcgtaactgccttctgaaaagctatttgagaaaagtaaaatactacaaaaatccgcaatttttttctctataatataaattttattttacatttttatcacatttttaaaaaaagatataaaaataaaagtgattttgtgattcgggtccaaaggggtgagcataggatttttgagttgaaaaattttttcaccaaaaatcttcaaaaaatatgtctttaggggttatttgggccgctgatcacgaatacgtgataagattttacttttaacatagtcaagacctcagaatccctgtgtgattggggattctgagacatcattttgaggggggggggaagttcgaatccgggcggtgtacattattttctatgcatttttgggttattttgactgtttttaattaatttgaagatttcttttaaattatttaaatttattttttttaaattaaagaatttcattatttatttttgaatttgaaaaaaaattaatttaatttcaaattaaataaatattcaattaataaaattttttttttgataaataaattttataagtataattaattatttttttaattgatagaatttcatgtattttttaaattaaatttgttaaaaaatattttcattttaatttaatgaatttactaatcactgttgtaccacttttaaatttttctatttatttttgtgttatttttcagtgcgtttaatttatcacttttgtacctcttttaatcactgttgtacctattttaatcacttttgtacctcttttaatcactgttgtacctcttctgatcacttttgtacctcttttaatcactgttgtacctcttctgatcacttttgtacctcttttaatcactgttgtacctcttctaatcacttttttacctcttttaatcactgttgtacctcttctaatcactgttgtacctcttctgattgttttgaataaaaaaaataaaattttctcttcaatttccttactattttctcttctctgactcgttgctgctaccatttttagcggcgggcagagaagagaaaaatagtaaggaaatttgagagaaaaacttctctcaatttaacttgatatttccaaattgggtttaaaagcggaaattatcgcatcgattttttccataatgttccttttttcatttatttttattctcaatcgagccaattttttttaatactttattttcattcaaatttagaattttgcctgccattgtttattttacattgacgaaaatgccgacactttgatcgaatcggagggatttttgcaaattgaccaaaaaatgttgtgcgaaattttggaacgcgacgaattgcaaatccgtgaagaaatttcaatgtggaatgcagtaaatttttttaaatttaaaaatgttacaaatttatttttaaaataagtccgaatctttttcggactattttataaaattattatattcaccagcctttccatatttacagttttcaactcttcctcaaattggcactgtttcggcccgtttcgaagcgctggtggacaaacattttgatgacaggacgattttttttataattccggcaagtttttttttttttttgtttttttctgttcttttttgtttttgtttttgggttatggtcccaaaagccttaacagccccaaattttcaaaattcttaataaaataaaaattttggaaattcaagaaaatttatttgtaaaagtgaatagttttttatgtgtttttttgaaggattttatgcgtaaaatatttaatggcctccaagtaggcaagttttattgttttttttttgtgtgtaaaaatgagaatgtttcaattttgtaaattatttttttaggatttttttccaaaaaacgaacttcaattttcagaatatcaaagtggtggacattctaccctttttgaccgtccatatcttaagagaacattttttcttaaaattaaaaatcttttttttggaaattttacatttttaatttaattttttggccctttttattcattaaaaaatctttttttttggaaattttacatttttaatttaattttttggccctttttattcaattaagcctaaaaatgcattttctatgaacaaatttacatatttaactaacattttttcaaaatttcagctgggtttgcatggtgtttggatggacattctccccttttgaccgtcctcaactcggcctcaaattggcattgctttctccccgtttcaatgctccagtggacaaacatttcaacggctgaaggcgtaagtttcagtttcaaattggccatgaaaatttttctaatctctacttttgtttggattcggtatttaaaaaatttaatttgaaaattttttttgagaaattttttcgatttatgacctcagaatccctgtgtgatttgtacctcttctaatcactgttgtacctcttctgatcactgttgtagctttttttcccattttttaaataactagagcgcaaaaaaaacctttttttcagcgacgaatatcgattatattttattattcattttctcagtatacattttgttattgattcccccccccccctcccttttgttaaataattaaaaacaccaaacttccaatgcttattaagtttttcctttgtatacaattttaatctatatttcaaacattttaaataattctctctttatttttttgttttttttcagctggttttttgcaacactttggatgggcatttctgaccatcttcaactcggcccaaattggcattgctttcgccccgtttcaatgctctggtggacaaacatttcaatggcaaagcggattgctggcaagtttcaatttttctcaaagtaaccggtcaaatgtttaataagctttaaaattgtgattgcattcggcagttcaaaaattgaaaaaaggaaaaaattttctttgttgaaaaaacttattttaaaaaatttatacttcaaccatatgaaatagccggtcaaatgttttctgagctcaaaatttttgattgcattcggcaattcataattgaaaacggaaaaaattttctttgttgaaaaaatcttaaaaattgtaattttcaagcctatgaaaatcaattattgtaactttttgaaaaaccaaattcgctcaacattgtgggcttatatcaattgcatcccgtaaataatttgtgaaataaaaaaatgttctcaagcaattgctatgtttggccggttaaagtcttaaaactgaattgatttgatcatgaattgaatacaagaaaacattttcagatgcacatatatacaaaaatcatgacaaggtgtaccactaagcaaatagttttactaacccaaatctgaggttagatagaaaataagtttcgtacactttggcacgtataagcccctatgaatttaagaaatctttacaattgacttaaacttaatatgtacttacttattttttaaatattagaaaagtcaatcaagtcaattgtaaagatttctgtccttatgtccattttgagactcacatttttatttgttttcaaatcttatcggtctgctttgcgaccatgatgagatttgtgcacgtgccggtctgctttgcgaccatggcaacatatcggtctgcttagcgaccatgatatgtagtgcacacgccggtctgctttgcgaccatggcgaggctggtctgctttgcgaccatagccaaccgtgtcggtctgctttgcgaccatgacacagtgccggtctgctttgcgaccagggcacccatatcggtctgctttgcgaccatgatatggaaataacgcccagacttgcactggcctttgccatgcatgtggctgggccgcctaatgggaacgccattttctggccttgtatcccagctaactgtttgtaaaagaggattgtcctttgattaattagcagtgctaattgttcgaagttccctttttccaaacagaaggttggctacggtgggattgtcctctgttcatcagcaacgcgtctgttgttcggagttccctgcccctggacatttaggaattggcgcaaacaaagggcaataaaattggttcgcagacagatcatttgggtctatgtagccgctgcttgggtatgtgacattcccgtaggtgtttacgtcgtacctatatggtagtctggcacgctcttccgttttttgcagagcaaatgtggttatttgtcacgccattagggcctttgtcatagctttcttttcggtgacttgctcttcggtacactgtcagagtcttttgactttcttgtgggaggtgtgtgagtggttacagggaaatggggttagtgaataagttgattcgtaagacaaggattgataataatgataaaaaaaagatgtgcgttggaatatgtttgatttaatagtgctttatcgaattcttttgctttatatttggctccgtccacgtcccaaatcattgtgaatgcatatgagaagtaaaaaactagcatacagtttttacgtgga

SEQ ID NO: 83 - DNA, 1472 bp, Heterodera glycines
  unsure (1)..(1472): unsure at all n locations
atttaactaacattttttcaaatttcagctgggtttgccttgagtttggatggacattctccccttttgaccgtcctccactcggcctcaaattggcattgctttcgccccgtttcaatgctccagtggacaaacatttcaacggctgaaggcgtaagtttcagtttcaaattggccatgaaaatttttttgagaaattttttcgatttatgacctcagaatccctgtgtgatttgtacctcttctaatcactggtgtacctcttctgatcactgttgtagctttttccccattttttaaataactagagcgcaaaaaaaaacctttttcttcagcgacgaatatcgattatattttattattcatttctcagtataaattttgttattgattccccccctcccttttgttaaataattaaaaacaccaaactaccaatgcttattaagtttttcctttgtatacaattttaatctatatttcaaacattttagataattctctctttatttttttgttttatttcagctggttttttgcaacactttgtatgggcatttctgaccatcttcaactcggcccaaattggcattgctttcgccccgtttcaatgctctggtggacaaacatttcaatggcaaaccggattgctggcaagtttcaatttttctcaaagtaaccggtcaaatgtttaataagctctaaaattgtgattgcattcggcagttcaaaaattgaaaaaaggaaaaaattttctttgttgaaaaaatcttaaaaattgtaattttcaagcatatgaaaatcaattattgtaactttttgaaaaaccaaaatcgctcaacattgtgggcttataccaattccatcccgtaaataatttgtgaaataaaaaatgttctgaagcaattgctatgtttggccggtttaaatctttaaaattcatcgatttgaccatgaaatgaataaaataagaaaaaatttttagatgctcatatatacaaaaattatggcaaggtgtacactaagccaatagttttactaacccaaatctgaggttagttaggaattaagtttcgtacactttgtcacgcataagctccaaaatagaattaagaagtctttacacttgacagaaaaaaaatgttcttaaatttttaaaaatattattcagtcaattgtaaagatttctgtccttatgacccttttgagactcacatttttatttgttttcaaatcttatcggtctgctttgcgaccatgatgagatttgtgcacgtgccggtctgctttgcgaccatggcaacatatcggtcagcttagcgaccatgatatgtagtgcacacgccggtctgctttgcgaccatggcgaggctggtctgctttgcgacatagccaaccgtgtcggtctgctttgcgaccatgacacagtgcccgtctgctttgcgaccagngcacccatatcggtctgcttt

SEQ ID NO: 84 - DNA, 1642 bp, Heterodera glycines
  unsure (1)..(1642): unsure at all n locations
tggttcgcagacaggcccttcggggccatgtcgcaccaatgtggttcgcagacaggcccctcggggcatgtgtcgcaccaatgcggttcgctgacaggcccttcggggcacgtgtcgcaccaatacggttcgctgactggcccctcggggcacgtgtcgcaccaatacggttcgctgacaggcccttcggggcattgtcgcaccaatgtggttcgcagacaggcccttcggggcacgtgtcgcactaatacggttcgctgactggcccctcggggcacgtgtcgcaccaatacggttcgctgactggccctcggggcatgtgtcgcaccaaaaatggtcgctgaacctaccccttcggggattgtggttcgcaccaaataatggtcgctggacctaccccttcgggggattgtggttcgcaccaaaaatagtgactggtcctgcccttttgggttatggaccggacatttttgcatctgcattcttaatgggatgtgtgagccctgactgatggatttcagcacaggacgactacactccacagcgaagaatgatgtctttgacatttatttgtgcattttttgttaataataaatttttaacatatgtgtgcatttattagttaattacctcatatttttgccacatttgcaacactttctgatttgttgtttcagatgccttcaaaacaaaagaatttgagaaagaagatgcaagatgtgtatcggcgacaggcagagcgatctgtcagtcgggataactcacccgtctcagacgggagtgcagatgggaatggagaggcatcggcgtctctccggggcaccagcaccccaagcttaagtgctttgcaaataagcacaccggcttcttccattggaagtaaaaagaggggaagacccttgagagccggagcgaagccaatcttggctactcaagaaagggtgtctctcattgacacacctcgaactgcggtcactcaaagtgaccagggttcgccgtgcaaaaaaaggggaaaggtcgccgagtgtggtcaacccatgtttgccaatgaagctattgctttgacgcctgtttcgactcaaagtcgtggagggcgtcctgccaaaaaaattagaggcccaggccgaggcagactcactgattccatgagcaaaagctctgaaatggatatcaatcttgaaaatgccccaattccggcaaccttgcacattgtgtctgaaaaaattgacttcagcactgtgccaattaatttcgccacatcgcgaaattttgcctgtaaaatttggagatgggcagcaattggcctttacgagcgtgatggcgaaacagcatttggcccacgctctggcccaagattcattgagacctgttggaacaggccaaatgaatggctaaatgacagctttattgttgcctatttagcttacattgcaagcatttcacaacgaaaaacagtagttggtggattctttggcatcgagaactgatgtttctcgattttccnacgtgaagaattacactttcggctatgattccgatgcggntcccctgaagttgtgcttatgccgcttcacttncccaatcattggactccactcggtctacgatggtgcacatggtgcatacttccttgactcgctgc

SEQ ID NO: 85 - DNA, 6190 bp, Heterodera glycines
  unsure (1)..(6190): unsure at all n locations
ctgactgnccctgggggcatgtgtcgcatcaaaacggttcgctgtgactgncncctcggaggcatgtgtcgcaccaatgcggttcgctgactggcncctcgaggcatgtgtcgcaccaatacggttcgctgactggccctcggggcatgtgtcgcaccaatacggttcgctgactggcccctcgaggcatgtgtcgcaccaatacggttcgctgactggcccctcggggcctgtgtcgcaccaatacggttcgctgactggcccctcggggcctgtgtcgcaccaatacggttcgctgactggccctcggggcatgtgtcgcaccaatacggttcgctgactggcccctcgaggcgtgtgtcgcaccaatacggttcgctgactggcccctcggggccatgtgtcgcaccaatatggttcgctgactgacccttcgggtttatgtcgcaccaatgtggtttgcagactggcactccgaggcatttgtcgcaccaatacggtttgctgactggcccctcggggcatgtgtcgcaccaatatggttcgctgactgacccttcgggtttatgtcgcaccaatgtggtttgcagactggcactccgaggcatttgtcgcaccaatgaggttcgctgacaggcccttcggggcatttgtcgcaccaaaaatggttgctggatctaccccttcggggggattgtggttcgcaccaaaaatggtcgctggacctaccccttcgggggattgtggttcgcaccaaataatggttgctggacctacccctttgggggattgtggttcgcaccaaaaatagtggctggtcctgcccttttgggttatggaccggacatttttgcatctgcattcttaatgggatgtgtgagccctgactgatggatttcagcacaggacgactacactccacagcgaagaatgatgtctttgacctttatttgtgcattttttgttaataaatttttaacatatgtgtgcatttattggttaattacctcatatttttgccgcatttgtaatacttttctgatttgttgttttagatgccttctaaacaacgcaatttgaaaaagaagaagcaagatgtgtatcggcgacaggcagagcgatctgtcagtcgggataactcacccgtctcagacgggagtgcagatgggaatggagaggcatcggcgtctctccggggcaccagcaccccaagcttaagtgctttgcaaataagcacaccggcttcttccattggaagtaaaaagaggggaagacccttgagagccggagcgaagccaatcttggctactcaagaaagggtgtctctcattgacacacctcgaactgcggtcactcaaagtgaccagggttcgccgtgcaaaaaaaggggaaaggtcgccgagtgtggccaacccatgtttgccaatgaagctattgctttgacgcctgtttcgactcaaagtcgtggagggcgtcctgccaaaaaaattagaggcccaggccgaggcagactcactgattccatgagcaaaagctctgaaatggatatcaatcttgaaaatgccccaattccggcaccctcgcacattgtgtctgaaaaaattgacttcagcactgtgccaattaatttcgccacatcgcgaaattttgcctgtaaaatttggagatgggcagcaattggcctttatgagcgtgatggcgaaacagcacttggcccacgctctggcccaagattcattgagacctgttggaacaggccaaatgaatggctaaatgacagctttattgttgcctatttagcttacattgcaagcatttcacaacgaaaaacagtagttgtggattctttggcatcgagaactgatgtttctcgattttccaacgtgaagaattacactttcggctatgatccgaatgctgttcctgaagttgtgcttatgccgcttcacttcccaaatcattggactctcatcgtctacgatgttgcacatggtgcatacttccttgactcgctgcatatgagcagcttgagtgatgagagaatggcactcatccagtcaataattgctgagatagtgcccgggactgcgtcattcgctgttgaatacgtgcagcaattgacaaagcaaaatgatggtaacagctgcgggtacttcgtgtgcctgtatgctgaatcctggctgatgaacaaccgtacatttgttctgccggatttgaacatcaattatgagaagaagcgcattttatggcacataaatgagctttatggctcagatattgtgccgtttcatccaagggaaggtgtttcaacatctttcgctgttgtgtctcatcacaatggggatgtagcgcaaacttcctccaaggacatagtgccaattgaagtggatgattcagcagtacttccttcctcggaagatactgctgttcttgcgcaagcaccagtgatcggcgaaaatcaagctgacacccacggtgttgttgcggacacaattgtccagcaagaaccaatcgcgcaggctgatgatgtaatctttgtcagacctaagacgccaccaaggcgatcactgcgcgtgcaaaaaaggctttcagcttctgttagccgttcgccttcaccggcgccaaaacgacccccgccagcaaattcgctgggaatggcaatgccgatcacacggcgttgctctgcatttcacaaggggtggcaatgcgctgcagcagcagccaaacatttcccggaatattgtgactccgggaaactcggtgacaaaaaatgcgccgattgcggtgcacatctcttctcacatgaagacagtaacatttgctgccggaagggaagagttgtgctgccaatgcttaacccgcatcctgatgagctcaaagagctgattgtggggaataagcaatcccgtgaagggaaagaatttgtgcgacacatgtcgcgttataacaacctgttccaatttgcgagcgtttccgctggcaacaaaccaagccctgctggcggtccgatggccgttattcttaacggagaattccatcgccgcataagcagcatgcaggctggtacaactcagattcctggctttggccagttgtacattctggacccagtcgaggctatggaacagcgtcgaaacaaccccaggtttactggggagaaaatcacaaacgaagatgagtttgtgcagggtcaccagctaaatgagcagactcttgagatcttagaacaaatgatccaagtgcatcatcctgctgcgcaggcatataagcaggcgcgtgagcagctcactgagcttctccaacaacaaaatcaggaagagcttcgtttcttccgcatgactttgttggatagccgcagggctccagctggtcttaaagacccaaaattgcacccacaccaaataatcaccccttctacgggtgaagggatgttcgctattcatgcggaccccactggtgctcctccgcccaaaggaatttgggtagagaacaaacaagggcaattaaatgaaattgctcctttcagtccgtggactgatagtcttacgtatccattaatcaagccaatgggcgatgatggatacacaactggcattaaatatgctaagccaccatcgcgtaagcgaaaaggtgctcagaatgcatctggcctatttgactcggaagccgagtcagataatgagtcgtgcgagactcagtcaattgcatcatctgatgcggggtcagtcgcagattcagatgctgaatctgtagcatctgtttcatcgcagcaccggcggattgacaaatccaaacaatttatctccctgcgagattattgcaagtattatctcgcaataagggatgaaaatgtggagttgcaataccaccacattctttcatgtggtggaggacttggtcagcgctggatccttgaccaggctgcaaaaattgattggcaaatagcaacatttttgcgtagacctgacatggatctgcggatcagcactccaaaaaatctgctgcagtatttggtcaaccaatacaacaggcagcaagcacggcaaaaccccaatgcccaacagaaaactgttgatgacattggcagtgttgttcggctttccgaacacaacgtaaattctctccaatattggaagaaaatgtatgaagattgcaacaccgtttttgcacggtgccatgacgcgaagaaagcgcgtctcttcattactttcacgaacaacagggaatggcctgagttcaaagagaatttacacaaaaacggtcaagtatttactgaccgttttgacatgtggatgcgtgtctggagcagcaaaatcgctgagttccgagaagaactttatgacaaaaagttcttcggaacaatccttggttacggtgaatcaatggagttccaaggccgaggaggcccacatgcccacattgtggcgcaaacagacctggacgcagttccatatgtcattcaggaatacatatgggcgcacattccatctttgcctgataaagatgacgacacgcccattgcaaaaatgcatcgcgaaatccgcgaaacaatgcatatgcaactgcacagatgcagtgacagttggtgtggtcctagcgacccaatttacgggcggtgcaagaaggggttcccagccccttactcaaaatgtacgattttgcgcccggacaggcccgcgatgtatttccggccttcaccaactgatggtggtgcccaattagaggtaaacggcttaatatacgacaactcacatgtcgtgccgtataatccttatattctgctacgttaccgagtacaccataatgtactgtttgcatatggtaacaaagcaaatattaaatacgcactcaagtaccctttcaaagggccaggacattgttatgtcgagtgcaaagaagagtccggcaataaaattggaattgatgagccggctcaatatgccaagatgaacttccgtggtgcaacggaagcatatgccattgttcattcaatgccatttgcccgtctttcgcatcatgttgtcaaattggcaattcatttgccaaaccaacagcccattgtatatagggcattccagctggtgagcaaagctcaacaaatccagcaaggcgaactgccagaaacgcagtgttcagcctattggaaacaatggcaaaatgagtggaagaatgatccaaagtttaaggatattcttttcgaaaaagtcccagagcggttccgatgggcaaaggacaaatgggtcctgtacaaaaggcagcaaattaaaaggccacctatcggccgaattgttcctgtacccccatcggacccggaaaggttcgcgctctattcacttatgcgtcactttcctggacacccagaccatcttaagatggttaatgggttactttgtacctcattcactgaggctgcaataatgcatggtcttcttgaagacgacaaaatttgggacaaaactctggcggaggcagctctgtcgcgctggccagatcagatgagatggctctttgtgagcatcctggtctatggccagccgagtaatgccatagaattgtggaacaagtacaaagaccaaatgtacaatccacagggcattatcagtgcggctatacgccaagcacgggagcaggaagcgctagccgacattgattggcgattgcacttctttaactcaagctgcatgcactgtggcctcccagatccaccaaattcaaaagccaaaaatatcaatttggcagttgaagaagctttctttggtgatgatgatcttaatatgccgcctggccagccaaatcctaggcagcagcaaaacgctccacctccactcaacagcgaccagcaaaaggtctttgatgctgttgtgagggctattcaatcggatccgaaggatccgactgtgccacgccgtttctttattttcggcgatggaggtacaggaaaaacattcctgtttggccaaattattaggcgcttgcgaaaggccccatacacctacaaagtgcttgctacggcatccactgggtgtgcagccattttgctgccatatgggaaaacagcccattccacgtttcgtctgggtagagaagtgtcattagacaaactcccaagcattccgctggagagcttctttgcccgtcggattcgtgaggcacaactcatcatcattgatgagatcaccatgcttcacaa

SEQ ID NO: 86 - DNA, 1838 bp, Heterodera glycines
atcttgacctctttcccgttgttgtaactcttctgatcacatttgtacctcttctaatcacttttgtacctcttataacttttcgagttgttatttaaataatagatcttttattcgtttcttcttcggatgaatacgcatttttatgtaaaattaataaaatagaaatattattaaaaaaattatttaaattttttgtctaattttgccaaaatcctttttcgttttcttaatgttgttatgccaatgccgatctttttacaaaattgtttcggttggtgaattgccatttagcgctcaacccaataacgtgccaacgcctggactaagggagggaggagggccatgacgtgcaacgttagggcacttccggtttccattgcattatgcgatgtgtcaactccaattatttgaggaaaccaagtgcatgtcggctgacgcaaagaccctaacagactaaaatcactgttgtacctcttttatcacttaaaacgggcgcgaagcgcccgtcgagcccaacaaaatttgaaaaacgggcgctaaacgcccgtataagcacaacaaaattttaaaaacgggcgcgaagcgcccgtctgaggccgcgaagcggcccaaaaatcccagataatcttttaaaaattccaaatctcttcactatggataggtcccatccccctaaacacttatggggatggatgccatccccctaaacactcttatggggattcacagcctaggtagcgaagctcaagaagcgcgcagcgctttcccaagcgccaccctcgcatgcacacacccgctagtttaaattatttatattcatttctacaaaacatagcattaaataatttacttcagttatagattttcaaatattttatttatttacatagatattcgtatttttagtaaaaaaaaaattaaatatttttatatattaattaaaataagtttatattaatatatctttattatataattatttaacattcttatttttaacagctaattaaaataaattttataaggtataaaaataaaaatattatttcttatttaatcagaatcgatgaaaattgaattttttggataaactctttaaattatttttagaattagataattgaaaataatattgcattacattaatcaatttacttctatcatttatattgtattttttacaaatatttaatttgcaattatggctgcataattttgaatttattcaaattatacattaagttatttatataatatttctatcaaattgtgtttaaaaaactgtgatatatattttattaaaataattgttttcttatatgtttatgataaatattaattattccatacttaattgtcatcctgtagttatttatttatgttttcactttttttaatttatttattttaattaattactaatcttttaaatttactaaaataattttagtttttacttagtttagttccgattccctattaaagataacaaaacattttttgcctaaaataattacaaaaaatttaaaatttttcaataaaaagattttcatttcgcacttatagaaagaaattaacattttccagttactcagatttctcatttgaattcatatgcacgtgaaaaagattaactgtataataaattcgtacaatttggatcaaaaatcaaaatgactttcttgcatataaattgaacatttggcaaatctgcagaaagacagaaaaaagaaataataatgctaataaaaaaattccaatatttatatatttaattaaaaaattgtgaagcattaagttatcaattcataaaatcaattttagaaaagaaagga

SEQ ID NO: 87 - DNA, 6158 bp, Heterodera glycines
tgccaaataaaatttatattatagagaaaaaaattgcgcttccttgtagtattttacttttcccgaatagcttttcagacggcagttacgaatttttttctgaaaattcgaatttttccagaaattctggaataacttttttcgttttttagatagaaattccaaataaagtccataaaattctcctgatttttctctatttttaaggctttattcctgtaaaattgatcaacccttcgatttgttatgaattttcaaatattaggccaaaatcccgaggccaaaaaattgccaaaaaataaagaatttttaaaaaattccaaaaataatgaaacgaaaaacaaacatcagattcgtgctcagcacatcaaaataccccagaaaaatatttttgacccccattttcaacccaaaaaaaattttcgaaaatttctagggggcctagctcgaaaatttttgaaaatttcctgccatatggcacaccattcgatagagcttaaaaagttctacaattttgccctaaggcattttttggctaaaaccgacccctgacgagttatgggcccgggactcaaatgtcccgcttaggccaaaaattttttctatttccggaaaaaaatcgaaaattttctaaaaatgtcaccaatcgatagagctcgaaaaactatgttttggaagtggtctccgttttcccgggaaaaatcgttaaaaaatcataaaattcaaaaacccgaaaaccgttttttaggcctaacttgaaaaattttgaaaattttcgaaattttaaaacttggttggatagcctttcagatactacacatttttgctcagaaacaatttttcggtcaaagcaacccctggcgagttattcgcctggtactgaagtgtacacttttgggtaaaaaaaattagccaaggctacagccttgggcgcccaacgtagggcttaggttttgctggcaaagttgtcggggatagtctgacttaaaatcctaccagcaagagctaagcgatcccggtccaaagaaaaaatttcgtagaagaaaaactgcacgaaaaaatgagaaatccgtccctgggactcagtcgtccgcgctaaatttttttctatagttttcccggattctcctcaaaaagttgtaagacccttccactactttcagggcgctcccggccttcggccgggagattttgttttttgaaacgaaactccttgtcaatgtaacgtatatagtaactagcgggtgcgtgaaccgtcggctatttagctgggaaaaagcgcttcgcgctttgggagcttcgctacctagataagctatgggttgtgaaaagatttggaatttttaaaaaattatcagcgatttttaggccgcttcgcggcctcagacgggcgcttcgcactacgattggtttggggagatatggagggagttcatatttactcttttaacatgtattataatggtgaaaagttccaggaatttgaaaaattattgaaaaaaatctctttctaaaaaaaactaaaaagaaaaaaatttaatcctttcaaagaaaaaaaataacgtccccgtaagatcgtttaggaggatggtatccttctccatgagagtgttcagagggatgggttccatccccattaggccttgtgttagggtctttgcgtcagccgacatgcacttggtttcaccttgacacactgcatttttcaatgcaatggaaaccggaagtgccctaactcgcacgtcatggcccacctgcctccttcagtccagctggcagcacttttttgaatatgtgtccgttttaagtgcagatgagaacggggtgacatcttagtgtgcacgcgctggacctaactcgtttgctttattgcaaattgagcattttcgttgcaacaatattcagcactttgactctgtcttgtgcatcggtctcccttctgggagcgtacactcggacgttgctcccgtccgttgctcttgaaaatgcagtgtacaattgaccgtgggaaaatacatccctttcgaggtcaattccgaccgtgctgattgtttggccttgacctttgagaatggtcatggcgaaggcaggtttgatgggaaactgcaaacgctcatattttaagccgccaggcgttttgtcctcgtagacattgcgtgttctttcgatgaagaacttaacttggccaccaacagcgttgctgttaatgacgcgaccgaccagacgatcgtcgccaagttcttcaagaacgatgcgcgtgccgttgatcaatccttccttatcacttttgtttataaggaggacaacgacgcttccgaccttgagtcgcagacggtggggaggcatcccagagtctgtgcgtcggttcaacgctgccacttcggactcgatttcatcgatgtccagtggccgctcgtcaagaggcttgtccgtggacaaatattctcgcacttgaccaggcacgttcgccatcataatttcgttgatctcatcgcacgtgtcaatgtgaggtgcgaggatcagccgattgagcagttccttgtcatttccaaggagtttttggaagtcgggatagacaaagtctatcaactcttccctgctctttacgagaaactgcggaggaatccagaagtattctccggtctccccgaggcctatttggcggcacatttgcaagtaggcttgctgcccttggcccaacctctggtttattgtcaatttcattgtagtgaattgacaaaacagtggagaggtttgaaagcaggccgtaacttgtgcagttaggccttcgtgaggcacgaccggcagcgactgtttaaagtcaccgctgaatatgaccgtttttcctccgaagaggaggtccttgtgctggggaattgccatttctttgcacactcggtcgatgacctctatcaccgtgttgtgaagcatggtgatctcatcaatgatgatgagttgggcctcacgtatccgtcgagcaaagaagctctccaagggaatgcttgggagtttgtctaatgacacttctctacccagacggaaagtggaatgggctgttttcccataaggcagcaaaatagccgcacacccagtggatgccgtggcaagcactttgtaggtgtatgggggcttgcgcaagcgcttgataatttggccaaacaggaatgtttttcctgtacctccatcgccgaaaatgaagaaacggcgaggcacagtctggtcctttgggtccgactgtattgctctcactacagcatcaaagaccttttgctggtcgctgttgagtggaggtggggtgttttgttgtggcctttgttttggctggccaggcggcatattcagaccatcatcaccatagaaatattcttcaattgccagattgatatttttggcttttgaatttggtggatctgggaggccacaatgcacgcagcttaagttaaagaagtgcaatcgccaatcaatgtcggctaatgcttgctgctcgcgtgcttgacgtatagccgcactggtgatgccctgtgggttgtacatttggtctttgtacttgttccacagttctagggcattgctcggctgcccaaagacgaggatgctcacgaagagccatctcatctggtccggccagcgatgtaaggctgcctcgccgagcgttttgtgccaaatttggtcatcttcaagaagcccgtgctgtaaagcggcctctgtgaaagtgttgtactgctgcccatttaccagttttaagtggtccggatcaccgggaaagtgacgcatcaaagcataaagtgcaaatctttcccggtccgttggagggacaggaacaacacgaccaattgggggcctctttgtaggcttccttttatacaggacccatcggtcttttgcccatcgaaattgctctgggactttttcaaaaagcatgtccttgagcgaaggaacatgctgccattcgttttgccattgcttccaataggcagagcatggcgtctctgggagttcgccgcgctgaatttcctcagctttactcaccagttggaaggccctgtatacaacgggctgctggtttggcaaatgaatggacaactgaacaacgtgatgtgagagttttgcaaattgcattgaatgcacaactgcaaaagcttccgtagcaccacggaagttcattttggcatattgagccggctcatcgataccgattttgctgccggactcctctttgcactcgacataacaatgtccaggccctttgaaagggtatttgagtgcatatttgatgttcgctttgttaccataagcgaataacacattgtggtgtactcggtaacgcagcaaaatgtatggattgtacggcacgacctgtgagttgtcgtatattaagccgttcacctcaattttggcaccaccatcggttgggctaggccggtaatacaacgcgggcctgtccgggtgcagaatcgtacatttcgagtacggggctgggaagccttttttacaccgcccaaagttggggtcacgtggaccgcaccaactatcactgcatctgtgcagttgcatatgcatataatctcgtacttcgcgatgcatttgtgcaattggggagtcatcatctttgtctggcaaaggtggaatatgagcccatatgtattcctggatgacttctgggactacgtccaggtcagtctgggctacaatgtgtgcgtgtgggccaccacgcccttggaactccattgactcgcctgagccaaggattgttccgaagaaactcttttcatagagctcctggtggaaaacagcaattttgctggaccacacacgcatccacatgtcgaaacggtcagtgaacatttgaccatttttgtaaatgttctccttgaactctggccactcacggttattcgtgaatgtgataaagagccgcgccttttttgcgtcatggcaacgcgcaaaaatggtgttgcagtcttcatacatttttttccaatactgaagagaatttacatttctctcagaaaggcgaacaacgctgccaatgtcatcaacactcttttgttgtgcattggggttttgccgagcttgctgcttgttgtattggttcaccaagtactgcagcaaattttttggtgtacttacgcgcaggtccatgtctggacggcgcaaaaaagtggcaatttgccagtcaattttggacgcttggtctaagacccagcgctgtccaagaccaccgccacatgaaagaatgtgatggtattgccactccaaattttcatcccttattgcgagatgatatttgcaataatcgcgcagggagacaaatctttttgatttgtcatagcgactggtcactgactgcgtcgatgtttcagatccggtatcagaaaatgcaattgactcggtctcgcacatgtcatcatcggacattgcttctgtgtcaaacatatcatcagaattatcgcttttccgcttcctttgtgcgggtttagcatatggaattccaaatttgtatccatcgtcgcccttaggcttaattaatggataggtcaagctatcagtccatggactaaacggggcaatttcgttcaactgtccttgcttgttttcaacccatattccttttggtgccggggcaccagtgggatccgcatgaatcgcgaacatcccttcacccgttgagggggtgattatctggtggggatgcaactttgggtctttcataccacccggagcagagcgctcatccagcaaagtcattctgaagaatcggagttcttcagtcctttgttgttttaacaactcttggagctgttcccgagcctgcttgtaagccgacgcagctgggtgattttcttggataacttgttccaaaatttcaagggtcgcctcattaagctgatgaccctgcacaaactcttcatcgtttgtgattttttcaccagtaaaggtgggattttttcgtcgctgctccatggcttcgactggatccagaatgtataactgaccgaagccaggaatctgggttgtgccagcctgcatgctgcttatacggcgatggaattctccattgagaattactgccatcggtccgcctgcaggacttggcttattgccagccgaaacactcgcaaattggagcaaattattgtaccgcgacatattcctaa

SEQ ID NO: 88 - DNA, 9294 bp, Heterodera glycines
ggcgcaaaaaactggcaatttgccaatcaattttgcctgcttggtctaagacccagcgctggccaagaccaccgccacatgacagaatgtggtgatattgccactccaaattttcatcccttattgcgagatggtacttgcagtaatctcgcagagaaatgaattttctcgtcttatcaatgcgatcaatcaatgattcggtcgattcgaccgactcagcatctgatgcagcaattgactcagtctcgcaacagccatcgtcggacattgcatcagtgtcaaacatttgatcgacacattgatcgcttctccgctttttttgtgcgggtttggcatatggaataccaatttgatatccatcatcgcccttaggcttaattaatggataagtcaagctatcagtccatggactgaacggggctatttcgtttaactgcccttgcttgttttcgacccatatcccttttggtgccggggcacctgtgggatccgcgtgtattgcgaacataccttcacccgttgagggggtgattatctggtggggatgcaatttagggtctttcataccacccggagcagagcgctcattcaacaaagtcattctgaaaaaacggagctcttccgtcctttgttgtcttaacaactcttggagctgttctcgagcctgcttgtaagcagatgcagccgggtgattttcttggatcatttgttccaaaatttcaagggtctcatcattaagctgatgaccctgcacaaactctttatcgtttgtgattttctctcccgtgaaggtgggattttttcgtcgctgctccatggcttcgactggatccagaatgtataactgaccgaagccaggaatctgggtcgtgccagcctgcatgctgcttatgcggcgatggaattctccgtttagaattactgccatgggtccgcctgcagggcaaggcttatttcctgccgaaacactcgcaaattggagcaaattgttgtaacgcgacatattccgaacaaactccttcccttggcggggttgtttgtcgcacacgatgagctcttcaagctcttttgggtgcgggttaagctttggcaaaacaacccttccctgtcgacagcaatggctgctgtcctcatgcgggaagagcagtgccccacaatgagcgcactttttttcgccaagtttacctgaatcggagtattccggaaaatgttttgctgctgcggcagcacagcaccaacccttgtggacaaggtagcaacgcttcgtaaatgctgtgactttctcaacagcatttgctgatgagctgcgtctcggtgcgggagaaggagaacggctaatcgaagtggattgccgtctgcctatgcgcgttgatcgcctcggaggcgtcttcggtctgacaaatattgcatcgtcagcctgagcaattggctcttgcggaacacaagactccgaaaccaaaccaagcgtgtcgacttggttttcaccatccacttgggcttgggtgagaatggcattagcagcctgtccacttgtctgtggttcgatgatcattatgtcatttttatcatcaacttccattgactcagcggccttggatgtcgactgcgcttcatccgtatgtcgatagacaattgggcaaggagttggcaccccttcccttggatgatatggcacattatcagagccatacagctcgttaatgtgccacaaaatacgcttcttttcataatttatgaataaacttggtagaacaaatgttcgattgttcataagccaggattcagcatacaggcaaacgaagtacccgcagctatttccatcgtgttgtaccgtgagattttcggcattaagaatcccggtcaacactgtcgacggcaaaatgtcacaaatgatctttttaattttatccgtcagttgcggatccaacctgccatatggggtaggcaaagaatcggcaaaatgagtgccaaattgcacatcatggacaatgagagcccaatgtccagggaaatgtactggcaaaagtataacttctgccggaacattagggtcgtacccaaatgtcatatttttgtaaggcatgactctgtccaggccattgctccataccattgggtcaacaacgaccacttttcgttgtgatatggttgccaagtatgccaagtatgtggcagcaaagccgtcattgagaaactgggtcagatcattccaacaggtctcaatgtatcttgggccagagctcggggcaagcgctgtttcgccatcacgttcgtaaaggccaattgctgcccatttccaaattttacaggcaaaatttcgcgatgtggcaaaattaattgacactgtgctgaagttcatgttttcaggcaaagctggcaaaacgaccaataatgtggtatcttcagagccgtggttcattgaggagccattgctcattgaataatttgtttggcccctgcctgggccgcctctctttttggtcggccgccctccacggcttttttgcctggaaacaggtgttgaagcaattgctccaatagcagacatggatcggtcaacttcgccgaccttccattttttgctgctaggcgacgactcaacattttgagtggccaaagtgacttgtgtatcagcagatgacacactgtgttgcgaagtcataattgactccgctccggcttttgggggtcttccccttcttttacttccaatggaagaagccggtgtgcttaattgcaaagcactaatattgggcgttgtggtgcccgggtgtgatgccaccccattctcatctgcacttccgtcagggacgggtgagcgacctgggctgacagattgctccatctgcctttggtaccgctcttgctccttctttcttttagcgtgttgttttgaaggcatctgaaaacaaaaatgaagcaatgatgtgtacatgcggcaaaatatttggggaaaacaaccaataaaccacattaatcaaatatttatcaaaaacattgaaatgtgaaaaattaaggtgcatcttccttgttttccacagtgatgccgctgcgaatcaaacatgtccaatttcgcacaaaggtcattgagtgcagaaattgatcgctcacacatcccattaagaatgcagataaaaattatgcattttttgccgaatctttcccaagtaggggaaagatcagcatagtgcgaactacaatcctttaagggactggccattgaaccacaatcctcaaaaggcagtccacatttattttgatgaactcagatttcctacgttacttctcaccagtccactggtcttgacaaagtgcgggaccagcttcgcaccggatgttggccagtaacgataaggaattcatggcgccaccattgagcggcccagccacatgcatctctaggcgagagcaagtctgggcttgctttccatatcatggtcgcaaagcagaccgatatgggtgccatggtcgcgaagcagaccggcactgtgtcatggtcgcaaagcagaccgacacggttggctatggtcgcaaagcagaccagcctcgccatggtcgcaaagcagaccggcgtttgcactacatatcatggtcgctaagctgaccgatatgttgccatggtcgctaagcagaccggcacgtgcaaaaatctcatcatggtcgcaaagcagaccgataagattttgaaacaaataaaaaatgtgaatctcaaaatgaataagaggacagaagcctttacaagtgattgttcaaatattttaaaacaaaaatgtttacttaaatattaatcaagagtaaaggcttcttaaatactattgtggagcttatgcgtgccaaagtgtacgaaacttatttcctaagtaacctcagatttgggttactaaaactatttacttagtgtacactttgccataatttaatatatatgtgcatctgaaaattttttcttattttattcaaatcatggtcaaatcgatgaatttgattttaaccggccaaatacagcaatttcctgagagaattgttttaatctcacaaaaagtttgcgggattgaaacagcatcaccgcaacaatgttgagattttcaaaaattcacaataattgattttcatgtttgaagatacaattttgaaaatttcaattttttaattgccgaatgcatccaaaaaattagagcataaaaatatttaaccggttaattcgtgaaaaaaaacttgcgcagcaatccgcttttgccattgaaatgtttgttcaccaacgcatcgaaaccgagcgaaagcattgctaatttaagccaagttgagcaatgccaaaaaagggaaaaactcctaaaatccaaaaaaattttaaaaaatgattaacaaaaacataaaaaaaaatggtacttttaaatgaaaaaaagtaaaaatatatttgtctttctggctttatgggggttttccactaacaaattgctaaattatcttttaaaatgaaaaactttctaaaaattaaagtttctataattacgtgataatttaaaatcaagcaaggtttctgctaattgtaattgatttttttcttaaataatttatgattttgccacagaaacttaaaaattctgcgattttagagaccaattttaaattcataaggttcaattttatgaaaaaaatgaaacttacgacttcaattaagtaaacaaaaaaaaccaatcacttacaaaaaaagcaaaaacaaaagacttaccgaaatttgaaaaaattcgcgtttgtccatcgaaatgtttgtccactaaaacatcgaaacggggcgaaatcagtgccaatttgaggccgagttgaggacggtcaaaaagtgggaaaatgcccatccaaacatcgctgaacaccaactgaaattatgaaaattaataatttagcggaaagggaagcaatagggttggacaaaaatttgttgaccgaaactctgagcaattttacacgaaacaaaaatttttctattaaaaatgcaaaaacatacaaaatttccaaaaaatttttttatgccatgtaattgccaaacaaagaaatttatgactataatggaaaaatataaatgtaaggcccagcttaaaaatcattaaatccaaaaatacgtaacaataagacactaaaaaaacctgacacaaaaaaaaatcaaaaaaaattacgaattttgaattttttttatttttcgggccatttttagaaccgagaaaactttaaatacttaccacatttaagttagtcctttcgatttgtggcccacagtcattttgctttttcatcaaaatatttgtccaccagctaatcgaaacgggcgaaagcagtgccaatttgaggccgagttgagcatggtcaaaaaaaggaaaatttccatccaaacgttgttgcttatgtgctgaaaaagtaacgaaatattttataaaatacaaaaatatgattaacgaaaacccttaaaaagttactatttttacatgaaaaaggtaaataaatctgtctagctggagttggtaaaaatgtatgtgattttctaacataaaaaatcagcaaataagcaaaaaccctaaaaaaaaggttcacttttacaacaaaaaaaaccgaattttgcttttaagcaaaattcgtttgaaattggaggccccttttcgcacaaaatccttaattaaaaaccctaaaaaatcactttttttgccatcaaaatatttgtccactaaaacatcgaaacgggcgaaagcagtgccaattttaaaccgagttgaggacggtcaacagtgggaaaatgtccatccaaacattttggcggttgctgaaaatcttaagaatataaaattacaaaaaaaaagcaaaaacactaaaatagttcacatttacaaaaaaaccgaattttgcttttaggcaaaagtgtttgaaattggaggcttcttttttgcacaaaatcattaaaaaacaacaaaaaccataaaaaacaatcactttttaccatcgaaatgtttgtccaccaaagttcgaaacatggcgaaagaagtgccatattcatttacaaaaataaattaaaatttgccaaatttggaaaatttttatttttagagcaattttgaaatgtaggccccgtttgggcacaaactccttaaaaaatattcaataaccctaaaaaaacttgccgaaatccgttttgccaccgaaatgtttgtccaccagctaatcgaaacggggcgaaatcaatgccaatttgaggccaagttaagcatggtcaaaaaaggcaaaacgtccatcgaaacttcgtggcacacccagctgaaattgtgaaagaatactttagtaaataagtaaatttgcgcttagaaaaatggcttaatttggcaaaagcaaccctgaaaataaatcaaattgcaaaattactcaaaaaatttgattttctcttaatttcaaacaaaaatgttacaatttattaaattgctcaatctatcaaataattttaagcacataaaatctcaatagggtgcttaattgagtaaaaagagcgcaaaaatctaaatttaaaattgcaaatttcccaaaaaaaatttctgatttaaaaaaatattttcgttttttatttacgatgctctgaaacataagccaaatagaaaattcctcaaaaaaatttcactttttttaagtgccaaccaaaaattgtagagcttagaaaatattttaatggtcaatttggaaagaaaataaaacttacgacttaatccactttcgccatcgaaatgtttgtcgaccagcgcatagaaaggggcgaaatcagtgccaatttgagttcgagttgagaacgttccaaaatggggaaaatatccatcagaaatatcgttgcatacaaagctgaaaaaagtgaaaaaaattgcatgaaaaaagccaaaaaatgaatatggatattttaaacaaaaaattttttgcaaaaaaaaagctaagtaaggcattatcagactgtgtttttattacttacacaaacaaagggtaaaaatcaatttttcaatagacgtaaaagttgagtaaatcaataacgcacaccatctcaaacatgagaatttttttaaaaaccctaaaggaaagaaatttcacagcggttttttcaacattaatgctgaattacaagtttttttcaaaaattaaaaaaaaacgctaaaatttttttccagaaattaaaaaaaaattctcaccggcaaatgcttaaattcgtttggctcaagtccaatgtgtttagctgttccagccatgaaattgcacaaaattggcgccaattgcgttctgtgcaccattcgtccgagcccatttgttggcagcaaacgaaagttgttgcaaacggcgcatgccaaaccaacggatgtccacggcacgaaagtcaatcccgacaatgtcgaggcgttggagataggccgatgaggctgtaaaagcaaatgcctatgattaatgaaatctggccataaatttggggaagggtgggagggaaatgcattagtagcaaatttcgttaaaactgtattcaaaaaatgaatgcttatatttagtatgagctgaaataagttctttttctatttttcgccttgcctagtaattttgaaaaattaaagcaagaaaaaatgggtgcaccccaaaatttcgccgccataatttcgccggctgaaatttcgccggccaaaatttcgccgggacataatttcgctgccaaaatttcgccgaagaaattttttttttaatttgaaaaatttcaagaaaaaaatcttagaaaacttttttatatagaaatttcaaggtaaattttagaaaaaaaatttttaacgatttttgggaaaaattttcgaaaaacttataatttaccataaatttcaaaaaaaatcgctgaaaaatttttttcttgaaattttcttataaaaaattctaatatttttttcttaaaaaatttctaaatttaatttttttttaaatttttccgcgaaatttagtccctgcgaaatttcggcggcgaaattatgtcccgtccacgaaaaaataggctttttaaatgctttttcatttcgtaaacaaatactgtaccactattcgaactaaaaaggcaaaaaaaaatttaagctttgcctataatttaaaaaattacaccggaaaagttaagaattgttaatttttttgatcaaaaatggtcaattttttgaattataaacgttaattgagggttattgctagaaaatttcaaaaaatttttaagtcgctatttatacatcgaataaattaaaaaattgcaaaatttatccatttttttaaatttcgtcaaatctgtcggtacctcatttttccatcttcagaaaaattttgttaataaaaggtttgagaattgcaagatttatcccagcactttgaaaagccaagaaaaaatattcatttatttaattagaaaatcggtaatctcagcccaaaaaagcgcaacaaactttgcgtagtttttccaaagctgcgatcagatcggcccattcgttggtcgactcgaacgagttgagcgctttgtccacggcggacgcgtaggcgtagtatttgctgctgttttggtgcgaagagaaagtccgagcagaaaattggtgctggtcgaagcctcggaattatgtgcttaaatattgaaaaattaaattggaaaatagggaaaattggggaggaaaacttaggtcgcccatttcgaagaaagtcgattttgttcctccccaatttacgcattcggtccgtcgttcgtccgaccgacgacgacaaatgggcgacagaaagcgacgaattggcgagaatttagcattcgttggttggtggcgggacggaggaggagtagtgaaggttggggtcaactgaagaagaaagtgcctaattttaaaaaacacaaattttcttcaaacattcatgagaaagttgtttaattcggccttgaaaattccgtcttgcatagctttacgcttcttcgttatcgcttgctggtgtgccattttttagcgtctttaattattaaatcgcaaattgttgagtaaagagaaaaaaatctgcaatattttatggcaaattataaaaatttaattaaaaaggagctaagccaaaattttaatggaaatgcaataataaaaattttctttctgtttgttaaatcaacaccaatttttgcatatcgatagaaaaaaatttgcatcgattaatgctgaattatttttgtctatggtcaaactcaaaagttacataacaaaacataaattatttctttcctctccttttggcgtacta

SEQ ID NO: 89 - DNA, 1106 bp, Heterodera glycines
atcagtacaaagatgattagaacaggtagaaaagtgattagaagaggtgtaacaatgattagaaaggtaaaacagtgattaaaaagggtacaacagtgattagtaaattcattaaattaaaatgaaaatttttttaacaaatttaattaaaaaaataatgaaattctatcaattaaaaaaataactaatttaaacttataaaatttattcatcaaaaaaattaatttaaatataattttttatttattaactcaacaaaatattttaaattaatttaaatcactgtaaataacgtaaaaatgcacagaaaaataatgtacaccgtccggattcgaacctgccccctccccccccccctcagaatccccaatcacacagggattctgagggcttaacgatgtaataattgaaatctgatcacgtattcgtgatcagcggcccaaataaccactaaagacatgtttttggaagatttttgtgaaaaaaaattttcccactcaaaaatcatgtgcacccccctttggtctcgaatctcaaaatcatttttaattttgtaacaattttcaaaaaagtgataaaaatgtaaaataaaattcataaaatcgagcaaaaaattgcggatttttgtagtattttaattttacagaatggcttttcagaactgagttatgcaattttttctgaaaattcgaatttttccagaaattctggaataactttttttcttttgaagatagaaataccagataaatcccataaaattctccttatttttctctatttttaaagctttattgcatgaaattcatcctaaattgaaatgagttacgaagtttcaaaattttacccaaaatcccgagggccaaaaaattgccaaatatttttgaatttttaaaaaattctaaaatttcctaaactgaaaatgaacatcagattcgtgctcagcaccttaaaaatacccagaaaaaaatttttcaccatatttttcaaccaaaaaaaattttccgaaaatttctagggggcctagctcgaaaatttttgaaaatttccggccatataatacactattcgatagcattttaaaagctctacaatttgcactaagg

SEQ ID NO: 90 - DNA, 3286 bp, Heterodera glycines
  unsure (1)..(3286): unsure at all n locations
agcagcttttcttaaacaaatttcagaaatcttataaaatttcgttatattattacttcctaattaataaccttttatttaatttaagagttacctaattcaattcgtaaattataatattaaaatctatagtaggtgagttattttaagcctttaattttcactataataaagtggtttatgtttattattgttgaaaatatattgtataatttcaataaatattttaatatataaagctcaggttttaacatcctttttgcaattctaaaaattttttattcttaattttgaatatcttcaaaataagtgatttttttttaatttaattcattattgtcgcttcaactttttgtaattttgggtggaatcaataattcaaattgtctccaaaacttatttaatttttaaattttattttgatatattttattaagcacgttattattttttcatttttattcgtctaaattcaagctgagttttaacatattcgtattttatttccgttttattttaaaattttatttttgtatgaattaaatttcttttagccataatattttagtttattaaatttcgaaatattttgtttttattacaacaacaaaattattcgagatcctaaaccttttcgaactcaaatatttttatgagtgtcttatcactagacaaaaaaaaatttattcttaaaactgagtattgtatattttaaaaattaaataattttagatttatatcgtgctcggaaagcagaccggccgggtgctatcgtcgcaaaccttttctttcaacaaaataactcaagattaatatttagtaattaacatatatataaaattattaaaatttgaatttgatttttttatttgattggatgtgtgaatttattaaattgtctattagtaatttacaacagctttgtttcagctttacgcatatttaatataaatttattatacttatagttttaatatttgctttttactttgaataaggattttcgtctaattttaaaaaaataaattttttgaggtgtattaattatttgtttaagattttatgcccatgcttaaatactatctacgactaataactacaaaattgaaatctcacttcacaatgtatttttgtgtctattaaaattaatgtagctcatatttatttaaaatgtatttgtccacatgccgattcttccgggtttattaatatcatttaaagtccgtgtttgttttttttagtaaaaatataaaaatgtattatgttgtttgtataaattaaaagaaatagtttttttaattctatatttttattttttcggtcttaaataatgcttttaaaattctattttttcaggtcntaaatacggctctttatccttttatttaccctgattaaggctttagatttttaaatattttattcgcagaacagtttctattaagcagcttctatacataattgtaaaaatttgttagtttgttttaaattatctttgatgctatcaaagtacatatatttttatttaattatattgttaaatatttcatttaagcattaagctttaatatttaattgaattgcttttgctgaagcttttctctatattcaaattttattttgtgcctttcaattttttacttttttcatgaattaattttaaaataaatttcttataagctttgaattgactaagaaaaagtcacggatatcataagatagatgtattcaaaccccgaataatattttttcgttttttttaccaacattaaaacatcttgaatctcatcccattgttatggtttctcgagtaatttaaatcaatattttatatttttggtacacagaattataaaaatgtttatttttcttcgaacgtataccaataatattatttctttgaattgttattataaagtaaatagtctttcttattcctcgcggttatatttatgacttattttattataaaaagtgaagttatctaatatttttccttttcatatatatatatatatttttgtttaaaaacttttcatcagtattctccaatttaaaaattttattaatgcaattgtcaatttttttaaatacttttacgttaaatctattataataataactgttttattgctctactgtttattcacttttatttgcttaataatcgtgcaaacgacttattgtttggtatgtggttcgttaacaagcaaatttttatagacttatttttacgttcaatttttggctaattttcaaataattccctttatctattaaaattttttctcattaattagaatctgttttaattaagggtataatttattaaatgcaaaataaaatttttcgacaatttaggtagtttttttttatttaaaactttttttaaattaaacattaagatgttttcaatttggattttaaaaaaactttttttgaattttttttcttgataaaatttttaatctgaatttatttaaaaaaaaatattaaattctataacctgcaaaaaaataaagaacatttattggcaggatacttacatcaataaaagaaataataaaaagaaaattcaaagaatctagataagtaatggaatattaagcacgcaaaatttttgcaaaagttgccaaaaaaatttataaaaaattaagaaaacaattgctaaaatatccaatgtgaactagagggtgctcgagacaagtaatacaaacctaattaatttgatataatttatcttaatcttgaatttaaaaataaaatttaaaatcacaaatttgatggcagagttacaataacaaaataaaagtttatttaaaaaaacatcaaatgggctttagtcaaaaaaccatcaaaagaaaatattttttgatatatctttgctcaaaagcaaccaaatttaaaatattgataaattcgatagccctatgtttgttcaattctcctgaaatgtatcaaaaaaaatcgttaagtttcaaaaaattatgaccaaaaatgttcaaaaaattttattacgttcaaaagcaaattaataaaatttcaatttaaaaatgaaataaagtaaaagtaaaagtaaattaaaaatgataatccaaaaaaaatgattagaactatgtatataatgtataaagttaaacaaataatttagtattaggataaaaaaataccaatggatacaaatttatttgtaataaattataatagaaagtctttcattttaattcacattgtttttcaaagtttgcatcgtagtgtttaagaaaattatcaacctcttacaaat

SEQ ID NO: 91 - DNA, 4057 bp, Heterodera glycines
  unsure (1)..(4057): unsure at all n locations
atcgttaaactccaagagaaaaattaaaaaaaaatttatagaatagtaaagtaaatttcataatttatcattaaaaacctaattttaaataaaataaaggaaatttttctaaaaagaactcgttttatatatttaaaatgaaagataaatgcgtagctaatgcaattaaaaatttttgtttttttattaatattaatatttaaagataaagagatttattgaaaaatgaattatttttattttattaaattagctataaaaataagtaaggaaaagtgaaaattaattttcaaactatcagcatgtaaagagcaaaagcaaaattaatgaaacatttccgcgcataaattgagcaccttgtaatttatgatattgatagacaaattggatacgttcgaattgatcatgagatttagtgaatttaaatacaaaaaatgtatcaaaaatttttaagttgaattcaaatttcaaaattatatcaaaaaataaatatttttaaatacattgcaaaaaggaagaaatgaagcataattattcaaataaattaaacaagatagcaaaataaagaaaatattattgagttttggatttatatctgagagaaaaaaaagtttttttaaaatccaaattgaaaacatcttaatgtttaatttaaaaaagttttaaataaaaaaaaactacctaaattgtcgaaaaattttattttgcatttaataaattatacccttaattaaaacagattctaattaatgagaaaaaattttaatagataaagggaattatttgaaaattagccaaaaattgaacgtaaaaataagtctataaaaatttgcttgttaacgaaccacataccaaacaataagtcgtttgcacgattattaagcaaatattcggcaaaaaggttcggctaaattataattatggaatatttttgctttagctacttttttaagtaagttcaatgaaaatccgcattatttttggcccgcataattactcaattaaattctttttcgtaagaaagaagaaattttcgttttgatgacatttatttttttgtataaaattttctaaaggaaatcaattaaaatttattgcaaaatgaggattttacgaaaaaatgtttaagatttgaagaaaaagttcgaacattttgccaaatatacctaatttttcaaaagaccacaaaaacccgcaaatcctcagtttcaaaaaatcctctttgaccctctaaagtgtagccgcaactgtccgtggaacggacacaaaggggagaaatggacgaataatgacgaaaagcaaaaaggagggcgcgcgaccaaagggcggggaaaaattcgagaaaggaaaaggagaaaatggggcgattggaattgaagggcgatgggcacgtgaaagagcgaactgggaagggatgaaaaaatggacgtcacaccgtttccgtgtcgagggaatgcaaaaagaggtcatcgacagtgacggaacgagtgacaaacaagtccgaggcggacgactaaagggaaaaaataatcattttgtgatcatttggcgaattgtgaattcgctcttctcccccccccccccccttcattgcccggacccttcccccattttgtgcccttcccccattttcatgccctgttcactactccctaggcattctcccaatttccatgtattattccccccttttttcccccaatcttttgtgccattcctttgtccccattttccctcttttgccattttctattgtccaaccccaacccccatttcacacattttgttgtaaaagtttggtttaattacccaagtttgagggcataaattggtagcattttttgtgtaatttatggcggcaaattgttggaattgggcgacagatagagatggttattcataaatattaaaaaaataaattgatagcgatcgttattcataaatatttaaaaaataaactatgtctccaattactaaaatgtataactaattgaaaaaataaaaaaaactgaaagcaaagaaaaaaacttcatgaaataataataatttgtgaaaattctaaagtaaatgtgtggcttctgttatgtaaatttaaattcacttcataaacaatgaatggctaaaacatacaccattgaaagaactaatgctttgccgaaaattgaacagtataaatatttgaacgaataaattatcgaattttaaattaatatgcgcagctcaaaatgaagttcttatggcacagaatgcaatataaataattgaattaataaaaaaataaataaatttaaaaactaaaatgtcaaaaaactataacgataaaacagaaaataaattttagataactacatttgaaaaagcataatatataaatttttataaataatatgaaatatttttaatttagtataaagaatgctaaaaaagaaaatataaaagtaatattcacttcattgccattaagaaacgtttttcaagaaagaaagaaatacatgtagatttgcacttgaaaagatttttaaagacttttattgttcaaaagatttttaattgttcaactctttctttatcagctgattttaatgaatgtcagaaattaaaaatttcacaattaagtagactcttttaaatatttctcgcacatataattaatacgaaaaataaaaactgctagtttacattaaactcttgagacgacaatataaattttcgactaaaggtaattatttgtaaacattaaattacgaaaaacaatacatataatagtttatattttaagttcaacaagcaaattttaatattttaaataatctaaacttaaattataataacaaatatttatttgaaaataataattctaaatccacatcaaatatcaagcttattatttaaaagtgcaagcgagagattgtataatttataaaatttcaaaacaatttttaaaattaaagacgaaactggccaaatatttttcctccaaattggcagaatgcaggatgaagtttaaaaatataagaaaatattaaaagaaaaaatgcaattccatgaacaattttgattggagcgactttttagcatataaaaaacatcaaagcgtgggttagcatctattttggcattttaatctgtagtacctattttggcctttttgccgaaatttcatagcaaacgtgcaataaaacaaaaaaaaactcccccaagaatcgacccaaaaattttcaaataaatctctacgaaaaagaaactagcggggttagcgcttcagcgcatcccccgctaggcagtacgattgtcttgtagaattataaatgataaaaccgaaaatggctcggccgcttcgcggcctcgcacgcttctcttggcattttcttatgacacaacatttttaatattctaatggtctttttgtttcttgtcatttcttaaacaacactcagcatctcaatcactgtgagtcaagtttacggcattacaatcactgggactcaattctccggcattccgacactgtgactcaattttacggcattccaatgaccaggactcaattctccggcattacaatcactgggactcaattctccggcattccgacactgtgactcaattttacggcattcaaatgaccaggactcaattctacggcattacaatcactgggactcaattctccggcattccgacactgtgactcaattttacggcattcaaatgaccgngactcaattctccggcattccaatcactggaactcaatccaccagaattccaatcacttttttaangtaattgtttaatggcaggctgncaaatttttccgtaatgatctnggttttctntgattnaaattccactnntcttttacctntaggttttaatcattagtgtatttctcttatntattgtatttagaggttatanngtaaataattggtttcattttaatattttcagtctctatttagaatattaactattaataacgatgataatgctacagctttttttgttgtatttattataataattcacgtttagtacatatactcgaaaaaga

SEQ ID NO: 92 - DNA, 5396 bp, Heterodera glycines
  unsure (1)..(5396): unsure at all n locations
ccgaaacgaccctcgcgccgaaacggcggcgccgaaacgatacagactcgccgataggcgccgccgggaaattttttgaaaatgagtataatttgttaagagaattttgtccaaaaattgtcaaattttgtgattttcaagccaattattggtaaaaacaaaaatttggagttttgggaggccggcggtgccgataggcgccgccgaaagtttttcggaattttaggaatttttaattaattttattaagaaaattgtacaaatttaaaaattttcaagagtccccaattccctgagttagtgtcggggggtcgggggataaaaagtcggaggtagggggctcggggtcggggagcaaccctattataaacccccaaaataggtgctaaaaatggaaatgagataaatattttaaaaatcaaaaatgtagtcaagtaaataaataaataaataaattttgaatatgaatttttgataaaattttccatttctcaggggtgtatttttcgtttttattgcatttttgttaataacttttttcaaaatagcagaaaatattttacaaaaaattcttcaaaatgaaaaaaagcacaaaaaagcaataaatttattattattaacaggttatatcgctccaatttgattcggttttttttcggtttttcataaaagtcggtcggttttttcggttttttgattatttaggtcggtcggtttcggtataaaaaccgaaaaaaaccgaaaccgaaaaaaaccgaaaaactcaaaaatttctcggtcggtttttttcggttaaaaaccgaaaccgaaaaccgaaaaatatcgaaaaaaaccgaccggtccgatctctagtgaatacctcccctcccccatcctttccttcgcttcttcatttggccaccactcgccctttctaaatttccctccatccgatagcgctaatcgatccataatgttctacaccaaatcttctccagtaccattacatcacatctataatttcaaaattaactaaaatattccttgtaacaattaaacaaataatttattgcaatttatgatttatataagtttttttttatattgtgatagtcataatattgtttttgcttaaaacgataaattattcataaatttcaaatataaattctcctattaacaatatttttaaaatattcataaaaataataattagtgttttttataaaatcaaatccaattatttcagcttggcaagtaaaaaaaacattaaaaatttaagttattaaacttaataatatagagaatgaccgtggaaagaaaaatatatagtctaaacttaaaaaaatgaaaaattcatcgcaaaatttgagaatagcttttacgaacttgagcacaagaaattttgcgtaaatcgacaaaatattcataaatttagaagtaatgtactaaatcaatatttttattagtctaatttattaacattaaaattaattaaggtttaaatatttgtgtttgtgttttttttataaaattaaatagaattatttcagcttttaataattaaaataaaaattttagcaattatgtatgctgtagaaaaaaagatttgtgctttaaatttttaaaataaatttatttgtaaatgtttttaaattatgaggtttaatttattaaaatatttgaaattgtaaaggttcttgtttaatatattctttcttcattctttacatgatcaaataaactttattatgaaaaaccaaagttgtaaatagttttttacataaagacgagtatcaataattacaaccaagaatttataaaatattattaatagaaaataaaatagtacaccattcgatagagcttcaatagctttacaattttactctcagaggtgattttctattttctattaataaaaatggtttattgcttttttggaaaaaaattaacaaattcttaaaaaatcgaaataaaccgaaaatttttcatcggttctaccgatttcggttttttttttggttttttaaccgaaaccgaccgaccgagaattttttgagttcttcggtttttttcggtttcggtttttttcggtttttaaccgaaaccgaccgactgaccctcttgtccggtctctagtctaaacttaaaaaaataataaaattcatctaagaacttgagcaagagaaatttggtgtaaaaaaattggttcaaataagaattgatgaaaaaaataattattaaatattacttcaaaaatgcattgaaatatgatgataaaagaactatttgaaaaaataaaacagaaggttttaatttatcaaattagataaaataatcaaagtttgacaaaatacaggaatttgacattccttcactaaaacttgaggttgtttcttgagttattataataattaaagttattttttatattattttttcttgctttggatatattaacaaaatataatcgatttcttttttttaatttttaataaatatttttgaatctttaaatacaattgaaaattagaacatgacgaaataatggacaaaaaaaaaatttcgcgccgtgctgtatgcagcgcattaggcttcaaaacctagcatcaataaatttaatacacatttactgaagaaaaaatataaaaaacaaaatcttcttttcacatatcacttaaattttcttataaaactttttaaaaatctaatcgcacaaaaggttatttcaaaacatagttttcgagaagtagcntaaaattaaaattgactaaaataaattatcgtactgtcattcaattaattaatgataaatatattagacataaataatttacctgcgtaatgtgcgtaacaaaagtctaaaaatttttaaacgactaccaaatttaaaaattcaaaaacaataataactctgtctactgtacacaactccggtgtcgaattactttggactgaagacatcaaagcattagggcggtggtattccctcgaagaaaaaaattctgggactgtcatctcgcggtcttggtccccgtctcggacaaaaatcgagttcccggtccagacttttcaggtccggtaatccttcacacaactctaatgtactaattaaattagataattattctttattatttttcatatattataaagatatctttgtttatttatattattttttacatacaattatttttatgttttatttaaaaaataagttcttgcacaaacgcgaactacatctgaatatttgtttaggctgtaattattattttatatatacaataaaatatttgatatttaaaatataataatttatatttattattttataattttggacttttttgaacttaggttattttgtgataattatctacaatatatatttaataaatgatcattttattaaaattttggatttaaaacatttaataaatggttttattttaaatcacatttgatttatttattgttcacttaaattatttatatatttttaaacatttcatattgaattttacttttttatataattaatttttctatgagaatctaaactaggaaattttaaatttcaatttcttcaatatttataaaaatcaaagttattattaactcataatatttggttattattcacatttatagatttaaaataaaaacatcatttaggctcatcatttcgacattgttcatttcgtctgagaaataattttataaaaacaaaaaccttcactgagaaagcataaagattcataaatccaaatttaacaaataatattataatttttaaacttaaatcaaataaatattatatatttttaaattttaatgaaatattattttattttaacattttgtttgcgtttaatgttttctttaaatttttttttattttacataatattgaaaattaaattggaatatgttacaatggagtacggaaagttgcctaggaaattttttgttgtaaattttactaaattttgttaacaaaatttaggtgatttagattttgaaatttaatgaataattctggaaatttaagttgtaaatgttttgttttattatttatttaatacaggaaattagtaaattgtttttaaaataagtttatggaataagtgaatttttattcatttagactaaatcaccttcactctctttataatttttctattattatcttaggttttttctgtgttaaatcttataattttaccgttttcataaaatttacaataatacttaagttttcgcatactcaaatatttttttaaaatgttaatttaatttcagtgacgataaaataaatttacattttttaattaatttttgttcacagcagctagaactatctcatggtctgcgatcttatgctattatcatccatgttttctaagccagtcaattccataacataatagtattgtaactaaaatttattgttagataattttatagaaatatttattttgaaatctttaaaaataataaaatttatattatgcaaaaatcttaatttttacctttagtttgcagtggtacgtttattcgcgcgcgatttattccattaatgtattataaaatcattattttcggtattttcatttcattacttttatttttaatttttgagaaattgtctctctctctctcttttaagtatagcagcaaaaaacaacaacaaaaattagcagttaatgtgagtgacattggccaatacgtttgttctttattgtttattgtcaataaagaaaaagtccacaaaagggaaaaatccgcttacattgaggacaaaacattaatttaaaaaatgtcctcaagaaagcgcaaaacaattaaaaacgagatcgccgccaaaaaataaaatataatatgaaatcaatacaaataaataaatagcaaccaaatcacttttagtttgaatggattaaaaattcgactttaatttttccggtctattttacgggaatagagatagttttaattttatttttaaattgatttaatgagtttatttcaataagctttttatcgagttggttccaaatttttgttacccgccccgcaaaagtataaattttttgcctaatttatatttcgagttaagtctataaaagggaatgttaaagcgttcagaaggtttaagtatttcaaagggattcagatctgttcggccataaattattttatgagccatgaacagatcagacagctttcgcctgctttcaagtgtcggcaattgaaggtattctaatctttgttggtatggaatgggtggaaggctgcatttgaaaagaactcttttggtgaaatatttttgacattttttcaatttttttaatgttttttagaagagatggattccaaacctcaggagcatattccaataacggtctaacata

SEQ ID NO: 93 - DNA, 7174 bp, Heterodera glycines
agaacgcatacgtaaatatgcattctttattatttgtgtgacatgattggaaaattgcaatttattatcaatatttatgcctaaatccctaattgtatccacaacatttattatatttccatcaattttatatatttctttggggtttttattccccaaatgaagtacaaaattttttttaattgagattctgatctgccatttatttgcccattctgataaattatgcaatgctttatgcataatttctgtttcggttcttgctttataacaaatatacaatttaacatcatcagcatataatttaattcttactcctgatggcaaagcatcaggaagatcgttaatataaatcaaaaataataaaggtccaaggacagagccctgggggacgccagagccaacttttttactggatgataaatcatccccaattttaacacgaaaagtcctattactcaaaatgtcctttatccacatcaaaagtttgccccttatacctatttttttttaaataaataattatatatttttaaattttattgcatttttttattttttattgcattgttaaataacataactaaattttttatagtttaattattatgtgaatgctttatgatttatttttaaaagtacaaaagatgctatttgataaaagcatattttttaaataaattatttttgtatttaacaggacggatatactcttttccaaggacaaaggtgtaaatccccttaaattcgagaacatttaaatttgaccataaacaatagaaaatgattaaattttatccaaattgtttatgtttttcgcttgaatcttataggcgtcgccgggaaaaaatacagttttcttgaaatcttaatttttttccgttttacaaaacttttaattttgtttcgaaaaagaatatgccatcatttaattttcttttttaattttaatttaaacttaagtgtataaatgtataataattccgcataaagattgttttattttatatcttactaaatttaattatgcatagttatttatttataggcattgtttatcggatgctagctacaatcgtatagccacttccgagaacgtagaagccaacgttatttagcttttttaaaatttattttcaattagcaaaagtaaatccatttaatttatttaatgtaattgccagaaaagcataatattgcataagccttcactgagaacgcatagaataattacataaattttaacaaataatattgcacttttacacttgcgatcatcagagttttcgaatcgatgtgaaatttcttgaagtaataattaaaaaaaattagcttgcttttgaacaagtgtttctttgaaattgatattaaataaataaatttatcataaattaaaagataattcaatatacttgaatttaaggggtcaatagcagttcgtacaatttgcagttcgtacaataggcagttcgtcaatgggcagttcgtacactggcgtttcgtccaatggcgtttcgtacaatggcgtttcgtacaaggaatttcgtacaatgtttcaattgcggatttcgtgcaaaaaaaaatatttaaagtcgatttattctttaaaactcatttaactacttgtttttattcccatttttgtgaatgtttgaaaattcaacaataaattgtatttcctttcttaaaagcaattatttattcaatggcgcactttgttaagtccaaatgagaccacaagaagcttgtttatcaaggttttgtctatcagcatcatcttacgcacaatgatgcgagctattagttttgcgagctgaagaagacggcgacgaactgtccaggtcgcacaatttaccgaaacggaattgtcactgtttctgccgcacacaaagaacacgcaccgtcagccataaatgtacaggttcaaaaggtacggtcgaatatgcgggcaaataacacgcctgacgctccgcgcacgtggtaaatgaatgcctggcgggtgatagcaatgaagtcattgctaatttgccaaaaatcgcaacattggagcaggcaattagtagaaagcataagaggcagggggtccagctgaacataccgcacacacttgccaatgttttttccccgaagaacttcgctacacccgaacgcatttggcagaaattatgttcttgccgacaccggagcagaagaccaacaaagaattattcttcttggctctgcgacggatgttgaacgcctcacacgatgtgacacttggcttgccgacggaagtttccgctgcgcgccggaaattatttttcaggtttcgagaatattttttcagagaatatatagcaaaaatggttattaagtcggggatgggttggaaaaaccaaggtgttttttgattaggtatacagcattcatggactttatcgcaatcgagttgtgccactaatcattgcacttcttccaaataaaactcgttctacttatgaacgagccatacaatcgctgctggactcgtttattgttcatgctgatccacgacttgatcaatcacgccgccgaccatcgactaccacttgccccctccaccgccaccaccacaattgccgaagagaaagcacgcagatcagcatacttcaaaagagtttttcgaatcagtttcggcagcaacgacgggattagacgttccacctaagcaaacaaagcaagcggaagtggagttgcattttttgaggcggcttctgcagcgaacatgggaatggaaactggtcaacttaagcctaaaccaaaaccgaaacagcaccagcaggcggacgtatcacatttcttttcttccatttctgcagcgacgatgggaatggaaactgatcaacttaagcctaaaccaaaaccgatacagcaccagcaggcggacgcatgatgagacctacataacttaacagaaaacgcaaagcccagcatgctttaaatgataaccgagaagtgaaaaaaagcctctaccccattgccggatgatgatgccgaagattttgaacacacacagcaacccgccacctcgtctcaggtccaacctctcccacctagacctctgttgcctagtaaaaccaaaaaacggaaaagcaacaaggcggaagaagagaatgaaagaaaaagaaccaaaattggctctcgaaagagggacttactggcagaggcagccactgccccattaccggttgatgatgacttggaactctcacaacaagcggtgacctcggctcaggtccacccacctggacctccgttgcctagcaaaaccaaaaagcggaaaagcaacaaagctgaagaagatatcgaaagaaaaagaagcagaattggttcccgaaagagattgtcttcacccactgttaccaaaaatgtaccaaaaagacaaaagaacccggctagtgaagcactctccgaagatcagcggcgtcagtttgcggaggatcaacgccttttcaccattccaaattcgcaactaaccaatgagcaaaagagaaggcggctttagttcgtatttaatcgtaacccaacaatgtacggtgttcacggtgacaccgttttaaacaacgcgggaaacccaataaccgacagtagtgtcgcccaagctctcggctatattattgaacgcagagctggacgaattccacagtttagacagcccccaggaacataattgatcatagatcggattaaccgtgaccttattttgcgaacatggacggctccaccagtaccaccaagggcaccgaaacggagattgccacaagtagagcaaacgccggaattaaaccaaaaatcccaaaagctcagaggaataaggcaggcgagaggcagggtgcaagaaggaatgacacttccgtttccaacgaggggagtcaagcggaagtcgacggcactgggaggctggacctgagacgagtggaaaggggtatataaaatcgaattcattcagtttggtaacattcttgatcaattttcaaaaaaaaatggctattaataatagtgacaaaaagtcattgatggagaatattttgccttctgttgagattagccaaaactcgaacggtatcacagtaagcagtgaacgaattgccgtgccgcgcacgattcagttcgacatccttggcaagtgtcgagagtgtaaggccaccgaatgtgaggcggagtggtgcattaccaaagaaggagtgacaatcccggtttgctgtctccaaacagaactgcctccgctgcatgaatttgttgtggtgaaagcagtttgtacgcggcgcgtacacattctttaggaatgcgacgtgaacacgttggcgtcttattggggtggggggtttacatttataggtaaatgtgggtttaggctaccgtttgcaaaacatcgcacaacggttgaggcgccggggcatcatcgagcgggacaatttggagtgccggaggcgcaaattgatgctgctgctgctggtgttgcagatacggttggaaagtgaactgtagcggaggaagtaccaaaggcattgtgaatggtgggaagacgggcagtggtggcatgcgcatttgcaaagtgctgatcgcctgttggacggcagctgaaagcatcggcgacggttgttggtgctgtgttgccgggacgcaatgtgtcaattgttggtattgctggtgctgctcctcctcgacatgttgctgctgctgctcctcctcgacatgttgctcctgctcctcctcctcctcgacatgttgctgctgctgctcctcctcctcctcctcgtcagagttcccctcgatgcgcactaccacctcctcaatgggcaatggaacccgggggaaaacctggtcctaaatcaaaaatttggctgttgccatgtcatgactcatcattaccaagggtaccctttctgcattgcgtagcccgaacacctcaaagttctcagggtgggcaccaccgacccgtgctatttcgctaaattcctgatgtttatttgctgattttcgccccaatttcctcacatttggcgtgctctcgttatgttgatggcaccggcaacagctgcatgggtatacacagcttccatcagacgagcgagggtatacccaatctataaaatgcatttcaattcttaaatccccgttctcgctaattttacatggctgagaacttcctcatctttgaggtactggtgatcggatgattggtacctaattaggtaccaaaatcgaacaacgccacagacggtgcattgcgccttgtcgtacaagaccaaagacgtcacatcatactcagtggtgccatcgtcctcttctgctcgatcgtcagcgtcctgatccgggtgtcgatgttggcactaataaataaatttgtccattaaaaatgaggtagtcgcgaatggcttctaacttattttgcactcaaaattatcattttttgcctataatccataatttcgcaattaatttagacttattagataaaaattaccccgaccgtcccctaatcacaatttcaccagtttttataacgcattcattaaatccaaattttgccgccgccaaaacatgtcaatggggcgcttaaagtcacttattcttttctgtccaatattcctagcactaatctttgctgatcaccccgaaccaaacaaagaaagataacatctgtatggccattttgacaatgagtcaataggacggaaagaatttcgtttcacccggattataaaacttgactagaagtcattgatggacatcgagtggtgtagtccttttgatataaatttacttggttttccctatttaattttgtgaaattttaattttttatttaaaataaatatgaatttattttgagaaaataaaattatttgtaaatttctttatttatcttaattattttttttaatcatgacattttcgcgttgtcattcattttgttaaggtgaggctgagtttctttttgttaattatctaaattatttttagttttattttccttttatttatggcttttttcttttttaaataatttaatttatttgtgttgtttatattttttctgaaaattaattaaattttgtaaaattttaaagaacaaaattcattttttttctttttttaactggtatgtattaaaaattaataaaataaattgggaccagaagatttatttagcaaatattaattcatttcttattccaattatattaataaattagaaatttattttctttcttcccttttttatataatttatattttatatatttaaagttaaaaatcaaataataaaaaatgaataaaagcaaaaacaagaccaattaagtatgaataaaataaatttaaggaaaatgaaatagttttaattttatttttaaattgatttaatgagtttatttcaataagctttttatcgagttggttccaaatttttgttacccgccccgcaaaagtataaattttttgcctaatttatatttcgagttaagtctataaaagggaatgttaaagcgttcagaaggtttaagtatttcaaagggattcagatctgttcggccataaattattttatgagccatgaacagatcagacagctttcgcctgctttcaagtgtcggcaattgaaggtattctaatctttgttggtatggaatgggtggaaggctgcatttgaaaagaactcttttggtgaaatatttttgacattttttcaatttttttaatgttttttagaagagatggattccaaacctcaggagcatattccaataacggtctaacataagttttgtacaaaataatccaaatcctagaagactttgatttaataacccgaaataaagaacgcatacgtaaatatgcattctttattatttgtgtgacatgattggaaaattgcaatttattatcaatatttatgcctaaatccctaattgtatccacaacatttattatatttccatcaattttatatatttctttggggtttttattccccaaatgaagtacaaaattttttttaattgagattctgatctgccatttatttgcccattctgataaattatgcaatgctttatgcataatttctgtttcggttcttgctttataacaaatatacaatttaacatcatcagcatataatttaattcttactcctgatggcaaagcatca

SEQ ID NO: 94 - DNA, 5732 bp, Heterodera glycines
aagtcaatcggtcaagggggggcgcgagttttgctgcgtaagtcttggggtgcgcgaggggcgggggcgtcgggaatgtaccgctcaaaatggtgctagaggcaaaattctttcaccgttcagtttatggggtggtgggttgactgactgtaaatttgaagtcaatcggacaaggggtgcgcgagtttaactgcgcaagtcttggggtgcgcgaaggggcggggcgtcgggaatgtaccgctcaaaatggtgctagaggcaaaattctttcgccgttcagtttatggggtggtgggttgactgcccgtaaaatttgaagtcaatcggacaaggggtgcgcgagttttgctgcgtaagtcttggggtgcgcgaggggcggggcgtcgggaatctaccgctcaaaatggtgctagaggcaaaattctttcgccgttcagtttatggggtggtgggttgactgcccgtaaaatttgaagtcaatcggacaaggggtgcgcgagtttaactgcgcaagtcttgggggtgcgcgaggggcggggcgtcgggaatgtaccgctcaaaatggtgctagaggcgaaattctttcgccgttcagtttatggggtggtgggttgactgactgtaaaatttgaagtcaatcggacaaggggtgcgcgagtttaactgcgcaagtcttggggtgcgcgaggggcggggcgtcgggaatgtaccgctcaaaatggagctagagatgaaattctttcgccgttcagcttaggcggaggtggattgacgaccgacccaatgtaccgtctgaacttgctcaacaattcaaatgcccccccctcctcctctgttctcacttcactgtgtacaacgacgctgacccttcccatgccccccccctagattcttatctatagttcatctgcaacggccctttctccaccaacccatcattttcatttttccacttaatattgattcgttcttcattttatgtgtttgtcccgtcctatttttatatttgttcatttattttgttaattgtaacttactaacaaattaattaattaattaaactaacaaagaaaagaaaagcaaacaaaaacgaaaagacaagcaatgaaacaaaaagacatgctaaagaaatttttaagctaagaaaagaaaagcgggcgaaaaagaaacgcaaacgaaaagccatgaaaaagaaaataaattttaaagataagaaaagaaaatcagccgagtattgaaaagaaaagcaaaacgaaaagccaaacaaaaagccacgaaaaaaaaattttaaaaactaagaaatgaaaagcagtgcagtattgaaaagaaaatcaaacgaaaagccatgaaacaattttaactgctaagaaacgaaaagcagtgcagtattgaaaagaaaagcaaaggaaaagccaaacgaaaagccatgaaaaaaaattttaagcaaagaaaagaaaagcgggcgaaaagtaaacgcaaacgaaaagcctaacgaaaagccatgaaaaagaacataaattttaaggctaagaaaagaaaatcagccgagtaaaaagcaaacgaaaagccaaacaaaaagccatgaaaaaaaaatttaaagctaagaaacgaaaagcagtgcattattgaaagaaaatcaaaccaaaagccatgaaaaaataaattttaatgttaagaaaagataagcagacaagtattaaaaagaaaagctaacaaagagctatgaaaaaagaaattttaaagctaagaaaagaaaaaaaaaaagaaaagcatatgaaaaaaaaaacgaaaagcccagcaatgaaacgaaaagccatgaaaaagaaatttttaagctaagaaaagaaaagcgggcgaaaaagaaacgcaaacgaaaagccattaaaaagaaaataaattttaaagctaagaagaaaaaaaaaaaaaaaagcagtccgagtataaaaaaatgccaattcaaatgttgtcactcacataaaaaaaactttcgttccatactaattttctactatattgcttttttttttaagcgaaaaaattaaattgtgctttattgttatggctcaacaacaacaacaacaaaatgtcttggggcaaatggcaccttttggccaagtcataaaaaaataataataataataaataataacattcaattatttaaaggttgctcagttagtgcaaccaatgctcgtcaacgcggcacgtcagcaattggcggtgctttattctgttttacatattaaatttatgccaaactgtcatttcaggagcctttctgtgcggacggcacgcacagcattcaatttttgaatgactgcgtttcttcgttggggcaaccattgccgtatgttatttaatttacaagtgccatttcgtaatgtgctgagtttttttttttagcccgctgtgcctgatcgtcgtttcgattgatcatcgaccagctcagcaaacgccagcgggtccgctcgcggtctccaactgcgtcctgcgcaccggcgaagggcagcgtgtggaagcctccggatggcagcagcatgctggtgtgctggcttccctgtccgtcggcaccgcatattggttgttcaactgtgtcgcgcggccccgctacaggcagctggactgctggttccgcattggggttggaggccccaatgcgtttgtggtgccgcacgtggccccacaggtaagttttttcttttaaattttaaaatgtttatttttttaaattttaaaatgtttattttttaattatgtttaagcttccgccaaacattccaccaacggtgtccgttcagactggcgccgggcgtgatgcaattcatgtgtcgccaaacgtgaccaatgctggtgctgaacaacgcgcggacctggacaacaacaagaacaacaacaataacaacactgtgaggaattgatcttttatttaatttgtaattgctttgttttatattgaataaatttttgtctcaggacaatgttggtcttgttgagccgcgtccaagaggtgtgcgaccgccacagcggcgcgcagctgaaccggttcgtttgagggtccgatttgatttgtgtccagaagtagaagaaattgggggtattgaaagacaaagaccctatcctgcccgtaaaattcgtgcattgcccacctttgatatttcgacaattcacgttgaaaaatgcctttcctgtcccatatgcatgtgtccttttgtgagtggggagtgtgccacctcactccattgtttccatatttttcatgccccatgtattgtaccatggcttaggattcagcgctcatgtcctgtttgtaaatttttattgccatgaataaattttttgttgttctctgttaaggcgattgaggacagtttcgtcattgagcgcaccacgcaaatgaggaatgtgccacggaacactcgtggcgaaatttgtgaactgcgcttcctgccgctggaggacacacagcggcccgacttgttgatggaggtgctcatccagcatctgctagaccgtgtgctggacggtcacccgccgccatccctggttggtctgcagctgcacccaccaggctttgaccggccgtacgtcatccgccttcgcccgcccgagcagaacaacgctgcggcactggcggcagccattgagcggctcaatgagcagtcggcagccggcattgacctgtttgctgggacaacggtcgccaaagttctggcggtgtggccactcgagccaattcgtgcggacccacaaagaggaggtttgttcttcgattttcaagcacattacgttgaaaaaaaaaacaggtggctgtgatttggaggcggaacaccatgcttcgcacaccgtgcaatcattggtcgtgtcgttaacccaaacgaccgtctctgcctggcgcgtgccgtccttctgggtctgcgggaccgcgaaacgagaatggctggtggcggtggccgtgcagcatttacggagtacgcgcgtcatcaggagcaacatgggcgtgacgcagaagagctgctgacgcgtgccggcattccccttgacaaagggatgtacacgctggtggacgtggctcgactacagcggatgttaaacaacacaaatggaattggccaaatccgcctggcggtgtttgaaaaggagcgggaataccttattgtctataagggtcaggggtaaatttctgtcttaaataatggatttcaaatttctggtctaattaaagcatggcggccaaattcaatttgtgcctgctgttggaacgcggccatttcaactaccttggccgcgttgaacaactgttcgatgtccaacgctactgcatcgactgtgagcggcgagcgcacttgcgctaccacttctccggttgtaaagttgtgtgccgcctttgtttgcggtttgggcccgaatatccgtgtcaagcacaacaggtactttcaagataattaatgaaaacatataacaaaaaaactaagcttacaaacggcgcaagtactgcccgacgttgtggtgcgtgccagttcatctttcccaacgatgattgctacgactaccatctgatcgaacatgctccagctccaatggatgcccgaggacagcgtcagcgtcagccaatctgtcaatggcgccgagtgtgccgtgattgtgggcgcatcgcctaccagggcaaacatcaatgcccacgtcaacaaacagccgacaacgggaactgtagacgttgcgacgggcctcacaccgccgaagagccctgcttcatccagccaatttgtgatctgtctgctcggcaacgcgcatcagttgctgttgacaacgacgacaactcagatgacaacggtgacgatgacggcgaagacgacgtattgccgcttcgactttgcttcttcgatgcagagacgtcgcaggacagcccgctccagcttaacaaccgattggtgcagaagcacgtcccgctgttgatcattgcagaagtcatctgtgaacgttgtcttcaggttggcatcagcgtcaacgatgggcttggaagaagagctcctgactgtgtttgcatgccaggaatggtgaggggacaacagttacgccagtggtcttcaccaccgtttgccaacacacgcggagacaacacagctgtgccaatggaggccccgacattcaaccagcgccgtttctactttcactcattcgacaacgaagccgacgacccagtggaccaatttttggattttttgacccatcacggtccaaaaaaggcacacacggtgtgcattgcacacaatggcggcaaatatgatttccacctgatcctggaggcactccatcgccgaaatcagccaccaaagcgcctgtgcaccaccggcctcaagatttactccatgcgtctgtcagggagccaccaacgacgggtcacattcaaagactccatcaattacttcttttgtgaattggatgcgttggtgaagagctttgacctgcccgaacatcaggcgacggtgaagcccttcttcccctacctctacatacagcgacaacatctgctgcaacgcctcgacacactgccagctcgggagttttactccccggacacgatgaaagcagagaaacgggccaaatttttgcggtggcatgccaacaacaacggcaacgggtttcaactgcgtgagcagctgatcatgtattgcgccaacgaccttgccattttgagggaatcggttatccgatttcggaagctcttccccgac

SEQ ID NO: 95 - DNA, 8396 bp, Heterodera glycines
cagctgaaaaccgattggtgcagaagctctcccagctgctgatcgtcgctgaagtcatctgcgagcgttgtcttcaggctggcatcagcgtcaacgatgggcttggaagaagagcgccggattgtgtttgtctgtgtcgtatggtgaggggacaacagttgcgccagtggtcttcaccaccgtttgccaacgcacccggagacaacacagctgtgccagtagacgcgccgaccttcaaccagcgtcgcttctacttccactcatttgacaacgaagccgccgacccagtagaccaatttttggattttttaacccatcacgggccaaaaaaggcccacacggtgtgcattgcacacaatggcggcaaatatgatttccacctaatcctggagtcactccatcgccgaaatctgccaccaaagcacctgtgcaccaccgggctcaagatctactccatgcgtttgtccgggaatcaccaacgacgagtcaccttcaaagactccatcaattacttcttctgtgaattggatgcgttggtgaagagctttgacctggctaacgaccaggccacggtgaagcccttcttcccctacctcttcatacagcgacaacacctgctgcagcgtctcgacacactgccagctcgggagttttactccccggaaacgatgaaagcggagaagcgggccaaatttttgcgttggcatgccgacagcaacaacggcaacgggtttcaactccgtgaacaactcattatgtactgcgccaacgacgtggccattttgagggaatcggctatccgatttcggcagctcatcgccgacaacacgcagggcctcgaccccttcctcaacgcatccacggctgccggtcttgcgctcgccacgcttcgtcgttgtttcctggccccgaatcgcctggtccactcacccgagggcggctacctgcgcggacgccgcgcatcggctgagtcgcagcggtacatccgcttcttcgagctggagaaccccggagcgcaagtgcagtgtgcgcattggtccgtcggggaggcacacattgaggacaccggctaccgcgtggacggtctttggcgacgcgatgcgcctcttcgtcccctggccattgaatggctcggctgttactatcatggtaatttttgttgtttgttttccaaaattgacaaaaaaaaaaaaaatcaaggatgcccaaagtgcttccccgaccgacagcagcgactggcggcggggcggactgcggaagacctgtacgaacggacggagcggcgtctatttgagctggagcacgaacacggttgtgagatccacaaggtgtgggcatgccagtggagtgaacgactacgccacgacccggagctgaagcgacggtacgatgccgtgttcgtcccctgcccactggacccgcgcaacgatgccttgaggggaggccgcacggagccgttcaaactacaccacgtgtgcagcgacaacgaagaaattttgtgcatcgacatcgtgagcctatacccatacgtcatggttggtcatttgaactgttcccttaatttttatagtcaataattcagaaggcaaactgcttcccggtgggcaacccgcgggttctgacgcgcgaggtgctgctccatccccccacggcacccctcccgtggactgcgccggaaaacaacaccttccgggggctgctgcttgtccgagtgctggcgccacgcgacatccgtgtgcctctgctcggctaccgcacaaaggatgagcgcttcaccttccctttgtgtgggtggtgtgccgaccgacgacagcagcggccgtgccgtcacagtgacgacaagcgttcgtgggtgaccgcctacacccacgtagagctgaacaaagcactcctacttggctacatcgtcaccgacctatttgaggtaattagttattataaattttgtataagaaaaaaaataggtgtgggactacgatgagtgggacggcacgctgttcagcagctacgtcaacactttcgtcggtctcaaagtgcaggcgacggggtggccagaaggatgcgccacggacgagcagcgtcagacatttgtggaggactttgagcgcaccgagggcatccagctggaccctgccaaaatggaattcaaccccagcctgcgcctcatcgccaaaactttggcaaactcactttggtcattaataataataaaaaatttatttttaaacgaaaaatttacaggggaaagctcgcgcagcgtgtgggccgaaccgaaattcgctacacgcggacgccggctgaattccacgagctgcttgaagacccgtcgctggacaagttggattttgtccacgtgtccgagtacatggaccgctgtgtcgtgcggaagcgccccgagttcgccaaggccccgctgaccaactgtcttccggtcgcttcgttcgtcacttcatatgcccgcctgcatctgtacgactacattgagcaggtgttggcgattgacggagctgagctgctctactgcggtatgctgttttttcacaaaacatttggtgtacacgcttatgctttagacacggactccatctactacgtaaacaagatgggtggtccgtgtgttgctgagggcgaggcactgggccagatgaagcgagagcacactgatcgcagaatcgtcgagttcgttgcgggtggtccaaagaactacggcatccggcatactgcgcgggacggtacggatgagcgtgccaacctgaagatccgcagcttccgcctgtcgtacgcggcccaacagttgctcaactttgaggcgatgaaagagctcacgctggccacgtacaaaattgacggaccaatgtgagttttgcaatttatcattaagtttgtaaataataaaatcttagcgacgacgtgctggacaatgacgacctctacgtgtacggaggcggtgagcatcgcgccattcgggtcaacttcccacatattgaccgcaacgcttacgccgacctttacacacacgaggcacacaaagactacaggcccttctacgcaaaggggcgtgtccgccccggaatgcagacgcgtccctttggctatgtggaggatgatggaccaccgaacgatggacaacggacggagcgacgaaagagaaattttgttgatcatgaccccgcccaaccagggcattccgggtggttttgatgttgtctttttattttttgttcatttcattcaaataattgtaaataataaatttattcaacgataataatttggtaaaataatagacaaatcattaaatgaatgttggatgacatccaaagttttggccccagtgacaatgaccttacccgaaatataaattaggcacgtgactccattcgacaatttgcacctaagggctggaaaaatagtggggtcatatgtgccacccagagtgttttgaattcgctctacaccgattcgctgggggaaggtttgaacaccaacaatgttgaccacacgcagttggtagattccgagtgggatgctctgtgtgtgttggatgcgccgcaaaacgcgtgccgccattttatttgcgctgtttgggtggggtactccggtgaggaccacacgcgccgattggaagatgagtgctgccacagttttgcccgttgttgtacggattcgcatgatgatagcgtggaagcggcgtgcgttgtactccgtgtttgcgccacgctgtgcaattgccaaaaattgctttcgagttaagggttcaacatttattttaaaaacaacagtacaatttgaaattgaacacatctacaaaacaatggacaaaatttcaagagggaaaaaagttttgtgatctccgcctccaaattcaacgacgcacggcaagttggggtggcgcaagcggatgccatgctttatgtaatagtgcatgcggacctttaattttttgttaccgacaaacaaaacaaataaaaataccgttatgccgaggtagcctcggtacgcgggggccgagtgggtgtccaggatggacaggtcattacagcggaccggaaaattgcgcacggacgggcgcaggtgggcggtgcgcagtggacgagcgcaaatgctccacaatgtcccggcgtttctctaagcttttgaaaagcacatgcagctcgtgagcgttgcatttgaaccgcttgcagagatggtccacgagcggaacggggcgacggcgttcggcacatgcacatttttttggagtgcctaaatttaaatttaaatatacgtttaaaacaaaagcaacttgttgctggcgtctcctcaccaattggagcgagcggctcgcgcttcatctcctcgtcaatcaggctgatccaactgggatcatccgcctcctcctcttgctttttcgttggctctttgttggcgtcctgtaaatccatttcgggataagcgttgtttatccaatcggtggcaagaattaaatccatttaaaatctgtgaaaataaaaaaaaaaactataaataaaaagaaaattacataaaaaaaagtaaaatggacgccttccaacaatttaaaagggaggatggacaatttcgtcatccattcacaatgattgtgtctgggagcacaggaagtgggaagtcagagtggataatgcgtctgttgcgaaatgtggacaaaatgatctctacccctgttgaacgcgttatttatagctatggtgagttgaacacaaatgtgatgaatctgcagcgcgccggcaaagttgccaatgtgccagtcactgtacacagcggcgtcccacgcgcggaacaagtgcgggagtgtgccaaaaaagaaaaaaccttgctggtgctggatgatttggtggtgggtatgagtcaacaatatttagacgcactcttcacccgtggctcacacaattggggcgtcagcgtaattttggtgactcagcacctgttcaacaaagagctgcgtgtggcgcgcactaattcacactatttagtattaatgcgtaatcctgcgggggcgttgcagatacgcaccatcgccacccacctcttcccgtcaaggactgcccattttattgaggcctaccgggacgcatgcgcaaaaaattttggataccttctcgtggacatgcacccagagagtccggaagatatccgccttcgaacaaatatatatgaacaaaaacaaatagtttacctaccaaaatgaaagggtcacaaataataacaataaataaatgctttttggagacactgtgtaatgccaaaaaggcgaaagcccttattcgatatgcatccgatgagcaacttttgtgccttgtcgaaatttgcctaaacattctaaagggccgagtccctttgcgtccccggtatttgaataagctgaaagctcatgcacaggtgcttcgtcgtctcgccagcacacgctgctcgcgctctgccaaaaaggttttgctacaacacggagatggcctcccagctattgtggggctcattgcgtcaattgctctcccgcttattgctgatgtcattgaaaaatataaatagtttccaaaaaattaaaaacaagaaaaaatgcagcatacaaagcgctatttgttagtccccgaagagatttatcagagtttggcagcaccgccaccatctgacggaacaccaattgggctggtccgtacccgaattaaacaaataaaaaatgatgacgccataaatgaggcggaaagggcagtcaaatatgagcaggaagttaagcgtctcaacaagctcacaaaggacgaagatgaacgtcccgtgggtgttaaattagaaaatttgagtgatgtggttgacgccatgccaaaaccagtcaacgttacaaggccaattgttgtttctacgcgtcgccatcttaaagttgggcgtgcgcgaaaagaaaatgttgaacaattagaagatactgatgatgatgatgattatcaaaacccacggtcgtcaagttcaaataaacgacaacccacacaaacggaaatcttaaaattaatttataaaaacgcccaatctctaggggtgtcggaggaagggcaagttttgagagccggtgggcgtccatttataaccagcagtgttgatgacattgttagtcacctgttgaacaaggacaagcgtggccaaaataaagagccaacggcattcaaagaatttgttgaaagggcaaggcagaatccgctcttgagtaggcatttatttcccgaaggccaatccggcaaaggaatttataaaaacaccccacttaagtttaagccatcattatggatttgaaaaagcttcgcttgcgcgagtttttgtacaaggacctaagttcgcctgtcgcattcacgagcgttgaaccgctgctgagagaggcgcggaaaagtcaaccaaaaatcaatcgaaacgatgtccaaaattatttgaccagccaacgtacatacacactgcatcgccaggcgaagcggcgctaccgccgattgccaacattggcgcccggcttgcatactgaatggcaggccgatttagctatttttgaccgacttggtaaacaaaatcgtggcttcaagtacttattagtttgtattgatacccttagtcgacaggtgtttgttgagcccgtaaagaccaagacgagcgctaacatgatcattgcctttaatcgtatattcaaaagatcaaaaatatatcccgtggaaggtgttaacagatcagggaaaggaattcactgcccgggcagtacagcagttcttccgcacaaaagacgttgaacacttttatatgctcacttctccccaatttcatgccggaatggcagaacgtgcgaatcgtagcatcaaagagcgcctttaccgctacttcacggagcgcaacacgtacaaatggattgatgttgtgcaagacattgtttgcgcaattaaccactcgacaaattcgagcattggaatgcgcccagtagacgtgaactttaaaaacgcagaagcattgcgacaaaaattacatgatgcagctgaaaatgttgtacgacgcaagccaaaataccgtgtgggagatcgcgtgcgcattgaaaagtacaagcacgtgttccaaaagggttacctcccacgcttcaccaatgaacttttcacggtggcagaggtacactctgagcgttcgccagttgtttatcggttacgtgatgacaataatgaaattattagtggttggttttacgcaaatgatttatgcaaaacgctagaagacaaacaacaaaaaatgtttgacattgaaaatattttgaagaaaaagaggcagaacggtgtggaatatgtacttgtgaaatggaaagggtacagcgctcgctccaatagttggattcccgcaaattcaattagcgagaaaaatatataaaaagcattatttaataaaatttataaaaaaaaaaaaatgccttcaaattctttttatgttgttcttccgtcaaacaccaatattgaaggaaataggacaaattctttccgagtgcgtttaccgcgcaaattgcaattcaattcggaatgggaggtgggtcttgccgttattgtatacccccactcttggccctcgataggcaccgtggagcaacaatttgtacagattgagtggcagacagggaatacggtacgtatcgaagttccgccgtcaaatgtcaccaacccccatgagcttagcaaaaatttatacaggctactgggtgagggaagtgatccgttggcaaaaaaggtacgatcaacacagaattctttcatgcttttgataaacaaggctcgccgctgggccagagaagaatacattaagcgaaagactaaagaaaaacggggcgtccgtgacgaagagctgctcctacaggccatgttgacagatactggaacattggttgacctgaacagcgtggcccaaggctttctgacacgcgaaaagagtgctgcaacgagtaatgtaccgttgagaatgccagctgatgataccaattcgtaccaagaaaaattggatgagtacttttcaaaattaagtgacaaaaatttgaacattcttgatgaattgggcatgacaaaattgaacgccgaaatcaaaaatttaacagaagaggaacgcgtgatctttgaagccacaaaggaaatgggaacggaagcatggattcaggcgtaccgtgagatacgtcttgtttgccaatttaactatgacgtccatagaaatcgttttgtcctgaacatcgacccacggtacgttaaaaaggtcaaagtctcgcttcaactcgcttacattctcggtttcaacaacacggagtttattcaatctgaaaacgagacaagattcatgccggacatgagcggaggggtgtcatcattccacgtttacacgccggatcttattga

SEQ ID NO: 96 - DNA, 5747 bp, Heterodera glycines
aaaaatttgcggatttttttttattattttacttttccccgaatagcttttcagaaggcagctaagaatttttttttgaaaaaatcgaaaatttccagaaattctggaataacttttttcttttatgtgataacaaactcaaataaatcccataaaattctctttatttttctctatttttaaagctttattatagttaaatcgatgaaaccatcaccgagttatgaatttttccaatattaactcaaatttccaagatccaaaacattctcaaaaaatacagtatttttacatgattccaataattatgaaacttaaaatagacatcatctttgtatcgaacacatcaatatccaccagcataatgtttttgaaacgccttcgccgaaacgccatggacccaaattaataaggcaaaggaattcaggggttgctaaaagcaatgagttctgagtaggaaattttctgtgccacatttacactatattttaatcgcctgtgaatttttaacctttgatttatttttattcatttttattacggtattcattttgtattttttatttgatcaaatttatttgtttgttttcatttttgcaccatgtaagagtactaatgtgccgttggtttgctcgataaataaataaaataaaaaaaaattaaaaagaaaattattcgaatgggaaagaaacattcaacgagagaatggaataaaattgaaagaaaaattgcaaaaaaattgggtacaaatcggaacaaaatttatgaatggaaaagagaatttggaatgatcaaaaagcattattatacggatgaggaaaagcgtaaaatattaaagcgatttgatcaattatatgacaaaataaatgaaaaattaaataaaaaattgaagggaaaaagaaaaatatgtcaaaaaataatagcaaaacatttgggcacaaatatcagcagtatttattattggaagaaacaatttcaaaaaggaaactcatcagtgaacaatcaaaaaactggtgatgaaaaaagagaaattgttgaaaaatattttaaaacaaaaataaaatttatgcaaaatggaaaacattcactgaaggaatggaaagaatttagagcaaaaattaaacaaatgtttggtgttaattattggacaattgaaagataactgtcaaaaaaataagtgaatttatcaaaaaaatcacattttttatccatttcgctagtacaattctaatcaaacgtgctaaaatttgaggccaattggtcggagggggctcgtctcttttgctttgcttcgttcggcttttcctcttctcggtccaaataattaattagcacagaaaggacaaacggggccaatgcttattaattaaggacggcgaaatagtcgggaacagttcaatttatttaatttaaattcaatgcgaagacgacggcaattaagagtccacacacaaaatatttaaaggagaaaaagtctgaggtccaaatttttgtgaacaccaaataagaatgaataaaggaaagcaaaagggagaagaaaagcaaaggaatatcgattgagaaaaataggaataaattagagagaaaaacaaaaggaaaataacatataattagagaattgaattaaaagaataaaaggcagtcagaggcaagggaaatggcacataattagagaagaaaaatattatagaaaagccaaattatttcccatttaacacatcacaaccccccaaagaaaaggcgtccctgccgataagttgattcggcatccgatcggtggtggtctgagcaagctagtgccggcggtcgcgcgtcacatcatctcgacggtgtcctcctcaaacgaatggttgtgattggcggttgtcgcggcgtctaaacggcgatcgagaacgagaattcgggcggcggtcgcatagacccaacccatagactctcctagtgaccgaaacgctggagcggaccgttcgaatcctcccaagttgtctgttgtttggccatttcggaatttgtgtgctgatccacgccgacaatgctttaatgccattttcagtcatccatccatctgcattgacactactccgatcaaaggaatcgccataatgccagatttcaatcaaactcctaccaaacggagtcacgaaaacaaaccaatcgccgagcagttcagaaagacggccgatcatttcgtgataggccaaatcgtactgacgaacatacggtggaggcagccaaatgaacgaaacggacggaaaacgggaacacagttgttggatccgttggcactgttccatgatctgatcaacggtctcgtctttgaccagcgaatcacgaccgaggatgatcattgcggcgcgcactttgcttgagaagacgcattcgctaagtggacggatcacttcagttaacagccctcgttccgtgcaaaagccaaattatttcccatttaacacacaaaaacatttcaattctttgtgacgtaaatatttttctcgctctccaagatttacttatttttctgtttttcatcgataaaattcaaattttgccttaaaaatgaaaaaaagtcattaaaaaaatatcaaaaattgcaaaaagaaaaaaaagaaaaaaaaggaaaatttttgagcatttttggatatcttgccaagaatttgagtgcaaaaaagctactttcgtaaaaaataaaaataaaatttccaaaaaatccccaaaatatgtgctaaaaaaattagtgaattaatgacatcagatgagaacgaaaatgtgatatttgtgatagttaccttaaaaatctccataattatagttatctcatattaattactacccaattcgctgataaaaggaaaatttaataattgaattattataaaaatgttgtatcaaattaatgaaataatgattaaatgtggttaatattgattgaagaaaaattaagccatgctataaaattaataattacaaaattcattgcgaaaaatatttttataaaaataattcattatatttttacaaaaaaatgaaaatattattaatatttttattattatgcgcattaatattcaaaaaagcaattaaccaaattgaggctggcaaaattatccaagaaaaaagttttgctgaaatatttggccaaagatgggacgacggagcagaagaagaaaacatctgtcaaaatgatcaaataattcatggagaaattgctgatcagaataaccaatttggacaaaatgttcgtcaatttgatcagaattttgatgaaaatgtggaagtgaaagaagaggagagtgaagaaatgtccacagattatgatgaattgggcgaccaattgccaatgccaacaaataatggacaaagttgtgataaattttcaaatgaaactaataaaaataaaagagaaactgtggaacaatttcataaaattaaagaaaaagttaagcaaatgggaaagaaatattcaaagaaagaatggactaaaattgaaagaaaaattgcaaaaaaattgggcgtcagtcaagagaaaatttacaaatggaaaagagaatttggaatgatgaagaacaaaaattattcagttgaagaaaaaagaataatgttaaagcaatttgatcaaatatatgcaaaattaaaaatgaaattaaatgaaaaattggagggaaaaagaaaaaaatgcaaaaaaataatagcaaaatatttggacattgatattagcagtatttataaatggaagaaagaaataaaagttggaaaaatggtgaaaaatcaaaaaaatgatgatgaaaaaacggaaattgttgaaaaatattttaaaataaaaaatgaatttatgaaaaatggaaaacattcacgaaaagaatggaaagaattttatataaaaattaaacaaaagtttggtgtgatttttcagacaattgaaaaatgggcaaagaatttaggaattgaacaaaataattcaaaaggtgaattttaaataatgttttaaaaatttttttgtttttttttcaatttacagagcgaaacatgttatcaattgctgaaaaaatggaagtcattaaacaatattatcaaatcaaaaaacaaaatccaaaattcaaagaatacgaaattgccgcaaaattgggaattccaatgagctcattagacaaatacaaaaccaaatatggcaatgaatccaaaaacaaattgctataatgaggacaattattattattatcccaagaagattaaatgaaaaattacaatgaaaaaaatttgaaaatttcatttttttcttgagaatttgtttaaatttgagtttgtgataaaagtttaatctctttttttcatctgtttacaaaaatattttaatcattaaaagcgtcgaatggtctaatgttttaggtgattaagtttaaaattatattaaatgttcatattattttaatcttgaaaaattggcaaaatatgtaaataaaaaattgataattcaatcaattaaaaagtaaaaaaaaaatttataccaaattaaactcactcaattaaattaatagttttaatcaaacttaaattaatgcattaatgcacccatctaataatataaattattgcttttaattgaaattgaacttaatgcacccatccaataatataaaattaattattttaaattaaattctaacccattttttctattttacctttccaatggcgagcccatccagtgaaagttggccttccccaacaataaatgccaatgtcgtcctcaccttggcacaaattttcggacaacggaatatgttctttgtcctcaaagcctggacagttccacagagagtcttaaatttcaaaaaataaataaaattaaatttggcattaaaattttttaattttcccactttggcgttgtgtacatttgggcgccggcattacaaatgggtaagtgtcgttgttgcgctgaaaaaagcgccaaaatgcgccgtcatcatagcccatggtacggcacgcggtgcccgtgtcaatactggtccaatttgtcatttgggtacagacggaacgccaacggtcccgaaagcgaatctaatcaaaaaaaaattttcaaaaaatgtattacgcatttttaaaattaagtttaaatgataaaaaggcgttacgaaattaaaaattaaattttttttttttgttacttaattacaatttttaattttttggaacaaaaagatgaaaaaatcatttaagaatcttagtggtaaacgaaaatttgtttattagtttttttagactgtaacattcatagttaatttcaaaaaattccaacattgatcaaatcttgatgacaatgaaaataattctgaaaaatacgctttttttatttttgagcaaaagtcttttttttgtaaaatttcagctcaattagacaattattttaaatggctttaaaatgtaaacctcgtattttttatttttaattcatggtttttttataaaaaaaacatttttaattgaaaacgaacttttattaaatttcgtaaattattttttgaaaaaaaatattaaagaaatttgcctgcagacggccttgccctggacggtgggaccgtcaattagcccgtaattctggcaatttgctatcgtacaccagctgctcttggtacggtagcatttgaatgtgcgcaaattcgttgccaactgcttgcagagggccaagaatgaaattgatggacacccaaatcgggcacaaatatgccaattaaaaatttgccccggac

SEQ ID NO: 97 - DNA, 8672 bp, Heterodera glycines
ttcctaagacaataaattgacttttttttttaaacattcgtttgcttattaaaagaaaattcaaaaaaatccaggtccaggcattgttatccaggccatgacaagcctggacctggaatttgctggatttttgtccaggaattccaggtccacatacaacatagaatccaggttaaggcatttttaaaaatgccgatcaaaaatgccgattgtcacattacacccacctttcatgccaacgcccgtgtcaaaatacatttgtacgcccgtctcaattgtgattgttgcgcccgattcgacaattaattcacgctcaactctagaaagaaaaaattttctataaatttcagaatattttagttaaaattttacaaaattttctttccccggcggcgcccatcggcaccgcctgggcgacaacatttaaattttaattttaagcaaatcccgatgatccagcgggattccgaaataaaagccacgggattggtcaggatcgggatttgaatgggaccacgactcgggatccctcccgatcgtttttccaaaatcttagggattgttcggtatcggaatttgaatgggaccacgactcgggatcgctcccgatcgttttctcaaaatcttagggattgttcgggatcgggatttgggtgggatcacgactcgcctgcgacccaaattttacattttgtgtccaatttacctatttcccctgtcccgcccttttttgaataaatttcccatttttttcatggcacctgtacggcgagttacggaagtacagtgtcacattgcccgagtagaaaccgccgagagtgttgcgaattcgttgtcgagtcggctccaacccattggccagcggcggttgttgtccattaattgtgccacagaggaagaaaaatgccaacaatgacaaaatgccaatattccgcagcattttagtgccaaattatttggaatttttatttgagttgaagcatttgctagcaaaatgttttacagaaaattatgatgttaaaaatagtaaatgtaaatataaaaataatatttttacaaaagaattttaaatgcaaatgtttgaaaattaataagtgattcctggtttttttacaaaatccttaaaattttgcacaaatttcctttaggctggatatatttatttggcaattttttgctttaagcctctataagtttatttttttctattctaattttaattgattataaatatttaagttgaaaataataataataaaaaaaaatttttttctttattttcaaaaataattaatttaaaattaaaaatcgatgaatcattttgttgtgaatattttatatttttttgggtgctttggattggtcttagctgttaggccgagcataggccttttaaatttttatgaattttgaaatatttaatgatgataattatttaattatttgcccacaaaaataataaaataaaaggtggaaaaaatgttttgttgggaaaatatttatatacattctaaaaattctcaaaaaaacttgtactgaaatttctcggcctttttttttgggggggggggggttgggtcttgatctcgagtctcggaaatttcgactcttaagcagccctactaattactttttcaataaacaattagttatgggtcgattaaaaaacattaaaaaaatatacatttaaaattaaaatataattattttttacatcgatgagtcattttattgtgggcattttatttttgggtatgttagccttagcgctgtttggcccagcacagtcatcagaggtcggacggaggatgacgatagataaaatgtgaatgggaaaaatgcatttatttgtccactgttgtgagacgacgccggcggggagaaagggcgaagaattaaagaaaagcaaaaacggagacagatcgatttggcttggattttccatcggaaaattcaaaattttttcagcaaaaaatgtctgtaaaatgaaaaaatttttgtttaaaattttaatattacataccaagacataattcattgttgagttatgataatagattttttttagaattttagacaccaaaagaataaaaactccctcccatttacacacattttgtttcacaaaaaaattaatttttcattgttttatatattaaaaaaaacagttggtgtctaacaaataaaatgctaattagaattaatcaaattagtgtcaaaataatttttaacccaaattgaagtaggaagcattaattattttgtgacgaattttaagcaatttttttttaacttaatgtgaaccaagaaataatttcaggtattttcatgggcaccaggcgatgctgccgagaaattttttgaaaaactattactgaattcacagtaattaatagaagagagtttcacaaaattttttgctaaaaagtttccaatttttcatttttttttttacactaaaataaataagtacaaaaaatgaaacgaattaaatttaattaattaatcaaaataattacaacataaatatttatttttcaattaacgcaaaatcagtgttaaaatgttgtgcattgattattattttggtattggtcactcattcattcattaatcgttggactttagtcgggcggtggttgagcgacttgacgacgttttgtgtgggcaaacaaaacatgacccgacagcagcacaacacaacgggcaaataatatatgagaaggaacaaaatggtggtggaaaatgtgcaaataaaccaaataataaggttattatttagaatggattatgacataaaataatttgaaaataatgcaaaattcccccaattttaaatgaattaattattcataaaattcattgaaatgacaaaattggagttgcgtcttaaagtagtattaaaaagatacaaaaattaattttgaattatttggaagggattattggctaaaataattcgaaaataatcaaaattcatccaattttaaattaattaatttcataaaatttcattgaattgccaaaattggagcgaaattggagccaatgttaaagcagtacttagaaagacacaaaattgaatttaatgaaaagagttccaaataaagcaaatgatgaatttgcagagaacgggacaaaagccagctgatttttgataataatatttcaaattatatttgtccaaaaatttttgggttcaatcgaaacaattgcctatattttttaattctgttgaattttttgtccaaaattgagagcggaatgccaatttcaaggccaagacggttttgcattgacgacaatccgtcatgcttttgacgacaaaaaattccgtcgccataattggcctaaaataaattaaaattaattaccaaaatattacattttaatttttaaattgctacctcaattcgactttggttgtttatgcgaaaatcaaatcaaaataagcattttctatggaaaatctattactaaatgtgccaaaatttcttaatcttcgaccgacgaaaagtgcaaaaatcaaacacttgctttatgtaattgatttttaatctaattaatagatattaaagccaagaaatatttagagcaatcaaaaagttaattagtaaatttttttgctaatttttaaatggaacaaaaataagaaaatattttatggaattgatttttcatgaaactttaactgaaaacatttatttatttattattgacaacgggcaaattgtatcgacattttttgtagcgtttttttggatttttaatatttcatttaattaaagagtataatttataaaataaaacattagtaatatataaataattaagtagaagtgtgaagaaaatcattataaaaaaacaagtagaattttctgatgtgagtgaagccaagtaataaataataatcagcataaatatgggaataaaaatgaatccgtaaaagtatttgtattagattttaatggttttattcagaaatataaaaattaatataaaatgagtataatttataattacaaaaaaaaatcttaaaaaattaattgatttttttggggttttcatcaaaatatgattactagaaagccctaagtagaattttgaaaaaatgaaaaaaatcatattaaaaaataagtagaatttgcttagataattagcaaaaatttgagaataaaaccaattaataaaagaattagtattcatttaattaattttattcagaaatatgaaaattaaaatattattttcaattttaattttcataaatgcaatttttaatatttattctggaaagataaacgaagaaaaaagttttgatgaaatatttgtccaaaaataggacgaaaaattggaggcaaacagagagaatgaaactgatcaaaatgcaataattggacaaatggatggccaaaatgaggcaaattatggtgaaaatatttcaaaattaattaattaaaaataaattttaaaaaagttaattaattaaaaatattataaaaatatagcaaaataaatgccataaattctttttgtttttttattattggaaaataaataattaaaataatacatacaaattaatagaaataatgaaaaaaaggaaaacattttttaaaaaaccattattcaccgaaattaaatttttcaaaatttgttaaatgatcaataatcaaacacttaaaaaatgatattaatgaacaaaaaataattttaaaaaaatttgaaaaccgataaaagttattttttttcatttaaataaattaaataaaaaatagggaaaaaaccgtaaacgaaaataataagatgattctcttaattaatttatttttaaatcctgttttaatagtaattttttaataaaaaaaaatttattcacttaatgccgattttttgtccaaaattgagagcggaatgccaatttcaaggccaagacggttttgcgttgacgacaatccgtcatgcttttggcgataaaaaattccgtcgccataattagcctaaaataaattaccaaaatatttcattttaatttttaaattgctacctcaattcgactttggttgacaaatgctcgtccatccaatgtgctctcaataacaattccatggccacgattatgtgaaattgttgagttggcaattaaaacgggaccctaaaaattcgaaaattataaaaaaaaatttatattatttatgctttttttgaaaaatagaatttttaattcaaaattttcttaaaatgacacctttcaaaataattaaaaaaatataatataatttcatttaatcaaaatgagtataatttataaaaaataaaacattaataagtagaatttcgaaaaaatgtaaacattattttaaaaaataagtagatttgctgagtaaagctatgcaataaatcagcataaatatgggaataaaaatgaattcgtaaaagtatttctaatcattttaatgggtttattaagaaatatgaaaattaaaataatattattttcattattaattttcaaaaatgctgataatatttatgctggaaagataaacgatgaaaaaaactttgatgaaatatttggccaaagatgggacgaaaaatcggaggaaaatggagagaaagaaactgatcaaaatggaagaattgaacaaatggatggccaaaatgaggcaaaaaatgatcaaattaatgctcaattattacatgagacacaatttgatcaattatttgatgaaaatttgcaagtgaaacaagaaagtgcaacaaattgtgatcaattggaacaattgccaataaattttggacaaatttctgatcatttttcaaatggaattgacaaaaagaaaagagaaattgtggaaaaatttgataaaattaaagaaaaagttaagcaaatgggaaagaaattcacaagaaaagaatgggagaaaattgaaagaaaaattgcaaaaaaattgggtgaaaatcaaaggaaaatttacaaatggaaaagagaatttggaatgatcaaaaagcattattatacggatgatgaaaaatataaaaaagtaaaacaatttgatcaaatatatggcaaattaaaaacgaaattaaatggaaaattggaaggaaaaaggacaaaatgccaaaaaataatagcaaaacatttgggcacaaatatcagaagcatttatcaatggaagaaaaaactaaaaaatgggaaaactatgaaaaatcaaagaatttttgagcaaaaaattgaaattgttgaaaaatatttcaaaataaaaaatgaatttatgcaaaatggaaaacattcacgcaaagaaaaaatgggacaagaaaattggcttaaatcaaattctttcaaagggtgaaatttttaaacaaattgttatttattaattaaatttaaaaatttttattatttaatatattacagggcagaagcattatacatttgcggaaaaaactgaaaaaataaaacaatattatcaattgaaaaaccaaaacccaaagctcaacgatcgccaaattgcggaaattttaaatattacaaaaagatctttagaaagatataaatctgaattcaagagaaaaagtgaaggtgtcacggattgactgagaatatttttaagctttcagggccattcattgttaggttttgataaatttaaatttcttaaaaatttatatattattcggcatttcattcattttccaatttgttgcttatgtaagttaaaagtattatgcataatgtttgaaggttgttttttttttttctattttttgttgtaattgccagggaacggatttatatgtgccaaaaattgaaaaaagctccaaaatatgtgctaaaaagctcaaaaaaggccaaaatatgtgccaacaattgaaaaaaaaactgtcaaaaaataagtgaatttatcaaaaaaatcacattttttatccatttcgctagtaattaaatgaaaaattggaaggaaaaagagaaaaatgcaaaaaaataatagcaaaatatttgggcacaaatatcaaaacaattttttattggaagaaagaaataaaagttggaaaaatggtgaaaaagcaaaaaattagtgatgaaaaaagagaaattgttgaaaaatatttaaaagtaaaaaatgaatttatgcaaaatggaaaacattcacgaaaagaatgggaagaatttagagcagaaattaaacaaaattttcgtgtggcttatacggcaattgaaaaatgggccgagaaattaaagataaatcaaaacatttcaaaaagtgaattttaaataatgttttaaaaaaaatttgtttttttttcaatttacagagagaaaaatgttatcaattgctgaaaaaatggaaaagattaaacaatattaaatcaaaaaacaaaatccaaaattcaaagaagacgaaattgccaaaattttaaacattccaaaaaactcattacgcaaatacaaagctgaattgagaaaaatggaaaaagcaaaaaactgatgagcaaaaaagagaaactgttggaaaatatttaaaaacaaaaaatgaatttatgcaaaatgggaaaaagcttttcgagaacttttcaatcgtgtcgccaaatccaaaatcagtgactacagatggcaaacagatcggctgtactccaagaagcttcgagaaggcggcgttctcaccaaggaattatgtcttgaacgtgttgaggttggacgacggccggtgcagcaccagcaaccgcagctgagttattgcaaaattccaaaaaagccattcttaagggtgtaaaattgtttcgtcttttttcctccaaataccgtctgacgaaatcgaaaacgaaacgaaaattttaaaaataataatgaatttatatttaggcgtttcaaaagtaaaataccccttttgaaaaaattttttcactatttttgtcctgtttttttaccaaattttttgacaacttttttggcatttttagcataattaagtcgaagccatttaatggggctcgaaaagttggaaaggttggtggagcggctcgtggagggcgagaatcgatatggacatctatttggtgacccccagcacacctcccccacttcggctcccacccccacaaacggcaattttcaatggggtcaaccgccgccttttgctggcaccggagcagggctgcacgcaactggatttgcaattacggaaatccgtaatccgtaattacggcgattttctcagttacggaaatccgtaatctgtaattacgggggtccaaaaaccccgtaatttcccgtaatccgtaatttttaaaaatcaatttttgtcagaattttagaaaaaattttttaaatagtgattaataaaaatcaaaaaactgattttcttgatggagtttctaatcgacaaaaaaaatttaaaagtcccaatttttcctgtaaaaatttttaatttttcatttcgggcgggggaatggggggggggggggaattcctcccctcacctggctaaggttttatgaattttcataaaatgcgtgaaaaataggtgtgacaaaaaagtgatgcctctattttctaggcgaactacccaaataaccttaacaacaacaaataaaaaattataaatctattttaattcttaaataaatcgaaatacgggtagccctttaaataaaaaatagaaaaatttgtt

SEQ ID NO: 98 - DNA, 3488 bp, Heterodera glycines
tttaggttctaaccagggctgcacgcaactggatttgcaattacggaaatccgtaatccgtaattacggcgattttctcagttacggaaatccgtaattacgggggtccaaaaaccccgtaatttcccgtaatccgtaatttttaaaaatcaatttttgtcagaattttagaaaaaaatttttaaatagtgattaataaaaatcaaaaaactgattttcttgatggagtttcttcatttttatttaaattttacaaataatttataattttgtgtctgattaaatcattctttttgaatttatgggttgatttttgaaaattttttgaaagtctgatcattataatcggatttatgtatatgtatataattatttcaacattttaatagacagaaaaaaaaattacggagggggtgggggaatccgaagaattttttttggtaaaatttatttagtgttatttaaaaaagttcagcgctggacagcaaaaacaggaattgtaaccatttttagccaaaaaaagactaatttttgccattttgtagtcaaaatttaaaaaaataaggtaaaatcgagtaaatcgtggtccggcggtgccgataggtgccgccggacaaaatttttttttaaattttaatgattttattaggaaaaatcgacaaaaaaaaaatttaaaagtcccaatttttcttgtaaaaatttttaatttttcatttcgggcgggggaaggggggaattcctcccctcacctggctaaggttttatgaattttcataaaatgcgtgaaaaataggtgtgacaaaaaagtgatgcctctattttctaggcgaactacccaaatagccttaacaacaacaaataaaaaattataaatctattttaattcttaaataaatcgaaatacgggtagccctttaaataaaaaatagaaaaatttgttttttataaaaataatcttacaagaaatcgtctcgaaaaaataatccaaaagtcaaattacggatcaaaattacggaaaaatcccaaaaatccgtaacccgtaatccgtaactcccaaaaccccgtaatttccgtaatccgtaatccgtaattgcgtgcagccctgcaccggagccgtgtcgcggatgataaccgacgccatcatcaactcagagcagctgaaggagaaggcaaatcgtgtggtcattgagaaattgccggaggcagtcgatgaacgggcactggtggaccaaattgccgaagaatgcggtgtcaaggacaaactgtcgccagacattcatcgccacccaaggaccgcagcctgatggaggcgtaaaaaaggaccgaattctgaaagttccatttttggacaaattttcgcgagacaaatttatctataatttccgtaatgctctgaaaaaattgactaatttgccccaacatatcaaagtccgcagggacatgacccaaaacgaactcaaaattttatattcccttcggcaacaagcctatcaggccaatattgctgctggtgaatataaatattttgtggttgatttggaaatcaggtccctgaaaaacccccacccgctcagaactcgctagggacacgcgagcaaaccaaccgaaaaaaaatagaaaaacggtaaaaacaatccctggatttcctgccttttaataaatgcccgatcaatatcaaataaaatagctgatttagaacatttggctaaaaaatacaatccgtctataatcctaatcaatgagacctggttaaactccagaaatacggtagaagcggaacttacaataaattgtcaataccaaattgtttatgcgaaccgaacagaaaaaagggcggaggatcggcaattctattaaaaacattgatcccttatcagacacttttctctgggacaaaattccaatgcgaaattatacccattaaattattttttaaaaaccaattcaaattataaatatatatcggccaccgaattgtaccgttcagaatactaaaaagctattcaaatttatttcggatcaaagcgattctgaaaatatcatatactgtggggaatttaacatcccaaacattttatgggatgaaaataaggtaaaacatataaattatcctatgtcaaatatgctgattgagtttatgaaccaaaaacaattgaaacagcatgttaaagaaccgaccagagaaaatacgattttagacttagtaatgactagtgaatcagaattaattaatgaattaattgtattggaacatttttcaacttccgatcataaaatggtcggatttaaaataaaagaaaaattccggagtaataatcccagtgtttatagaagagattttaaaaatattaagtcgggcgatacttgaaaatcgaattgatttatcaataaactcagtgtacaccgttgatcaaaaatataaagaattcttaaataaagtactgaaattatatgatacttttataccaaatagacctcttaaaacaatcgtatcctcaaaaaataagagatttattttcagagaaattacggttacataagcttgtaagaaaatttcctgaaaaaagtgaaatcatttaaaaattacaaaattatttctaaggaaatgaaaaaacaattgtacaaattaagaaatgaacaagagtcaaaaattatttcccaggggcaaaattcaattaacaaatttattagaaataaattctcaaaagttaatgaaattcctacgttaattgatagtgctggaaatatgttttccagtaatgagcaaaaatgcgaaatattagcagaaatatttcaaaaatcttttttagaaaattcagttgttaatggttcattgactcaatcagcacagaataagactaagctttcggatattgaattaaatgttggcataatttggaatatattaagaaagcttcccaggcgaaattccacttcaccggataacatttcgtacattttattaaaaaattgtgctgagccaattacaaaaatattagctgacatatttcgacttgctttgtattccggtcaaattccggaaatatggcgaacatcattagtggtaccaattttcaaaaaaggcgaaaaaactgatttgttaggcgtttgattctgtaccaattgatttattacttcaaaaaatcaaaaagattgaaattgaaggaaaatttttaatttttataaatgatctgccgccctttattgcaaatgaagcatcatcagttggcataaaaatctatgccgatgatgttaaattatattatgcccatgaaaatgatgataaaacaaatcatttagataaagcagttgaggctttggaaaaatggtcaaaaataaatgggttagaaatttcaactggaaaatgttttgttctttatttagggaaaaataatatgaaaaaagaatattttattaactcaaaaatgatttcagaatctgataatgtacgtgacctgggaattataattgactcgaaacttaatttt

SEQ ID NO: 99 - DNA, 236 bp, Heterodera glycines
atgtgttttcgagtattttcacgatttttgccttgcgctttgctttgtgtttttgcataaaattcaagcgagcgaagcgagcgacacgacgtgcgcgagcgagcgagcgctgcgagcgtagcgagccgcgagcaagcgagtgcacggagctatttaacggcatagtagtgctccacgggcctggtacgggcggcgcaccgggggggggggggggcggggggcgtatcggggggggt

SEQ ID NO: 100 - DNA, 15043 bp, Heterodera glycines
taaaaaattacaatgagtcgtatagatcgagtgcataattttcacttgaaaatgctaacgaaaaatttattatcacccaagtctttttggtcgtggtgggcatattgattgtaattcaatttgtgctctcccctgcacacgacctcttgcttcccccacctccccgcaccccacctccccgcaccccacctccccgcaccccgcctcccgcacccagcttccccaacttacaagacctttttgcacgaattgattgcgcattttccgtttgtaaaacaccgactgaaaatgcgtatattatagtaaaatacaattgtaaagcaccgaatgaaattgcgtgttttatagtaataaaaatacaattgtaaaacatcgaatgaaatgcgtgtattatagtaaaagaaatacagttgaaaaacatcgaatgaaaatgcgtgttttatagtaataaaaatacaattgcaaataccttaccagaaaatgtagaaattccggttattaaatataattgttaaacacaaccggtaaattctggctttacgtaaaaaaatttcaattaaaaaacacaactggacatgcacaaaacaatttctgaatttaaattttacttttccggaaaacactctgtttttgtttttaattttccggaagacaagaataaaagaccgaaaaaatgtattttatttcatataaccaaaaaatattcattttaaaataaaaaaaaatcgaaaataatgtcttttctgagaaaaaccggaaagcataattgtgctgaagagcttttgaataatttagccttaaatttggaattttattggttcttatttggtggaatagttctggattttatcaagacaattgtcttttcagacaaaaccggaaaacaattgtcctttctttataaaccagaaaatacatgcagtttctgttaataaaacggaaaaacaattgcaatttctttataaaccggaaaaaaaggtattttctgctaaaaaccggaaaacatttgcctatactttataaaccggaaaataaatgtattttctgttattaaaccggaaaacaattatcatttctgttaataaaccggaaaataaatgtattttctgctattaaaccggaaaacgattgtaattcctttatataccggaaaatacatgtattttctgttaataaaacggaaaacaattgtaatttctttataaaccggaaaataaatgtattttctgttattaaaccggaaaacaattgtcatttctgttaataaaccggaaaaaaaaatgtattttctgttaataaaacggaaaacaattatcatttctgttaataaaccggaaaataaatgtattttcagttattaaaccggaaaacaattgcctatattttataaaccgaaaaacaattgttttttctgttaataaaccggaaaacaattgaaatttctttatatagcggaaaatacatgcattttctgttaataaaacggaaaacaattgaaatttctttatataccggaaaatacatgcattttctgttaataaaacggaaaacaattgtaatttcttcataaaccgaaaaacaattgtttttctgttaataaaccggaaaacgattgtaattcctttatataccggaaaatacatgtattttctgttaataaaacggaaaacaattgtcatttcttcataaaccgaaaaacaattgttttttctgttaataaaccggaaaacgattgtaatttctttataaaccggaaaataaatgtattttctgttattaaaccggaaaacaattgtcatttctgttaataaaccggaaaaaaatgtattttctgttaataaaacggaaaacaattatcatttctgttaataaaccggaaaataaatgtattttctgttattaaaccggaaaacaattgcctatattttataaaccggaaaataaatgtattttctgttattaaaccggaaaacaattatcatttctgttaataaaccggaaaataaatgtattttctgctattaaaccggaaaacgattgtaattcctttatataccggaaaatacatgtattttctgttattaaaccggaaaacaattgtcatttctttacaaatcggaaaattaaattactttttattaaaaaccaaaataaatgtattttctgttagaaaaccaaaaagtaaatgtattttctgttattaaaccggaaaacaattgtcatttctgttaataaaccgaaaaataaatgtattttctgttattaaaccggaaaacaattgtcatttctgttaataaaccaaaaagtgtctttatcagtagggcgaggattttaagggtgaaaaagtcacaaataaggacgcaaataatggccaaaatagtgacgaaaaattcaaaatttaggatttaatttttcaaattgctctttttatatgaaaataattcaaattaaaataaacaattttattcactgattgcagtacttataataattatttaaacttgacgctagcaatgacttggctttacatttttcatagttaaaatattttgtcattattactctaactgtcttcatttctgaagtctctcactctccctctctctcacactttcaacatcaatcttttcttctctttatttttctctctctctctttaactattttccgtcctccctctcctctcccctctgcctcgcaccgatcctttttcattgtgattccaccacccatttctctgttgctgcgtcacaaataatttttgcagcaacaaaatgcgaacggaaaaagcggcgatgagaacccccttccaattggccatataatattgatttcgggttcaacaaaatttaatgtattttaataaagttacatatttttaagtcaaacaaacaatgcaaaaggaactttttaaatattttaatttaacaaaattaaattgaatttatttactgtaaaaaaaacatttaactttcacctccccaactaactcatgctaatattaatggccaaatttggttgctttgattgaaacccaagcattttaaatcttttttgtattccatcaacacttctctattactcttgcacaattactttatcaataaccctctgaaatgaaatgaattaggcccacggcggcaaactttctcagcttttttgagcagttcacactgagcccaatgttccacagctcaccccatttttgcaatcaattcgtaattaattaaaagttgattcataaacaaccatttttgcaataaaaaacatattttccgtatattgtaagcaccgccggcattaaaattacttacatatttttaaatttaaacaaaaaattccattgatcactgtataatttcaattcatttattgtcaaacaaataaattaagttttattttggttacagccctacgtatttaatattaattatggtttcataattattttaaaataaacttactacccatttctattcttggattttgttttatgctctaaataaaatcctgtgttttggcttgagctttccggataaatttcttttttgctgttagtttttccggaaacattttgctgtttttggttttgtataaacaaaaacaaaattcacatttctgatttatatttccaaagattgtttttaacatttttatttgtgctttacacaaaactcaaatgttttttttaaaaattttccgcaaaaaattcctgatttggttgagattttccggacaactatttatgttttggtttgtattatcaggaaaataatttctgaattggcttgtgtttttccggaaaactatttctatttttcgcatgattcttcttggttctggcaattttttttaaattttattagctttttttttaaaaattcgcccaaatgttttattgttagctgtcggaataccgatttcgattgcctattttttaacaagcatgcttttccaattgtattgatcgtgccctttctacattttgtattgatcgctatttacaattcacagatctattaaaaacgagatgccggaggacagcaaaaacaaataatctcaaaatttctgccgtcacaaaatagacaaatttgaacatcaaaaacaaaaaaatgacggttccaaatattggggagaggagcggcacgctgacgcggcttatgccgtcatgctcaagaaggtgcgctatatgccgccaacggattacgaatgggttccggtaaggagaatgttgaaaaatttgtgcctgtttgagtaccgaggttgggcaatgggggatgcctattttgcgggtccggaattacataaggtaccattttttgtggattttagggccttttaaccgacggttaatccagcttttaagataaatttttggcactattcaaattaacacgaaaacaaaacaaaaaaaaacacgaccaaaaaataatttgacacattttaaagtaccataactttttctagcagcacccaaattaaacattgttgggtccatccgatagccacaagaattcctctattagcctaaaaattttaaaattaaaaaaaaattatgcccacaaaatttcaaaaaaaaaaaaaaattctttgaacatttttgaccataactatttgaaactttttaaaattgccaaattattttttggttgtgtctttttttatttttgtaaaaactgtaataaacccaaatttttgcaaatattttttcacatttatatttggcaattaaaccaaaaccgatgtggggttttctgccagaatttgtcaaaaaagagttaattttgatgaacttttggtggaacatttggcacatttaatgactaattactttaattgtggacaaaaaaattttaatgtttaaaaaatttgctattaaaaatggactatcccctgaaaagtccaccatttaaacaaatgataaaaaaattaaacattttgttctgctctttaaaatttccatttttcaattaaaataaacaaaacaaaaattttcatcaaatatttagcccaatggccaacaacagttagcgctgactgatggttctgccgtggcgatggaccacctccaatgggagaccatccgggagcgggtgatcaaggcgggcactgtgccaagactggtggacagtctgatcgacgaggacggacacatggacttgaaacaggttttttggaaatgcggtggaatgttgagggtttatacaaaacattggccctgatttaaattggggtccatttttggttaaattttgtttctggggttttttgaggttcgctgaccacaaatccgacatccactttggcgccaattctgatgcttaacccgaactaactcgaacaaaatttcgattttttttgttttcgaaatcgggttaagcatcaagaattttgctgaaatggatgatttcctgttttttagccgaaaatatttgctattctggggtcttatattaaaaaatttaaatgagtattatccaacaaaaaaatttttgaagcggaaattttaatcatttaacaatttttcgcaaattacatcaatatcgccatctctcaacataacaaatgctggcaattcaattttgactgccaattcataaaaacgaattttaatttttgtcggagtcaaaaattaaaaaaaatttccctccccccttatttagttcaaacgttttcttcgccatttgtcgcgccttttccaccgtggccaaagtgttccgactggtcaccgatttgtacacaaaaagtgattgggcaccggccgacgatcaggagaaaattcggcggtatttttgcggaaaatatggaatttgtttaataaaaatttaaacctgaccacaaattcaatgtctttccttttttgtcggttcaaaatttgcacaaaaaatttgtcgtactttttaattcaaataaaactaatgccaattggcgacggcgtcgcgcaaaagtggcttttttgaatttccatctcacattttccaaaaaaaaaaagcatgttaaatttttcttaaaatctataaatatcatttcctggcaaaaatctgttaaaattatggccaaaattctcatttttattgccggcactggcgcactgtcgtgccttcctcacctaagtgtttttattttttccacaaaaaagttaacccggaatttgtccatttgtttcgagttgcaaaatgaccaaccgtctctttgcaacgaattcagacccaacccaaatgtctggacggttcgaattttttactttcaactttcatggtttttaataaaatcagggtgcatttgaaactaaaatcctaaaattttattaaaaaatgaatattccggataattagtgttaaagaaaattctacaattttcaggcgaacaaatgcaaggagcaaattgaggtggcaaaacgcgagaatcgcacattccaatgcaaaacgttgaaggcgcacctggtccatttgctgaacaaagagcccaaattcaacgagaccatccaattgggtacggaaggtaaacatgattcgaacaaagacaaccttttggcgactaaatgattttacaccgacccattaaaaatagggatctgaccaacgatttcctttagaacgagccaaatacaaatatggaaaacggctctgttgcactttagacgttcaattcagcttcttaggccataactttcctttccccatttttgttagccaaaacatattatggtcagaaatttgtggtttaagatttttaataagaaaattgtcaaaagcacattttgtgtttatatctggtaaacaattttatggcccggaaaattttgaattacaatctgttaatcggacttttcatttaaaatctggcaacaacttgtacgggcccgggatttgaggtttaaaatcaataaaccaattataaggcccgggattttggtttaaattcggttcagaaattttgccttttgtttagtttttacttgtatttttttcatttgcccgaatatttctgatcctctcaaattcactatcccttccatttaaaaaggaacagaatatgagccaacagtgctgcgacaaccgagtgcttttcctgcaaaatgtcaaagtgccgagcgcaaatgggttggccaagtcggcgaccgtttcctccttacaatgctcgcctttgaccgcattttgcccgtccttggtgagaacataatgggcagacgcactgagtcaaaatccattgggattacaagtcaaaaacgtcacaattttggcacaaaaaacgccagaaaaacaaagatggtttttaaactattagtatttcaagaaggcccgggattttaatttttaaataaagaataataatgtttcagacatgagatggcattaacaaaccaaggcaaccaaaaatgataccacaaaaaatgtaaaatttagagcctaaaaaaactaaatttacgaaattttgagtgttttttgggtaacattttgcaaaaaaggacttatgggaaacaatttagccaagaaattgttaatctgagcaattagaattattttaaaaaaactattttaaaatttgccactttttttgccagaatatttgatggtcggaactaattttaccaaaaaatggctaacattatttgctgtttgcgcgcttatataaatattgtaattttggcttaaaacaattaaatagtcttggcattattttaaatggtttgatagtgtctattatcctgaaaagtttcacaaaaaattagatgagcaacatattatggccaaaaaaactcaaaaaatgcatttttctggccaatttgccacagcgagccatatctctttttaaagctaatatatttttttcttttgcttttcaacaaaacaattatatttttgacttttgtttttccacaaaacaatttctgatttgtattcaaatatttttggcgaaatttgttggcaaatcatttctaaaaaaaatggttagcctaagcaatttaaattacttttttaaaaacaattttaaaaattgccccattttttgtcagcatttgcctttgccacgtgttgtccgtcacttccacctgtggcgtctgtacaattgcggaaatttccctttttatttgtccagaatatgtgccattggtgtcaatgatgtgagttccaaacaaaattgaattgaaaatttatttatacaagtaacttacacgtgcaaaaaaaatgcctttctccccacaacaaaatttgggtttgggcaccgggcgacgctaacattgttaaaaaggtttccctgtgaataataaaaaatttaaaaatttaatgcactttatttgcacataatttaaacggtcttgtaacattttaacttcttttttgtttccatgtattcaagccgaattttaatcaaaaaaatcttaaacgcataatttattcaaatattttgtttgattcaggtttcaaacattaaacgggggaggagggccaataggtggccttaaaccaattaattccaatcaaattttaataaaaaatgaaaagttgtcattaaatactcactctagaaattcaatattttaccaaccatccaaaacataacaattcccatttttgcatatattttttcaaaaaacttttttaatttttaatttgtgttccaaaaaactatttctgtttgttttttgtatttttccagaaaaccattcctgttttggtttgtgttattaaaaaatcaaaaactgaggcccgacggtgccggcaggcgccatcgtgaaaaaaaattgaaaacttgagtgcggtttgttaacatatttcgaaccaaaaaatgccaaattttgcgacttttttgcaagtcgacgacttttttttaaaaaaaccgtttttgcggcgtggtttttccaaaaacttcgagctattttcgaaattttaccaatgcaaccagaaatgctaccactaaaaatgccaacttcagtggcgagaaaaaacaaaaattacgtccaattttgcccattttttggattacaatttgcaaaaaaaaggattaatattattttggcacaatttgtttggaaataattttaccaaaaaattggttaaccttagcaatttatattcattgaaaaaacgatttttaaatttgctccattttttgccagcatttgcctttgccccgtgctgtccgtcacttccatctttgacgtctgtacaattgcgggccatctcaccaaactctttgatgctgataatgccatttttgtgggtgccgttttttggcatttcagaatttgaaaattgtcccttttttttgtccaaaatatgtggcattgatggcaatgatgtagttccaaacaaattctcgtctttgaggaggtcggcccttccatcaacatcaccacggtagggatttaattaaggctaaaatttagttttacaaactctacatttcttaataatgtaattttttttaatttattgtttgcgatttacacaaaacctatgctttttaaatatttttccgcaaatcaattcctgatttggtttgtgtttttccggacaactatttatgttattcccgacctcgcctctgagaaaaaattattttgaaaattgtttaattggaaaatattgtaaatattattaaatttttcaaaacatttacacggcatcacggcaccataacattctcgctactatgcttttcaaattctgaacacttctctctgattacaaaaatcgtaaaatcaactaacagccattaaaattatcctttattttttaattttcagaaaattactcaaattttgtttggtggaaaattttttttttattaaaaaacaatttatacatatactttttcatccattatttttaaattaaataattaaaaataaattgattttttccaaatttttctgcaattattaataaagatatattaaaataatatatttttaaattttttatttttaaaaaagggtttcccaatgaatattgttttctaaacatttttaaaaaggcttccaagtgattataattttttaaacattttttaaaaaggtttcccggtgactaatatttctttgaaccttttaaaaaacagtctcccagtgcaaattgcttttctgaacatttttaaaaacggtctcccaaaaaatattgttttctaaacatttttaaaaaagcgtttcccagtgattataattttttaaacatttttaaaaaagggcttcccaatgaaaattgttttcaaaacatttttaaaaaagggtttaccaatgaaaattgttttctgaacattattaaaaaagggtttcccaatgaatattgttttctaaacaattttaaaaaagggtttcccattgactattattttttgaacattttaaaaaattgtttcctgcgaaattttttgaaaattcgtttaaaatatttttgattacgttgtttacagcaatgggcagcttaaactcccttctttttaaaaaaattttcattaaaatatggtttcagctaaattgccttccatcggtcgctattcctttgccatcaccggatacgacctcaaccaaccaacgaaaacaacaaaagcaacaacaaccggggttagtttctcacaaaatttgttcccttgagctaaattaattgcaatttttcaatttcctcagcctcaatggcctgctgcgcactgcacaagttggacgaggcggcacacccgtgtctgagcatgatcaactacgttgttcgatggcactgaacgacggcacagaaaaccaaattggttggcaaaaaagcacttacacacaaacaaacacattgttaccctttttgcatgctcataattaaacaaacatgcttttaaataaattgctgcacccaaatcaacggcttttgataaattgcattactacaccaaatatacacttacacatttttaaattatactgccttttaatttactctaaacaatgaaacatttataaaatatggcattttcagactgttacaaaagttataagtaaaacaaatatacagtttagtccaacaactcttaaagcaacaaacaaatgcgaatttttatgcacaaaatactgttttttacaaacaaattctctatcataaacgcatttctattatttttttaaaaaattgatacattcacattgttttttgtactatgagtgaattttgatattaaaattttgaaaaaaataagaaaatgccatatacgaatactttttgggcgatactatagatggtggatggtcaacctttttgaaaaaaatgttttgttttagaaagtcaagaaaaattgttatggagtttttttgggtaaggaacataaatcaaatattcattttgaacaatttcgaatgccggacccgcattttgaacaacatttcaaaaacaaaactttttaaatttattatttttgttagcaaaattgatcaaaatttgtgttccctgacccagaaaactcccaataacatattttcacgaacttttgagaacaaaaaaaattataaaaagattgcccaaacaccatcaatagtattactcttttttgtttattaaggcacgtgttaagggctacaaaacggttatttgacttaaatttacagccctactacaaatataaaaatatttttttttacaaataaatttagaaatataaaataatatttcaagtgagttaattttagattttagaaaatatttattataaaacacgagccttaaaaattacttccatatactcagttttgcttcttttttgttgcacaacacttttcacaaaaaataattttttatgctcaataaaatttatttttaaattcccattgatttaagtcaatcgaaaaacgaaatacttaagaaatatccattgacaacaaacttttgtaatagtacggatggtaccccccccctttttagaaaaacaaaatttttgcaaatagatataaaagtgtcatattagaggtttaaagggtcgggaacccgaatttgacataaatttcgacctatgtcgaacctcgaacccgaattcgagcaaaacgtcgaaaattcaaatttttgaattttttatttttggtataaaaatggttgaaatgaagtttttattagcgcattgtcaaatttagtttgtttctccatatgtaagcctttttaaaccataaataaagaattcataaatttgaattttcgacgttttgctcgaattcgggttcagagtacgacctagatcaaaatcaatgtcagattcaaattctctgactcattaaaaaccctaaatgattttttttgaaaacttttacatttatccagaaaatgctaatgagtcagaaacaacttttaaaaattcttatttttcaaattaataaatgtttacgttcacttgcacttatgtacacttattaaattaaacacagcttgcttttgttccctttcctttgttttttattgcgcgcgcgaatttgtatttgtagtactttcactttttttgtccatgtccaaatcacaccagattttgtcttaatgtctttttttgtttgtattgtccattggcccgcgacatgtgggtgctcgggcaccactggattacctaccaagctggggccgcgggtcaccaattggcttccgagctggttgaacccagctggacaacacttcccacgtccagcgctttgtggaacagcctggtagggatgtgccagtgtagtctgagcaaccacgggcccggtatcccgttctgctgcgatggtgccccccatcgtggaacaaccgtattgcacctgtggtttagtgtctaccactatgcggcttacggtttcccaggccccaagcgctcgggtctggatttaccaggccccttgcgctcccgggtctgaacaattcacttaaaaagagtcatgttgaattaatagaaaaaatagaaattttatggcaaaaagcgcatgcaagaaacaaaaaattttagtttaacaaaagcaaacaaaaaagtgcagttttttaaaaacaattacaaaaaatagtaattagatgcgatatgaattgttcagcacccgggtttcctggcccgtgttccgactttcaattgagccgaaagtcggacatccaaacccttccccccttccccttctgtagagcaaatatttttttttcctttatttctcttacatatttcttttaaaaaattcttttcccattcccttttctttcactctccctctccctttccctttctctttcctttttttccttctccattttcattttccctttccctttccctctccatttcccgttctctttcctttttcctttgccgtttcctttccctttttcttttccttctccttttcatttttcttttccttttccttttcaattcctaaaattcccaaactctaaaatcccattcttcacttttcctttcataattttcccaaatcctaaaatcccattccttttaacttttcctttccaatttaaaccaaattctaaaatcctattccttttaccaatttcccaaattctaaaaccccattcctccaattccttttctctttcccatttctaattttcccaaattctaaaatcctattccttttcccgttccctcttcccattccctttcccattcataattttaccaaattctaaactccttttcctctcattccttttcctttccctttcataattttcccaaattctaaaatccattccttttcacttcccttttcataatttttcgaattgctaaaatcaccgttccttttcccgttccttttccctttccctttaataatttcccaaaatcgaaaatcccgttccttttcccgttccttttcataactttcccaaattcaaaaatcccgttccttttcccgttccttttccctttccctttaataatttcccaaaatcgaaaatcccgttccttttcccgttccttttcataatttcccaaattctaaaatcccgttccttttcccgttccttttcataatttcccaaaatcgaaaatcccgttccttttcccgttccttttcatatttttcccaaattctaaaatcccgttccttttcctttcaaaaatttaccaaatgctaaaatcccgttcctttttccgttccttttaataattttaaaaaattctaaaatcctattccttttcctttacttttcataattttctcaaattctaaaatccctttccttttcccgttccttttccctttccctttaataatttcccaaaatcgaaaatcccgttccttttcccgttccttttcataattttcccaaattctaaaatcccgttccttttcccgttccttttcccattccctttaataatttcccaaaatcgaaaatcctattccttttcctttacttttcataactttcccaaattcaaaaatcccgttccttttcccgttccttttccctttccctttaataatttcccaaaatcgaaaatcccgttccttttcccgttccttttcataattttcccaaaatccaaaatcccgttccttttcccgttccttttcataattttcccaaattctaaaatcccgttccttttcccgttccttttcataattttcccaaattctaaaatcccgttccttttcccgttccttttcataatttcccaaaatcgaaaatcccgttcctttttcgttccttttcataattttcccaaattctaaaatcccgttccttttcccgttccttttcataatttcccaaaatccaaaatcccgttccttttcataattttcccaaattctaaaatcccgttccttttccctttccctttaataatttcccaaaatcgaaaatcccgttccttttcccgttcattttcataattttcccaaattttaaaatcccgttccttttcccgttccttttccctttccctttaataattttccaaaatcgaaaatcccgttccttttccctttccctttaataatttcccaaaaccgaaaatcccgttccttttcccgttccttttcataattttcccaaattctaaaatcccgttccttttcccgttccttttc

SEQ ID NO: 101 - DNA, 10349 bp, Heterodera glycines
  unsure (1)..(10349): unsure at all n locations
ggtagtcgcgacggaaaacgatgtccaaatggaaggtgcctccttcgtacggcgactcgggcggtccttgatgggaggccncccaatggtacaagtctctgccgtcatccatcggtgccgcggtgtaacccgtcgtgaccagttcctgatgcagctccgccagttcctgcaaattggtcaaaacatttaaagcattggctgatcagtgttgtaatttcgttccaccttttggatgcgtcgacgtgccattgcgaaaacggcgagcgaattgatgtgaaggacggacggacgaatgaacgatgagaaacggcgatgaggtcgcttttgaagtgttgttgttattgcacaatgaagggatgatgatgataaacgcaaatagttctgttctaaaaaaggaaaaaacataaaaacaatacataatgaaatgaattataaatttaaaaatagggaaattgcagtttttgtaaaaaaaaatttttataaatttaggttcaaatttggtagtataggccagggaaactctgataaactttcaggtcgatgtcgataatttttggaattcgggttgggtatttactggttaagataagaaatatgtctttttgaaacagtgaagtttatgaaattcacaaaaaacagagtaaaacactcataaaagaaaaatgagtgaatgaaaagggaggaaaagggggcacaatatttatagtacgacgcaacaagggagggcaaaagttaggtaggaacgtaggtaggtaccattgcccaaattccaaggttttctctctatataaggaggtgtttttctcactggactgacattttttgcattacgcctatatgcttttcttacttgttccctcctctattcagtccttaatgttctgatttaattttttgtgttacagagtacgcaaaatataattaacccgaatttttccaattgttttttcaatcaaaattgactgtttctcacagaattttcctgctggacaatctaaacttggaatttaatcaaaaaaccccaaaaaaatgcttttccctatttgtaaaatttataattcatttcattatttatgtttttatgctttttcattttttagaacacaactatttgcgtttatcatcatcatcccttcattgtgcaacaacaacaacacttcaaaagcgacctcatcgccgtttctcatcgttcgttcgtccgtccgtccttcacatcaattcgctcgccgttttcgcaatggcacttcgacgcatcaaacaggtggcgaaatgacaactctgatcagccaatgctttcaatgttttgatccatttgcaggaattggcggagctgaagcaggaaccgatcacgggttgcaccgcggcaccgatggatgacggcaaagacatgttccactggaaggccaccatcaaaggaccgcccgagtcgccgtacgagggaggcaccttcaacatggacatcgttttccatcgcgactacccattcactccgccagttgtcaaattcgaaacgcccgtttaccatccgaacgtcaacaagcagggtggcatttgtctggacgtcctgaagatgtcgcattgggcgccgtcgttgaccatttcgaaaggtgaaagcgacgcgggaaagagcagacaaaatatcgacaagacaaaacgatccaattcaaaacgaccaccaaaaccggactttttggaaaagtgtcgatattttgtcgtgtaaaatgggatttttcaaattcggaaatgccgttttaattcattgtctcccctccatttcagtgctgctctccatctcttcgcttctctgcgacccgaatccggacagtgcgctggagatggacatcgcgattatctaccgcaacgaccgcgagcagtacaaccgaaatgcccgtgaatggacgcagaagcacgcgatgaaatgagatgacaaacgaccgatggatgggagaggatgcagaagacaaccgccgaagagggaggaggatacattcaactgaccctattcccatatatgatcccaactgtacatattgtattattgtatctcactgtatgtacagtatttgtcgcccggttattgtttacgcgaccataagtgtctgttgttggttgatcaccattatcaatgtgttgtatctctgtgttatcatttcaaccaatttgtgatcaattgttgcgcctaatatgtgtaaataatgtgaagaatccaaagatttgtttatgtttttgatccctttttcgtgccttttcatgactttttttctcttgggcaaattccaggtcgaaaaacttggtcccggcctctcaggtccggtcccggttttgtcaaaattaaacagaaactttcaaatagcacttcaattgctttgatttttgatttctcattaaagggcagtcaaaatatgcaagtgcatttttttccaggcttttccatgctctaaattagtgttcagaccccgacccatcccccggggacgggacaggttttttggcctgcctcccccctgctcccgtgactcagactcccgcgaccttcgcccccgcgggggtgagtactctttcaagtttctaccgtaaactgaaccctactgattttatttatttttttataccgaggaaagtctcaagcaattagtgaattttcaagaaaatatacccttaagaatggcatttcttgggataaaaggcaaacaattatacttgtattttttaactttttaaaccacttttgataaaattttatgtgataaatagggatgccaaaaatatgcacataaaatcgtaaaatatgcactaaaaatcgtgaaatatgcacaaaaaattttccaattgagggtgtaatttctcaaaattactccccttttaagcaaagcaaattgagagaaacaatcaattaatgtgagaaaaaaggaaaaacgacgacgaatgggtcgaataatcaaatgaaaggaacgaatgaataaatggcaaatgagctgattgtttgttgttttgtagttggccgatgagatgaatgtatctgttgatgttgccaattgagcactttctgagtttgtgggaaagtgagggacggacggcacaaaatttggggtaattaatggggggggggtaattgaaaagccaaaattaaaatggataatgggaaaatgtgaaataatgaagaaaaaaaagccgacattcgaggacggagtgacaaaagaaattcaatgagaaaatgcaaaaaatgcgaggggaaaaaagtaaaaaattttcagtaaattttttaaattttaagcaatcttcttaacaaaattgtattaaaatactcaaaaattttcccggcgacgcctatcggcaccgccggacccccattttaccatatttttaaaaattgaggccaaaatggcaaaaaatagtaattttttggcgaaaacggcgaaaatttttgcaaaatataccccctaattcgggatttcaaaaaagcaaaaatacacccctaaaaatcgaatttttgtcttcagcctcccccccccccgaagccaagggtctggctacgcccttgggtcaaagggatgggccaatcaaagcaatgaatgaacttcccgcgcatgcatattcccatcaatccaaaacatgcgttttttgagcacttttctcaagttttttggttatgctccgaattgacggctgtgggaaaatctgtccgttatatctcatctagagcttttaaatgataccaaattagtcatttttcgatccttttaaaaatcccccctctatataagtcagaagtgccgaaacagccaaaaagtgacaaagtgaaaatttcacattttgattagtttatatatgcgcacacatcaacaataatacatatacatacaattcaaatgatcgggtgtattgacaattataatatggggcattatgacagtttatgggcacgccgacaaaacaatttcaagtgatcgggggtattgacaattacaatatggggcattatgacagtttatggacacggtgacaacgcaatacattcgcaaatgatcatattccatcctgacgatccctccgtcatcggccggcccggcgacgtcagcagcagctcagccccgtcgcatggtggagttcagtgcctgcacgagggcgttgagcgcgttcacgttgatgttcagctttgacgccttgttttgtgcataactgaaaaaattaaaatttcatttctggttgatgaaaatttgaaaacccaccgaagaatcacgaagtaaatgtagaggtactggtcgagtgtctgtatgctttgcgatcgttggcgccggaggtcacggatgagagcgaagatgttgagaggctggccgaggtgcagcgtttggttggccaagtacaccgccacgagcgttccagtgcgtccgatgcctgcaatgggaaaaatgattaatttttcaatgtttttgtttccgttaactcaccagctgaacagtgcacaaccgctcgggggacgccgatcacatggtacagcaggcgcagtggggccaggtcgctgtggggcactccgcggtcgggccattgtcgccagtggaagtgttgaacgcgcaagtggccctgtcgcatctgcggtgctccaacgatgaggtccgtcctgtagagcgcgccttccacgtggtgttcgcgcccgaatttgacaatgatctggttgttggcgaagcgcatgagctaggagggaaggggaaatgattaattgttaaattgggtaaatttcaaaccccaccttgttgtccgcggtcggccagtactgatgacacttgatccgattttgttcgatggtgtcgcagagcatcacaatgccttcgatgttctcctgcacgatcattgtccagaagtcgtcgcaggtcgtctcgagcgggccttgagtgcagatgaagcggttctcgccgaacgtgctgatccagttggcgtggatgtagcgtccgctgtggagtcgcacccggttgatttccgtgcagatcacatctcggtagcggttgcattccaagttcctgcaattgaaaattgggaaaattagacatgcacaaattgaaaacgacgccaaaacccaccgtgtaaactcaggcgatggctccggtcgtggcgctgcgttgagttcggtgaattcgctgaccaggtcctgcacggagcgcggcgttgtgtcgttgacgaagcgttccagggcgaagaagaattctgccgtgtcctcccatctgcgaagagttggctgcgcgagcgcactccgttcctgcgttggtgttggacgcctttgctgctgctgagtgccgggctgacgagtctgctgcgttcgggttgggcgtcgcggtgcttccgtcttgcccctattttggcgtccacttccaccgccggacatccgcgtttgctgtgtgcgttgaggttgaaatgcgcggcagagcgttgttgatcactgtaaaaggggaaaaaaattaatgatgtgcaaatggagggggtgaggggaaaacgggcgatggtgaagaaggcgcacctcagtaattaggcgcgaggcgtgtcgaaaataataggcgtgaattgaaggaaatggaataagtgagaattttgggcattttccgtccttttatatcaatttttttccaaattccttccagcagaattggatccgtataaaaggggtcgtctttccctccgcttcacatttcttcttcttcttcttcttcttcaccacactccaaccaacgaaccgcttcagtgcgcaacgcaacgcaatggccacttacctattcatcgctgctgctgccttcggagcaggaattgtaatgctgcgctttcttcattttttcaatttgcatttcattacatttttgtccttttcagtactgttggaaggcgtacctcggcccgatgctcgaccaaacgaagagcgacgacgaggagaagcccaagccggaaggaggcgaagaagcgacgaccgccggcgacaaggaggagaagaaggctggcagcaagggcgacaagcacaagaagaaggacaagaagggcgaaggcgcagcagcagcagcaccagcggcggacaaaaaggaggagaagcgcaaagacaaacaccgatcgaaggaggcggggaagagcgacgacagcaaagcgggcaagaaggacaagcacgggaagaaggacaagaagggcaagaagaaggacaccgccgatgcatccaccgtggacgaagcgctgggagaacagagcacagcggagacgagccaagcagaggaatagccaggccctgctgcgtgcaaatgacagtgttcgacgacgacgtctcgcgacaccaacacacccgtcccttgctttcgaccattcccttcccatccgattgctgtgttttgtctgttccaatgcttcttaaatgttccccttgtgaacagtgatccttccttatgtggcctgaatatgtatatattgtatacccattaatatattgtgcttcgcttgttcgatatttgtgaaatctcattcatattcatcgtcattgtatttatatgcacatttgatatattaataaaatggcatatcggttaggcataaattgtatagtttaattccgtgtttcatcgagatgacctacccgttttggtacttatacagtttacagggtacttttcacatacattttttttaaattggctgtgcttttctaaattttgtggagggcaccgcccaactcgccgcacctttgttttatggctttctcgccgccattgaaaaaatgaatgtgaaaaatttggattcgataaatcatttaacgaaatattcttaatcagaactttttccctaaaatcgctgctaaggaaagccgaaaattctagctattttttatcgggacaacaaatttagacaattgccagttgctgatgcgagcaaccccgaaaatccatgaatgaattttcatgatttattatggaaacattttttgcaatcaaaaaggtctataggtctttaataaaattcacgtttcatcacagttaatacatattaggcgaaacaattgatcacaagtcatttgaaatgataacacagagatacaacacattgataatggtgatcaaccaacaacagacaattatggtcgcttaaacagtaaccaggcgacataatactgtacatacagtgagatacaataatacaatctttacagttgggatcatatgtgggaatagggtcagttgaatgtatcctcctcctcctccctcttcggcggttgtcttctgcatctctcccatccatcggtcgtttgtcgtgtcatctcatcgcgtggttcttcgtccattcacgggcaattcggttgtactcctcgcggttgtcgcggtacatagtcgcaatgtcctgccgcagcgcactgttcggattcgggtcacagagaagcgaagagatggagagcagcactgaaatggagaggggataaggattaaaacggcatttccgaatttgaaaaatcccattttcaaacgacaaaatatcacacttccaaaaagtacagttttggctgtcgttttgaattggaccattttgtcttgtcgatattttgtcggcgttttgtctgctctttcacctttcgaaatggtcaacgacggcgcccacatctgcttcagaatgtccaaacaaatgtcgcccctttctccaacgttcggatggtaaatgatcgtgtcgaatttcacatttggcggagtgaatgggtagtcgcgacggaaaacgatgtccaaatggaaggtgcctccttcgtacggcgactcgggcggtcctttgatggaggccttccaatggtacaagtctctgccgtcatccatcggtgccgcggtgtaacccgtcgtgaccagttcctgatgcagctccgccatttcctgcaaatggatcaaaacatttaaagcattggttgatcagagagttgtcatttgccaccttttggatgcgtcgacgtgccattgcgaaaacggcgagcgaattgatgtgaaggacggacggacgaatgaacgatgagaaacggcgatgaggtcgcttttgaagtgttgttgttattgcacaatgaagggatgatgatgataaacgcaaatagttctgttctaaaaaaggaaaaaacataaaaacaatacataatgaaatgaattataaatttaaaaatagggaaattgcagtttttgtaaaaaaaaatttgataaatttaggttcaaatttggtagtataggccagggaaactctgataaactttcaggtcgatgtcgataatttttggaattcgggttgggtatttactggttaagataagaaatatgtctttttgaaacagtgaagtttatgaaattcacaaaaaacatagtaaaacactcataaaagaaaaatgagtgaatgaaaagggaggaaaagggggcacaatatttatagtacgacgcaacaagggagggcaaaagttaggtagtaacgtaggtaggtaccattgcccaaattccaaggttttctctctatataaggaggtgtttttctcattggactgacattttttgcattacgcctatatgctttgcttacttgttccctcctctattcagtccttaatgttctgatttaattttttgtgttacagagtacgcaaaatataattaacccgaatttttccaattgttttttcaatcaaaattgactgtttctcacagaattttcctgctggacaatctaaacttggaatttaatcaaaaaaacccaaaaaattgcttttccctatttttaaaatttataattcatttcattatttatgtttttatgctttttcattttttagaacacaactatttgcgtttatcatcatcatcccttcattgtgcaacaacaacaacacttcaaaagcgacctcatcgccgtttctcatcgttcgttcgtccgtccgtccttcacatcaattcgctcgccgttttcgcaatggcacttcgacgcatcaaacaggtggcgaaatgacaactctctgatcagccaatgctttaaatgttttgatccatttgcaggaactggcggagctgaagcaggaaccgatcacgggttgcaccgcggcaccgatggatgacggcaaagacatgttccactggaaggccaccatcaaaggaccgcccgagtcgccgtacgagggaggcaccttcaacatggacatcgttttccgtcgcgactacccattcactccgccaattgtcaaattcgaaacgcccgtttaccatccgaacgtcaacaagcagggtggcatttgtctggacgtcctgaagacgacgcattgggcgccgtcgttgaccatttcgaaaggtgaaagcgacgcgggaaagagcagacaaaatatcgacaagacaaaacgatccaattcaaaacgaccgccaaaactgtactttttagaaaaatgtcgatattttgtcgtgtgaaaatgggatttttcaaattcggaaatgccgttttaattcattgtctcccctccatttcagtgctgctctccatctcttcgcttctctgcgacccgaatccggacagtgcgctggagatggacatcgcgattatctaccgcaacgaccgcgagcagtacaaccgaaatgcccgtgaatggacgcagaagcacgcgatgaaatgagacgacaaacgaccgatggatgggagaggatgcagaagacaaccgccgaagaggaaggaggaggaggatacattcaactgaccctattcccatatatgccaactgtatagattgtattattgtatctcactgtatgtacagtatttgtcgcccggttatcgtttaagcgaccataatgtctgttgttggttgatcaccattatcaatgtgttgtatctctgtgttatcatttcaaatgatttgtgattaattgttggcctaatgtgtgtaaataatgtgaagaatccaaagatttgtttatgtttttgctcccttcgtgccttttcatgactttttttctcttgggcaaattccaggtcgaaaaacttggtcccggcctctcaggtccggtcccggtttttgtcaaaattaaacagaaaccttcaaatagcacttcaattgctttgatttttatttctcattaaagggcagtcaaaatatgcaagtgcattttttccaggcttttccatgctctaaattagtgttcagaccccgacccatccnccccgggacgggacaggtttttttggcctgcctcacccctgctcccgtgactcagactnccgcaaccctcgcccccgcgacctcccgcccccgcgggggtgagtactcttttcaagttctaccgtaaactgaaccctactgattttattatttttttataccgaggaaagtctcaagc

SEQ ID NO: 102 - DNA, 4914 bp, Heterodera glycines
cattatgacacttggacattttgacgggcagcgaaaagcgcgtgctcaactgattgattagtgagcagaattccgcaagaaaataattgtaaaaggaaaaagtgatcagaaaattacttaagtgatcaatcgatcagaggtgaaaatgctgcggtaaacgattgattgccttacgccaatttgtacgcttcggttggtcaaaagtcctgcaaattgcctaattaaattaggcggcggttgcgcactctttcccaattctgcccaaatttttgcactttcatcaaattcccaaatgttagtaaaatttcctcaaaatgcacttctttccatttttgctgctgttttgaccctctcacaaaatgctcctccaccgatcggtccctttttgattgactcatgcgaaaaggcccaaatgattggtctccaaatcgaaaaggcaaatggcaaaatctgcggggacaaaaagtaaaaaatggttataaaatccggaaaattggcacaaagggaggggagagattccatttggcaaaagtggaggaaatgagcgacttaatcgaaccggacaaagtgagggcattttggccgcaaattctttgactaaatctgtgcaatttatgccaaaaaggaatttaaattgaggcgatacatcgactaaaagaatttggagccaaacacatcattcataaaaattagttttttttttgtgagatatttagaagctcgcacctttgttttatggctttctcgccgccattgaatggccagacccaggggcagtggaagagacccattcaaagcacgcagtgccagggaaagacgtcgcatgggcaacaaaagaaaggcggccgcagggactgctgcaaacgtgggttttattctgctcctgtgctattcggccttcaattgttttttcttttcactttttggcacttttccagcagacagagcgaaggtcgaaatttcatttctccctttttcaggtgcaagctgccaacaggcgccccatttgtctgatctgcttgaagaaaatgacccaagtccgtcaggtgcgcaccatctgtgaccacgtgttccactacgtctgcttccaccgttggctcaaatatcgtctgttttgccccgtctgtctgctcaactttcgcacggaattgtatcattcgggaaacgccgtgtttgagggcgcgtacaacgatggacacgttgtgctcatacctgatggtgaacaaagcaacagtggataagtgatcggcactcatctccaattgtgatcggacaaaagcgatatctaattttgtattgtacataaataggttattcggacaataaaactgtaatgtgcatttttaaattggctcgtggttttctaaattttgtggagggcaccgcccaactcgccgcacctttgtttcatcggctttctcgccgccattgaaaaaatgaatgtgaaaaatttggattcgataaatcatttaacgcaatattcttaatcagaactttttccctaaaatcgctgcaaaggaaagccgaaaattctggctattttttatcgggacaacaaatttagacaattgccagttgctgatgcgagcaaccccgaaaatccatgaatgaattttcatgatttattatggaaacattttttgcaatcaaaaaggtctgtctataggtctttaataaaattcacgtttcatcacagttaatacatattaggcgcaacaattgatcacaagtcatttgaaatgataacacagagacataacacattgataatggtgatcaaccaacaacagacattatggtcgcttaaacagtaaccaggcgacataatactgtacatacagtgagatacaataatacaatctttacagttgggatcatatgtgggaatagggtcagttgaatgtatcctcctcctcctccctcttcggcggttgtcttctgcatcctctcccatccatcggtcgtttgtcgtgtcatctcatcgcgtggttcttcgtccattcacgggcaattcggttgtactcctcgcggttgtcgcggtacatagtcgcaatgtcctgccgcagcgcactgttcggattcgggtcacagagaagcgaagagatggagagcagcactgaaatggagggagaacaatgaattaaaacggcatttccgaatttgaaaaatcccattttcaaacaacaaaatatcacacttttccaaaaagtacagttttggctgtcgttttgaattggaccatttagtcttgtcgatattttgttggcgttttgtctgctatttcacctttcgaaatggtcaacgacggcgcccacatctgcttcagaatgtccaaacaaatgtcgcccctttctccaacgttcggatggtaaacgatcgtgtcgaatttcacatttggcggagtgaatgggtagtcgcgacggaaaacgatgtccaaatggaaggtgcctccttcgtacggcgactcgggcggtcctttgatggaggccttccaatggtacaagtctctgccgtcatccatcggtgccgcggtgtaacccgtcgtgaccagttcctgatgcagctccgccagttcctggaaattggtcaaaacatttaaagcattggttgatcagagagttgtcatttgccacctttttgatgcgtcgacgtgccattgcgaaaacggcgagcgaattgatgtgaagaacggaagaacgaacgaacgatgagaaacggcgatgaggtcgcttttgaagtgttgttgttattgcacaatgaagggatgatgatgataaacgcaaatagttctgttctaaaaaaggaaaaaacataaaaacaatacataatgaaatgaattataaatttaaaaatagggaaattgcagtttttgtaaaaaaattttgataaatttaggttcaaatttggtagtataggccagggaaactctgataaactttcaggtcgatgtcgataatttttggaattcgggttgggtatttactggttaagataagaaatatgtctttttgaaacagtgaagtttatgaaattcacaaactgaaaattgacgaggaatcagaaaaacagagtaaaacacccataaaaaaaagtgtgaatgaaaagggaggaaaaaggggcacaatatttatagtacgacgcaacaggggagggcaaaagttaggtaggtacgtaggtaggtaccattgcccaaattccaaggttttctctctatataaggaggtgttttctcattggactgacattttttgcattacgcctattgctttgcttaattgttccctcctctattcagtccttaatgttctgatttaattttctgtgttacagagtacgcaaaatataattaacccgaatgtttccaattgttttttcaatcaaaattgactgtttctcacagaattttcctgctggacaatctaaacttggaatttaatcaaaaaaacacaaaaaattgcttttccctatttttaaaatttataattcatttcattatgtattgtttttatgttttttccttttttagaacacaactatttgcgtttatcatcatcatcccttcattgtgcaacaacacttcaaaagcgacctcatcgccgtttctcatcgttcgttcgtccgtccgtccttcacatcaattcgctcgccgttttcgcaatggcacttcgacgcatcaaacaggtggcgaaatgacaactctctgatcaaccaatgctttaaatgttttgatccatttgcaggaattggcggagctgaagcaggaaccgatcacgggttgcaccgcggcaccgatggatgacggcaaagacatgttccactggaaggccaccatcaaaggaccgcccgagtcgccgtacgagggaggcaccttcaacatggacatcgttttccgtcgcgactacccattcactccgccaattgtcaaattcgaaacgcccgtttaccatccgaacgtcaacaagcagggtggcatttgtctggacgtcctgaagacgacgcattgggcgccgtcgttgaccatttcgaaaggtgaaagcgacgcgggaaagagcagacaaaacgccgacaaaatattgagacgacaaaacgatccaattcgaaacgaccaccaaaaccggactttttggaaaagtgtcgatattttgtcgtgtgaatgggatttttcaaattcggaaatgccgttttaattcattgtctcccctccatttcagtgctgctctccatctcttcgcttctctgcgacccgaatccggacagtgcgctggagatggacatcgcgattatctaccgcaacgaccgcgagcagtacaaccgaaatgcccgtgaatggacgcagaagcacgcgatgaaatgagacgacaaacgaccgatggatgggagaggatgcagaagataaccgccgaagaggaaggaggaggaggatacattcagctgaccctattcccatatatgcccaactgtatatattgtattattgtatctcactgtatgtacagtatttgtcgcccggttatcgtttacgcgaccataagtgtctgttgttggttgatcaccattatcaatgtgttgtatctctgtgttatcatttcaaccaatttgtgatcaattgttgcgcctaatgtgtgtaaataatgtgaagaatccaaagatttgtttatgtttttgctccctttttcgtgccttttcatgactttttttctcttgggcaaattccaggtcgaaaaacttggtcccggcctctcaggtccggtcccggttttgtcaaaattaaacagaaactttcaaatagcacttcaattgctttgattttttgatttctcattaaagggctgtcaaaatatgcaagtgcattttttccaggcttttccatgctctaaattagtgttcggaccccgactccggggacgggacagg

SEQ ID NO: 103 - DNA, 8214 bp, Heterodera glycines
caacaccagcaaaatttttcctttttggcatttcctttaatgtagtcttcagcaggaactccattgtgaacagtgactgttatattgtcaattctcccattgcgttgtaaatttaaaatattcggattcagctccccgtaacaatacaatacacgctcaattggtactgaaataattttgtccaagttacgtaataatctcattatccattccgactttccacttcccgtacttcctgacacaatcattgtgaatggatgacgaaactgtacatccgtatgatcaaaagtttcctccatttttaattacatttagatttaaaactctatatataacttttaattctgttaatttaaaaaaaatggatttaattctcgccactgattggatgaataacgcttacccggaaatggaacaggacaaggctaacatgtcaccaaaggaagaccctagttggattagtctcattgatgaagaggaaaagcgggagcctatagctattgtgcaaatcgatgaggaagaggagaaacaaagaaaaagtttgtcttttagtgttatttttttttaattaaaatttagatcctcccggaaattgcgactgtcgagagaagcgtcgttgctttattccgcttgttgaccacttgtgcaagaaatttgagtgttccgcccacgagttacacgtactcttcaaagacttggggaagcgtcgcgccatcgttgaacacctacgctcttctcaattgtgcacctcccacctgcgtccatcgatacggaatttcccagttcgctgcaacgatctctccattttggatgctcactcagtccctgcataccgtggttacctcggaatcacggtgtttattctttttattttttttatttctcaaaatattttaggttcgaatgcactattacatcaaacacggtattcgattgcgtcattcaaatttgccttgtgttgttgaatttggcggtggagatcataagactttcttcccattagaagctttgaatattgttatttagatgttttctgtatcaaattgtactgttgtttttaaaataaatgctcaaccactaacaattgaacaatttttgactattgcacaacatggagccaatactgagtacaacccacgccgtttccacgccatcatcatgcgaatccgttcatcaaacaaaaaaacagtggctgctctaatttttcagtcggcacgtgtcgtcctaaccggcgtaccccacccagacagagcaagagtgtttgcgaaacgagttttgcgaagaatacaacatacacaaaacaccatcttcgatatccatgagatgcgtgtggtcaacattgtgggtgtgaaaacctttccacaacgaatctatgtggagcgcctcgtaacaagactgggtggtgtttacgatccaagtattttcccagcacttcgatgcaaattggaaaatgatgcaacttgtctcatctatatctcgggaaaaatcattataactggtgtcaattcaattgataatttacacaatttatttcaatatctctcaagtgtgattcccaaattttttcgttgagattataatttttttattcattgataataaattttcaaaaccatccagaataacccggtcgagttgggtcagggtcaatcaatgttctctttcttcgttcagccgtaggttgtattggtggatgtgatacatcctccacatatccaaatggtcgtgtttgcattcccggtcgaacacggcccttggcgtagaaaggtctgtagtctttgtgggcctcgcaggtgtatacgtcagaacggacatttcggtcaatttgcgggaaagttactcggatgcaacgatgggctccacctcctccgtacacgtagagatcatcgttgtcgatgacgtcatcactaaaatttaaaattattagttgtgaaaattaaaaaaaaaaactgacataggtccgtcaatgttatatgtagccagtgtcagatccttcattgcttcaaaattcagtaattgttgagtggcgtacgataatctgaagcttcgtatttttaggttggcccgctcatcagttccgtctcgtgctgtgtgccgaattccataattttttggaccaccagctacaaattccacaattcgacgatcaacatgctcacgcttcatttgtccaagtgcctcgccttccggaacacaccgcccacccatcttgttcacgtagtagattgagtcagtgtctaaaattatctaacatttttttttctattgtattcgcaaaccacaataaagaagctcagccccttccagtgcaatcactttttccatgtatgaatagagatgaagtctcgcgtacgatgtgacgtatattgcgactggaagacagtttgtgaggggtgcctttgcaaactcgggacgcttcctgacaacaactcggtccatatgctcggagacgtggacaaagtccagtttgtctaatgttggatcgtccaagagttgatggaattccgctggagtgcgcgtgtactttatctgcgtgaaacccacgcgctgtgccatttttcccctaaacattttttttttgttcaaatagaagtttaaaaacgtataccacagagaatttgccaatgttttggcaatgaggcggagccctgggttgggtgtcattttcgttgagtctaattggatgccttccgtgcgcatgaaattatccacgaattctttacgttgttcatctgtctcacacccttccggccacccagtcgcttggactttgagaccaacgaatgtattgacatatttgctgaacaagtcgtcgtcccactcgtcatagttccaaaccttttttttttatattttttttttcgttatttttaatgtacctcaaagagatcaacgacaatatagccgagttgaagtgccttgttcaattccatgtgcgtgtatgcgcacacccaagaacgcttttcgtcaccatgttgacatggacgttgctggcgtctgtccgcacaccaagcacagagtggaaaggtgaaacgtccatctttggtgcgatagcccagcaacgggacacgaattaggcgcggtgcgagcactcgtacaagtaaaagtccccggaacatgttatttgacgaacatgtccagggaagtggggccgtgggtggatgaagcaatacctcacgcgtgagaacacgtggattccccactgggaaaggattcaccttctaaattcaaatttaaattcaaatttattgagaaaaagcaccatgacgtagggatataggctaactatatcaatgcacaatatctcttcatcgtctgagcacacatgatgaagtttgaagggctccgtacgaccaccacggagtgcatcgtttcgtggatccaatggacacgggacaaatactgcttcgaaacgctgcttgagctccaaatcgcgtcggagccgttctttccactcacaaccccatacgacgtgaagctcacatccatgggtatgttcgagttcaaagagtcgccgcatcgtcctttcgtataaatcctccgcagttctcccagcagccaacttttgtcttcgatttggaaaacagtcgggacatcctttaatcgtttaagatttttatttgaaaattaagacgataaaacaccatgatagtagcaacccatccactcgatggccagtggacgaagcggaggctctcgtcgccagaggccgtccacacgatagcctgtgtcttcaatgttggcctctcccacagaccaatccgcgcactgcacttgggctccagggttttcaagctcgaagaaccggatgtatcggcgggattcggcggaagctcgtcgtccacggaggtatcctccctcaggtgagtgaaccaaacggttgaacggtagaaaacaacgtcggagcgttgataaagccagaccagcagctgttgaagacaccaaaaagggatcgaggccctgagtgtgttctccgatgagttttcgaaagcgcaacacggattctcgaagaatggcaacatcatttatgcagtacatgatcagctgctcacggagttggaaacgagcatcaccattgttattacaatgccatcgaagaaatttttcccgtttatcagctttcatcgtgtttggtgagtagaattcgataggcggaagcccatcgagtcgttgatgtagatgttgtcgtttaatgtacaaatatggaaagaatggtttcacagttgcgagatgttgtggcagatcaaaactttttacgagtgcatccaattcacaaaagaagtaattgatggagtctttaaaagttattcgccgctgattcatgccacgaagcttcattgaatagatttttagaccgctggtgcacaaacgttttggtgggtaactccgacgatgtagtgcttcgagtaccagatgaaagtcgtattttcctccgttatgagcgatacaaatggtgtgtgcttttcttgatccatgatggataagaaagtcgagaaattggtctacggggtcagaagcttcgttatcaaaagaatgaaaaaataaacgacggttgttgaatacaggagctccttccggctgaggagtattatccccaggagcatttacaaaaggtggtgacatccattgacgcatctgttgacctctcactcttccacataggcaaacgcaaccgggtgcgcgctgaccttgcccatcgttgatgttgattccagctcgaatgcaaggttcacaaatgaattcagcaactattagcaaaggtacatgtttatgggcgacttggttgttgagctgtagtgggcgctcctgggatgtttcggcatcgaagaagcaaagacgaagtggtagcagttcatctcgctcatcatcatcatcatcattaatatcatccccgttttcaacatcatcttcatcttcatcaccttctcctcccagattgttgattatgaaatcaatatcattttcatcctcattgttgttgttgttgttgttgttgttgttgttgtcgtcgttgttgtgaacaggaccaagcattggtaaaggtggtgcaacaccaatcggttggatgtagcaaggttcatccaacatatgtggacctttgcaacgaaagcaatcaactggcccaatagcacgacgtatcgaggggcattgatggattccaaaataggcaacacgaccgcatgtgggacaaaaacgtcgccattgacaaagtgaacgccgttgtctatgtccgcgcccatcaattggagcaggggcatcattcgccaaatgatattcataacagttgtcatttgggaaaatgaaaccacattcggtacattttcgtgaactgatctgaccatcagacaactaaaaaaattttataactgaaaaaaataagctcaaattaaaacccgttctcgttgacacgggtatccacccccgaatcgaaaacaaagacgacatgccgccttgcaaccaatcgcatggtaacgcgcgtctgctctccgttcacagtcaatgcagtatccaggaaccttgaagagctgtgcaattcgtccaatatagttgaagtgtcctcgttctagcaggatacataaattgaattgcgctgcagttcttcaaatgtttttttttaatttagataaacaaaaaaatattacccctctcccttgaagacaatacggtattcttgctccttttcgaagattacaaggcgaatttgtcctaccccattctcattattgatatattgttggagttgcgcaacatcctccagtgtgtacatgtgtttgtcaacagaaacaccggctcttgtaagcaaatgaacggcctgagtcccatgttggtattgacgacttgcgtatgtgttgaacgctccacgaccacctcaatttggcatttgtgtctcacgatcacaaagtccaagaagaacagcacgcgcgaggcagtaacgatcgttggggttcacaacacgaactattgactgcacgttgtgtgataagtgatgttcgttatccaaatcgcacgcacctatattttattttatcaaaattttaaattttttttttatcaaccccctcgctgagcatcgacacgaacggattccaaaggccacacagcgagaactttggtgacggtcgttccagaaagcaagtctattccagcggccgattgctcattgagtctttcgatagctgcagcaagtgctgccgcgttgttttgttcaggtggccgaagtcggatcacgtagggtcgatcaaaccccggcggttggagctgcagtccaactaggattggactcgggtgcccctctaagacacggtcgagaaggtgttgaatgaggatctccatcacaaggtcgggacgctcattgtcctccaaaggcaagaacctgatttcacacacttcccctctcgtgtttctcagtgtgtttctcattggtgttgtacgttcaattacgaaggagtcatcaatcgaacgatccaccttttaaaatatcgttggactaatttgtaaacaatgatctctgatcctggcctttgttttaagagcaaatcagttacaataaaataaacgaacactttcacccacccttctctcgggaggtcgcgtacggattggtatgccaaaacggtgatgaagtgtctaatataatttttattccacagaaattataaaaatgctgagaagaaatatcatttcctcacgttgttattgttcacatcctcttcattggtttggttaaaacggagctgattacgtgaaccattcaaatttccatttacctatatattttttttaaatttttttttaaataaaatcagaccacttcattgcgaccacttcccgtctgaatttgcaccggttgagccttaattaaattatacacaactttagttgatttttaaaaacttgaatttgttcccccaaaatagatgcgattgagtgacgaagtccaactgattcattaggacgagcattggttgtttgctaatcagtgatttttttttaataataataataataataaaaattacctggtgtattgggtgaggaattatggtagcatttctaccatcaacgccaattcggtaccaacaatccagtcgctgataccgtgaacgtgccatacagttcatgaaccagtaagcagttccaatggacaatgacgccaaaacacccgcttgagtttgccatcccgaagcttcaatccgatgaccatcggcattgcgcaacacaacattagtcacagaaagcaatcctgcgggagtctgttgttcgggccggtgatcaattgaaacaacgatcaggcagagcggtcttggaacacaaatttaaagtcttcaccatcaaaaaaacatacggtaaaggttggccaatttgggtaacgcatccattcaagaactgaatattgtgcgttccatcggtgcagaatacattcttgaacaattatggaaattaatataaatgacaaatctatgttggctagtcagatcaattgagtaaaacaacccattttttttaatgatatattaatattaaatgtgccaaaatatacatttccaagtgctgactgtccttgctgaagttgattatgattggagtttgccatggagaaaaatttaaatggtaagttcactaattcttataaaaataaaaataaattattaattattattattaatgaattcataaaataaaatggaacgaagtaaaaattcaaattttttttttattggaataatagtttaataactctggattaataaaaggaaaatagtattaaggttttagtgatgctaataaaattaaaattaaatgtaaaaaaatcataaaataaaataaatgggacgaagtaaaaaaaattaatttctattggaataattttttattagttttttaaaggttaataaagtgaaataacaaaaaaaaaaaggtggggggtatggtatggtatgctatggtatgatatggtatgttatgttagttatgctagttatgttggtatagtattaagtagggctaggatttttatgttttaacatattttttttgcggcttagttatggcgagagaagcccaaaaatagcattttctccgaacaatttttggtttagagcgacttataaaaacataaaaacacatattttggcgttttggcacatataatatgttagcacatattttggaatgtggcacatattttgcgacatattttggcatttttgagaa

SEQ ID NO: 104 - DNA, 3878 bp, Heterodera glycines
attcatttccatgcgcacctccccaaatttcatgcgctcattgtcctgtcccaattcccctcgcacacatttacttgttgtactgctccaacttcatgtcctcccaatttggcccaatttttaccatttcatttgtgatttttgtgtgatcagccaatagggccattttgcattcacattttattttgtggcctttggccggattttcctcccccatttgtccgcccattgtccactttttcggtttaattacccaagtttgagataaaatttggtgtgaattttcctctgcacttgcccccgtttgacccccggcacatttcccgtcccactttctgcttcctctcctggcaatttcaacgcccgaactcctcgggccttgtcgacaccaccgcggcgacctgcaccgcactcaacgtcaagcgcacacggccaactccaagcagctcaacggagctcaactcaatcaatcaatcaatcaacgggtggtgatcggacaagtggcgaccctggcaggacaaaccctcgacagcaccagcacaactgagcgacttcaagcagtattggaactgcaactggtgggaattttttgaggaaaattccaaaaaaagtatcaagtttgcgctctccgtagccaaacttgaatacatcaaaaaggggggatcaaaagtgggaaattgtggaatactgcttggtctccgtgccagcagtagtttcacaggggaaacagtgacttactattttggtcttcgtgccattagtatttcactttcaaattacttattggtctttgtgccataagtaatcggtaaaattactgatcggtctctgtgccgtcagtaattcaagtactgctcgctcttcgtggtagcagtacccaatccaagccaacaaaagggggatcggtgtgaactgtttgctctccgtggcaacagttgcacattcaacacaaacaaacaagtcaaacggcgggaaccccaaggtgtactgcttgacctctgtgtcagcagtacaaccacgcaagtgcagcaagttcagcaagccaacgaaaagcaaagcggcaaacgaaaagtacatcaagcgacacaacaaaagcagcaaagcaacgacaaacaagcagcagccgcacacgagctgatcaagcagtacagcaacagcaaaccaacaatcaatggccgcaccaattcaacagaaactcggcgctgcactcaaagttctctcccgcagccgaactgcggcggagctgaacatccaagccgaccaagcggcatcaaatctcgaaaatgccctcaacttcgaaattcaattggagaaagttcaaaaagatgccaaaacgatggacatcttcctcgacgatgtgcgcgaagcactcactgcatgggcagatttactgcgcaaactgcctgcactggaacgcgatccggcagaagcagacttcaacaaattcgagaaaaaagagcgaatcaacgacaaagtcgacgaagcagcactgaagctgcgcgacttgcgcgacttaatcggcacactcacgtttcaagcccgactcttccgcagcaaggcggacaaagaagaaagggacgctcaagcagcctatgcacaagcaacacaacataccgcacagcaacaaacaacaaagacgccgtccttcactcctccgttctaccaatttcaacccattcagctggacaagttcttcggcaacaaacgcaaatggccggagttctacgaatcgttcaaatcggcaatcggcacacatgcgctcagcaaagcggagaagttcaatctcctgcgcaacctgctcggaggagaggcccgtgaactcgtggccggatttcggctggaggacaacaattacgacacggccctccaattactgaaggacacatacggcgcaccggacgaacacatcagggcacttcatttcgaattggcaaacctcaagccctgcaaaaacctgcgcgacacaaaagaattcctcctgcaactcgaaaggctcacacgcgaactcaacaactcaggagaagacattgaaggcccaccaaccttccttatgcttgaaaagaagctcactcccggatttctacgcacaatcctcaccaaaaagggagaaaatccggcacactggaacaccacgaagttccgagacgtactcaacgaagcggtccgcaaagaaacacaaattcaagaagtcatgggcgagtacggacactcgcagcaacaacggccgccaccgcaaaagccaaatttctcggcatcgaaattccgagaccgcgcaccaatcccgcagcaaagggaacgtacattcatcacatcagcagtggatgacaatcacaaaaggctgtatggcagacagcctcaatataggccgcagcaacaaaggcctcgcgcaccacaaacgcaacaaagaaactcgcgcactttcaacaatcgaacgcaaattccagctcaacaggcaaatgcgacattcaatcaacgcaagcctccaagtccgtgtattttctgtggtaacgaccactggaacgaagaatgccggaaattcagcacaattcaacaacgaagagaagtgctgcgcacaaaggcattatgcttcaaatgcctcaaaaacaatcaccaagcaggaaattgcccgcaaccaaaaagatgcttcaaatgcaaacaaccacatccaacggcattgtgccacggcgacagcaagccaccaaaccaaatcacagcagcaatgtttggacaaccacaacaaaacgtgccaagtacaagccaagcggaaagcaacgaacccgcagcatcaacatcacaaatgtgcaatgccgtaaacggaagcgacactcgcgcactgctgatgaccgcaacgtcaacggtcttcaatccagcacaaccgcatctcagcatgactgcggcaattttcatcgatccaggcagccacagatcattcatttcggcaaaggcagcacagctactggacctcccggtggtccacaccgaagaatgccatttgaccagcttcggagaacgcgaaccgaagagatacatcagcgatctagtcaagctcggatttctctgcacaagcggggaaaagctcatcttcaatctcaacgccatgaaattcttggtcaacgacatgccaatgattcaactgtcagagttggacaagacagaattgagacaacaaaagctcaatcctccacatgagcaacgacaaccagacatcatgctcggaattgatgtctggcacgaactgcaggttcaaccaatcgaaaaactgccaagcggcttcacactgtgccgttccaaaatcggcaaaatcttaagcggatcaggacgcatcgaaatgcaccaaacgccgaacgtgacattcgtcatgtcagtccatggcactgaccaagaaggagccaatcaatctgttacgttcgaatcaaccaaagaagataaggaagtcttcacatccgaagatgatgtcaaaaaggacgagcagctcaacaacttcttcggattaaacctgatcggcatggacgacacatcaacaccaactgatcaagatcaagtgatggtctacttcaaaaagaacctcacattcgtcaacaaccgataccaagtcgccttgccttggaacgacagagtcgatgctcttccaagcaacatacatcaagccaaggccagactcgtttcattgatcaaaaagctgcgcagcctcaacctgattgacgaatatcagacaattttggacgaacaaagtcgacagtcggtcatcgaatacatcggcccacctgagtcaccatcaagtgcatggcgcactgcatttttgccacacagagcagtcatcagagcggataaagcaacaaccaagatccgaatcgtcatggatgcgtcagcaaaaccaa

SEQ ID NO: 105 - DNA, 3765 bp, Heterodera glycines
tggccgcacacgacggcacaattccaaagctggaactccaagcactgactctcggagtcaaggcagtcaaattcatccaagcgcaaatcaaatttgccgatcatcaagtcatcatgtggacagacagtcaatgctcagtcgaacgacttcgagaaaacaagcgccaagatcgatttgtggtaaatcgattacaaaaaatccgagaagcgaacttccaagtccgacacgtcagaaccgactcaaatccagcggacatggcatcaagaggagcggatcctcaatgccttcgatcatcactgctttggcactttggccccgtttggctttcgaaagcagacaaatggccaaaatcaaacgtcatctaccggcccggagatgaattcaaagaagtggaagagccaccaatcatcgaactgacaacacctgttcatgtcgaagaacagttcaaaccatcaatccacttcgaacgattttcgaattggaacaggctgaaagccaccgcagcacacgctatgcgcttcatcaaaaagcttcgcacaatcgaaaacggcacaattagtgaaccgcatcaaaacaacaaaccactgaccatggcacaactgcaacaagccgaaaattggatcttgaaagaagcacagcggcttcatccaccatccaacgaccaaatccgagaattgcaactcttccgacaagaaggaatttggagatgcggtggacgactcgaggaagcaccggatctgccatacgacagtaaacacccaatctttctgccgccacacgcatggataaccaagctcatcatccggcattatgacaaacagctcaaacattgcggtccgagaatactcctgtcaacattaagagagaagttctggataccacgcggacgcaaaacagttcagcaactgctcaactccccgcaacacggatgtcttgaatgtcgtcgagaacgagtcaagccgtacatatatcctgaggcatcggatttgccaaggggaagagtcagcgaagcacgaccattcgacaaaacgggagtggactacttcggtccactcaaagtcaaacaaagcaatgacgtggtaaaaatctacgtcgcactcttcacctgcttggccatccgcgcccttcatttggaagtagccgaagactactcggctgaagcattcctccgagcctttcggagattcacggccagaagaggcataccatcacttatcatgtccgaccaaggcacaaacttcgtggcaggagcaaaagtcatcaaagaaaactggaccgacacgttaatgccggaggacatgcaacaacaaatggctcaaagcggaatccgttggattttcaacacagcccacgccccttggaaaggcggcatttgggaaagacttgtcggcatcaccaaaaacgcactacgaaggacagtcggcagaaaccttctcacattggacgagttcggcacaatgctctgtgaaattgaagcgatcatcaacaatcgaccactcacgttcgaatcggatcaggaaccgatcaaagtgttgcgaccaatcaacttcctgataccatacagcaaagcaaacaacaacttcccaatcatcaatgacgacacagacgatccaacatacgagccaaacccaacaaatcgcgacaaaatggtgacaacactgagccacgttaatgctcggctgaacaaattctgggaaatttggaaaagtgactaccttctttccctgcgcgaacacgaccgaccaaatgcaacgacaggactacaaaccccaaataacggcgacatcgtgatcgttgaagacgaccaaatgccgagatccttgtggaacttggcgagggttgagaaagtcctaataggaaaagatgggagagcgcgcagtgctttgataaaaatcaatggaaaattaagggatagggcaataaaccaattgtacaatttggaattgagccctaaggttccagagcaaccaattcaacaagtccactgcctcatcgcatcaatcatggaagactcagtctccttagccggcagtgacgacgaagaacaacgaccacgcaacaccgaagacttcaaaatcccaaaacgccgctcagcattattacgacccatcggagaacaacaaagtccactgcaaggacaacacaaacgccgcaagcaacttcacgactccggattgctaaaattgttccatgcaatcgcggaccaacaaggaagcagcaaggccacgattcaggccatcgcagaaaacagagaagtgcgaaaagcgccacaacatgagcaaatcgaacacgaacaacaaatggtgcagaaagcgcaaaaagaagctaaacgacaccttcgcactgagcaacacgaacgagaaatgccgcagccacaaaaagaagaacaacaacgagaagccgaacgtcaacaaatcgaaaggcaacaaaacgacgaacaacgtgccaccaatcaacaagcacacagcaaggcatggcaagaattagcacaacaatttgactatgatctgatggatcagccggatccaacagagaagcacgcggaagaaacggatcagtcaacgaaatcaaagcagcaatcagcaaaggacaaagagcttgaacgacatcgaatcggcagaaaaaagactatcgacatgcaagagaagcgacaacggtcaagagacgaatggccagaggaaaacgaaacgctactcagctacgttcaacgcatttacggaccggagaattggacgtcagcatggcaaagaggacgtgttctccgagaactccatgaactggaggaccaagggcgatggatgattcatcataaaaccgatcgacttcaactcagcgtctcacgactgtatggaggaaaacgaccattcgccgagttccgttttgtggacggcggatactactcacacatggtgccagaagatgtgatcttcctccaggccgtgccaaccgaagaaccggaaatcataacgctcgatgacacgccaacaacagaaaaaacggccaccgacaacgcaaagcagccaaaccaaccaaaaacatcggcacccacaatcgaagagtaccgaatggccgaccccaagccgaacaacttcaatgaattcaacctgtttgagccgtgtgacgactctcacacaacctgcgcaaaaacggcaacttacggatcaatcgccagcaaccgatttcaattggaagagttcaacaactgccgcgcgaccaacttcttccaagccctaatcttcaattggctcacccggaacatgaacctgccagctgatgaaatttgggcagctcacgacaactacacacaactcaacgtcgtaacggaagaaatcgccaaaaagtttcaccaacaacaagtcgtcagcaaaagacgacaaatcggacgcgaccagcacttcacagaggtcatcaatgtctggcgcaactcatgcgatcgcttcggcgagctctacaatcaaccggcacacaaacaagtcaagtttcgaccaatcataccagaaaaggagcaaccaagtgactacgaggaatggatcgagcgactcaacaaccgaacggcggaaatcctcacaaaagctcgagcaaaagtgcagcacccgaccttcttgaactacaattgcacaaccattctcatcggagacaacgtggcagaagtgtttaagccactcttctatgacgccaagtggttcacccacttcccagcagacgaattccgacttatcccgggaccaaaggtcaaacacatgatctttgcctaccaagcaactg

SEQ ID NO: 106 - DNA, 5747 bp, Heterodera glycines
acgtcagcatgtcaaagaggacgtgttctttgagagcgccatgaactggggggtcaagggcgatggatgattcatcataaaaccgatcgccttcaactcagcgtctcacgactgtatggaggaaaacgaccattcgacgagttccgttttgtggacggcggatactactcacacatggtgccagaagatgtgatcttcctccaggccgtgccaaccgaagaaccgaaaatcataacgctcgatgacacgccaacaacagaaaaaacggccaccgacaacgcaaagcagccaaaccaaccaaaaacatcggcacccacaatcgaagagtaccgaatggccgaccccaagccgaacaacttcaatgaattcaacctgtttgagccgtgtgacgactctcacacaacctgcgcaaaaacggcaacttacggatcaatcgccagcaaccgatttcaaatggaagagttcaacaactgccgcgcgaccaacttcttccaagccctaatcttcaattggctcacccggaacatgaacctgccagctgatgaaatttgggcagctcacgacaactacacacaactcaacgtcgtaacggaagaaatcgccaaaaagttccaccagcaacaagtcgtcagtaaaagacgacaaatcggacgcgaccagcacttgacagaggtcatcaatgtctggcgtaactcatgcgatcgcttcggtgagctctacaatcaaccggcacacaaacaagtcaagtttcgaccaatcataccagaaaaggagcaaccaagtgactacgaggaatggatcgagcgactcaacaaccgaacggcggaaatcctcacaaaagctcgagcaaaagtgcagcacccgaccttcttgaactacaattgcacaaccattctcatcggagacaacgtggcagaagtgtttaaaccactcttctatgacgccaagtggttcacccatttcccagcagacgaattccgacttatcccgggaccaaaggtcaaacacatgatctttgcctaccaagcaactgccgacaacatggcggctcaaatcgcaccgatgctccaccgatttctgcgatcagacatcgaaatcacactgatcgtagccaaggacgacaatgcgcaatggatcaacaacaagaagtacctgatcgatatcacccgcgaattgaaagcgggcttcttcgttttcaatcgagaaatgggagaagcaagacaaatcgccaaccggatccgacaagccattccggaaccaatggatttggaacaagagctgggaccatcgtcgtcaacaaacacgtcccgacaaggtccatcaacaagccgacaagtgatcagctcgctaatgctgatcagcatgttttgcctactcttcaccggcacggcacaaggactaccaagtcgacaaaagcgaattacgcaagtcaaagcatggcatggcggccatgtttcaaatttcctcaacatcttcacggagcgcgaccgacgggcatcaacaaaatacagtccttacgtccagcgatacatagacaaggttctagcactgaaccgaagtctgagccaatcaacaaatccgccgacatcgacaactccgccatggacaacgacccaacccacaacaaccacaagtcgtccacgcacaacgacaacaaccgcgactacaacgaccacacgcacaacaaattggccaaccagatcaaccacacggccaaccgcacgcacaaccacgacatcgccaatgccatggtcaatggaccaccgaacgacaacagtatcgagggtacggcaacaacaacggccccgtccaggaatcaaattgattcgctggcccaagagcacaatcacaaccgaaaaaggacgcgacgtcttctggtgctcgaatcacggcagcactctctgggaacttaaaggtccggaaaactcgccattctgccgtccaccaccggcacttactgcgcaatggacaccactgaccatcacactgtacaccaagatccaccggccggaaccaatcgcaacggcatggcactgctccatcaaaacgacgacggaaaattattacacaaacatcgtcggcgataagttcgtcgaaatcaacaaagaatttccgttggtctccaaacgactctgccaacgaatggcacatcagcaagaatgcccactcgccaaaacggaaatgcaccacgatgataacaatcgtatttgggcaacaaacgaccaactccaagtggatttccctggaccaatcaccggactcttcaaagggaaacaaaccagctcggcaacaaattgctttgcgcaaccagcaacactgttcgtcaaatggcacagtctccaactcctgtcgccaatccatcgcgcagaccactgcaattacgcctccgagtattgccaactgcaagacaacaactcactcatctggacttcagcatgtccaaacgacaactgcttcatgtgcgacttccaagaagccgaagaaatccacggagaattcaccaagctcaacggtcaaacaacagcattttggatctcggaagaccgacaaaaggcactgaccttcaccgagacacatgcagttcaagcatgcgacgggagacaaatcgtcctatcggagcagaacttcggcattccaaaagagcaatatgacatcatcatgagcaaccacacaagagagagacgcaacgtgcaacccgagcaactcgcttcgcagctttcagctgctcaacttgccacaacaatggcactctcgcagctctatttgaaggaatgccagcgtaatgtgcgtgtcagcaacccaacgcttcagacacggaaactcctcaagcgcgataatctgcaagctcgatggatcagcgaaacaacaatcgaagtgtttccctgcgttccaatctccctctcgaacatcagctaccgaacaacaaaggactgctacaagttcattccggtcacaatacatttgccaaacgcaacaagagatgcattcctcgacccggagatgcgcatcctctcactcatctcaaagatcgcaagttgctcaccatttcgctaccatcaccttcaagtgcaacaaaacccaaccttgtgggttcgaatcgactcacgaaatggaaacgtccaacgactgtcacaaacagtcatccatgagctctacgagacgatcctcaacaaaacggacaacgatttggatctccacccactgatcttccatcagtggcagctcgacaacgacaccgatttcgccagccttccgcacatcgacgaattcgaagattcggaagagttcaaaaacaagctggaacagcaaacaacgcaacgagcgcaagcactcggcgccttacccggcggaatcgaaggatggaccatcaaatggttccaagaacggctacaggaaaccattcaatggtggatacgtctcgcctcagcatactccacattcctccttttccgagacgtcatcctaccatgcttaatcgcctacttcctcaacccaatccgcatcacactcatgactctgattggatttcgaccaaaaaatcagccaacgcctcaaatccaaccacaatacgaggacatgccattgcgggagatgccaagcactccgatccggcggaaacgacgacaattgccagagcaatcgactccgccaatccgactggacacgacgacgggaacggcatcattccgaacacgagcgagagcgcacagcgcaacagaggacacgcccttcggacgcttgcgaccgatgaaactggcggacgactgatgggcccaaaacaaagaaccaagagggaagaagaaagagagaagaaggaagaacggatgagcccctttttcttgccgctcgggagtgtcgaaacacgggtttcgaaaatcaaattatttgatttgtgccaaaatgcacatcgaacaaaaaccaaaaatcaattcaatttaaaaatggtccgatgtgcaattgccgccttatcagcggctgtcactcccccccgcaaattccgttccttatcacccaaaaaattctctccccattttccgtccctttttaatgtgtgcttaacaaacagcacttcatttccccaaatcaacaacaatttgttggccgaacagctccaacccctcggcccccgttcaccgccatatttgtcccattttttggccccctctggccaattcatttccatgcgcacctcccccatttccatgtgctcatttgtcctgtcccaattgccctcgctcacatccccttgttgtactgctccaacttcatgtcctccaattttggcccattttcaccatttcaattgcgattttttgtgtgatcagccaatagggccatttgcattcacattttattttgtggcctttggccggatttttcctcccccatttgtccgcccattgtccactttttcggtttaattacccaagtttgagataaaatttggtgtgaattttcctctgcacttgccccccgtttgacccccggcacattcccgtcccactttctgcttcctctcccgtcaatttcaacgcccgaactcctcgggctttgtcgacaccaccgcggcgacctgcaccgcactcaacgtcaagcgcacacggcgaactccaagcagctcaaaggagctcaactcaatcaatcaatcaatcaacgggtggtgatcggacatctcccgcttttttgtcacggtgaacattttggacaacatatggtaatttgcgtttcgatttccatagcaaacagttttttctcctaattaatttataattttggccaaacatcgcgtttatgcacatcaaattttttttgttataaaagaccaatgggaaaaataaaaaaatcatttaaatgaaaattgttttctcctaataattaaaaaaacagaaatttttggcattcctgatcacatttcatcgtctttggtttatggaaaaggctccaacaaacaaccatgataaattgaaaaaattaaaaatttctatccctaaataagtatataaataaaagacacgtgcaacatttaattcagcgctggaaaagtatacaaatttttgttatctcccgcttttttgtcacggtgaacattttggacaacatatggtaatttgtgtttcgatttccatagcaaacagttttttctcctaattaatttataattttggccaaacatcgcgtttatgcacatcaaatttttactatatatgttatattgacaaggagtttcgtttcaaaaaacaaaatctcccggccgaaggccgggagcgccctgaaagtggtggaagggtcttacaactttttgaggagaatccgggaaaactatagagaaaaattctgcgcggacgactgagtcccgggaagtgatttctcattttttcgtgcatttgggggcccgtaactttttttctaaaacccaaatcaaaaaatgtctgctgtgagggggctaagttgaagtgttttctaaaaaacaaaaaaaattccaagcctctatctgcaataggaaaggctgtaggttcgtggactttttcagtaccaactttgtccagttcagtcccggttgaataactcattagggtttgatctgggcggggagttaccagcagacttattgtagagttttgaaagcccgatttttccaaatttaaaaatttcgaaaattttcaaaaattttcgaattaggcctattaaacggttttcgggtttttgaattttaggattttttaacgatttttccccagagaagacct

SEQ ID NO: 107 - DNA, 1699 bp, Heterodera glycines
ctatccctaaataagtatataaataaaagacacgtgcaacatttaattcagcgatggaaaagtatacaaatttttgttatctcccgcttttttgtcacggtgaacattttggacaacatatggtaatttgtgtttcgatttccatagcaaacagttttttctcctaattaatttataattttggccaaacatcgcgtttatgcacatcaaattttttttattataaaagaccaatgggaaaaataaaaaaatcatttaaatgaaaattgttttctcctaataattaaaaaaacagaaatttttggcattcctgatcacatttcatcgtctttggtttatggaaaaggctccaacaaacaaccatgataaattgaaaaaattaaaaatttctatccctaaataagtatataaataaaagacacgtgcaacatttaattcagcgctggaaaagtatacaaatttttgttatctcccgcttttttgtcacggtgaacattttggacaacatatggtaatttgtgtttcgatttccatagcaaacagttttttctcctaattaatttataattttggccaaacatcgcgtttatgcacatcaaattttttttattataaaagaccaatgggaaaaataaaaaaatcatttaaatgaaaattgttttctcctaataattaaaaaaacagaaatttttggcattcctgatcacatttcatcgtctttggtttatggaaaaggctccaacaaacaaccatgataaattgaaaaaaattaaaaatttctatccctaaataagtatataaataaaagacacgtgcaacatttaattcagcgctggaaaagtatacaaatttttgttatctcccgcttttttgtcacggtgaacattttggacaacatatggtaatttgtgtttcgatttccatagcaaacagttttttctcctaattaatttataattttggccaaacatcgcgtttatgcacatcaaattttttttattataaaagaccaatgggaaaaataaaaaaatcatttaaatgaaaattgttttctcctaataattaaaaaaacagaaatttttggcattcctgatcacatttcatcgtctttggtttatggaaaaggctccaacaaacaaccatgataaattgaaaaaaattaaaaatttctatccctaaataagtatataaataaaagacacgtgcaacatttaattcagcgatggaaaagtatacaaatttttgttatctcccgcttttttgtcacggtgaacattttggacaacatatggtaatttgtgtttcgatttccatagcaaacagttttttctcctaattaatttataattttggccaaacatcgcgtttatgcacatcaaattttttttgttataaaagaccaatgggaaaaataaaaaaatcatttaaatgaaaattgttttctcctaataattaaaaaaacagaaatttttggcattcctgatcacatttcatcgtctttggtttatggaaaaggctccaacaaacaaccatgataaattgaaaaaaattaaaaatttctatccctaaataagtatataaataaaagacacgtgcaacatttaattcagcgctggaaaagtatacaaatttttgttatctcccgcttttttgtcacggtgaacattttggacaacatatggtaatttgtgtttcgatt

SEQ ID NO: 108 - DNA, 10042 bp, Heterodera glycines
aatttgcaggctaatagagcatctgaagggctttcgaatgataccaacaatgttggatttggatgacaatgctcctcccctctagaaaattttcatttggactaagtttgaaacagaatttttcatgtttctttcaccctgttttaggtgtttttttgctgtacatttgctaatttttcaacaaattttcccattacccaaacaatttgaacgataaaatgaatggccaccaaactcatcatacaatgacatcaattgcggtcaggatggacagagtaaggagagggtgggtgaaggtgaaaactttaggaacacaacttttaaattttgtaaatttttcataattttgattcccccccccccccatacaggcggcacagaatcgcattgaccgtcacaatcaggtccgactgcaccattatgtggtgccaacggttagttttatatcattgcatgcggatttggtataatttttacaaaaatacggccattttagatttgtccaaaaacactggcaacttttttttaatataaatttttcaaaattggagagtgttgccctcatccattctaaaaattcaagaaagtgctgaaatttaattaactgtcaatagaagagcaaagaatttcataggtgacaaccaataaaataagcccgtcaattaggttttttacccgctatgggcaatgttaaaaatttcatgaaatgataatttatcaaaaaaaaaatttttttttgttattcaagcgagagaaactgcgggctcccgacaagtggtccgaacagtccgactgcatgcatttgtgcatcaacgtgggcggtgcggtcgcggaagggacgcacgcggagagtgacggccggcgactgactgtgacggtggtgcacgcattcgggggcaaattgagtgtcagaaattacgcattactcgctgaaattgtgccgtcgcaaagcgaggttggttatgcctgtatcagccttagatcgtataggatgccaccagggagggtccaggcacatatccagaatcggaagacgaatccgaaaacctttttttttgctctggtctgaaaattttttctccgatgctatttttcaaaaattctgcaccaaggcgaaaaaaaaacaaaattttacgcccttttacaacaaaaaatgacaaatttcgccattttggaatcacatttccaacaattaatggtccaatgggaattgcgatgcggttattaggcgccgcccggaattttttttcaaatcttaatcaactatgataagaaagccaatttttttttttaatttgcccaaaatttttttttcatttcggtaagcggggggggggggcgtccccaccctttgtctcctggccaggcctgatgcttgtgccagcatctaatgcgtaggctgccaccagggactgtcgaccgttttttcattccactgccacccgaaaacccaaagtggacctttatatttgagaattttctaatttttttcctgttatcacgctctgactttttaattttaacttatttcagcattaaattgtttatttccacagatgctgatcaccgtaaaagaggtgacgttggtgctgaagaagcgaatgcaacagaagacaccgccaagagaatggtatgaccaatgtgccgagttggaggacaaaatgatgggccaaattgaaaaaaaacgggagaagagagagaaagcgaagagttggaaactgcgcgaaatggacgacgaatgaatggatgaaatgattttttggattccatcttttttaatttacttttcaaattctacgcaattatcactgcaaataaaaatatatgggtagtgttgttaaacatatgaccaccccaaaaagggagtgcagttggtaaaatggtttgtaactaataataacatcttgacagggatagtgaatggtatcattataaagcccacaaaaaatgctacaagaaatataaaacatatatacacaatatagtcatattgagattttataatcaatttaaatcaaatttggtagaaaattttgagtgttgttaaacatatgaccatgactgtagatacgcaactaaataactgatcattgatcacttttccgatcactccccccccccccccctccgtccgttcgtcccaatcagccggcaaaactgctctttggcccacacttttccttggctcgtgcgccgccgaccgcgtccatttcgtccgcgcggagccaatagcgcagcgcggacaccacaaacaacgccttgccgaccgcggcaaaaaccgtggcatgtgccatgttttggaggaaccattggccctgttttaaagttggattaaaaaataaaatgcataacaactgataaaaagatgtataggattaaaattttgcaatcggattattttcaaaaatatttaaataaatatataaaaatttagcaaaaatattttcataattttcaataagtaaacccttttttaatatatgcttttgaaatattatttaagtaatggaaaaaacatacaattgaggcaatgaagtatttggagtgttccaatgcacaaaattgatgtggctaaaattgggattggatgggttaagccaatgaatttccaaatgaatttttgtatccgaatttaaaatgcttacaaaaaatattcgttcgtcagataatgagcacgattcaagataaaatacaaaaaagtgatcaaattcggatagtttcttggcttttggtttattttatacaagagcaagcaaaagatttgctgtactgtcactttgaaagaatggatactttttgcctcacctccaatcggctgatcagccacagctcggagtacttgaagccgctcatgaacacaacggacatgcccatcaacagctgaaaatgatcaattttagagatggtttattaatagcgcttttaactttttagatcgttccctccctcggtttacattttatgccaagcgacttaatttttagtcagagatttgctaaccgatcggttgataagtgtatcaatgtcttcaaccaaggtttttggccaagaatcagtgggtcgggaatgatccgtttgtcttttggcaattttttttgaaaacattcttttcaatttgattgggccattattggctttgttttacatagtcaatggattcccacgaggcgtcgtacggcaccacggaatttgcgtaggaatggagcgcagtcggtgccaacaaagtgccgacagcgaccaaataacacagcgcaaaccattcgaacgtttcgtcgggcaatgccacgcgcgggcggtggtgcggatgagtgccatgctcacaacactcgcaaccctttagttataagtgggtaattagcctaattagagcaatgcaattagtagactataagaaattgacaccccccccccccccgccattccctcgccctaattgaaataaaattttgaataataccgtaacccaatggtatatgtcctgtcgaaaatgctttattgatactatattttgatgaatttgctgtgttaggacgctatttttgtcagaaaaagtatgtctaacaaaagcggtataattagcgataaattgtccgatttcaaggactgcccttagaggtcgaccacgcctaaaaaagtccttggggcaagtgtaacaaaacatgtcattcttgaatgcattcccaggatgtaaaagaataaaagccgtaatttttggccagaagttttattttcagaaaagtgggtccatttccaaggacgtccttgacatagataagtctggacttatttaagccaagttagttattggcccatagaattggcacattgttgccgttgggcatgccgagggcagcgaaaaatgccaactgcgcctgcttcagcaacagaatgtgaacagcttggacaagtgcgagaagtggggccaaaaacagagcccacgggtcccactcgatgttgccaaattcgagcctttgaaatcgaattttttgaaaaattttaaagaaaaaacaccatgaaagtgacacggagaacgcaagtggcccctgtaaatgaataaatgcataattaataaagaaaaagaattgaaagagaaaaacaatttctcaaattgatatttcgggttttggatttgttttttcgaccttttttgaagaaataatgtgaaaattaaatttaagagaaaggaaattcgataaaaaaaaactaattttcttctctttttgttatgtattaatttgaatttacaaatttattaattaaatgaaagaaaaaataacaaaaaccatgaaaaattagcattgaaatgaattggttttttcggaggcgcactgaaaaattattataaaaatttttttattttatataaaaaatacaaaaatttataggaaaataatttttaccaaaagggcccaaatggccgcgcggcccctccggcgctgcgtctcctctttgttgccccgggcaatgtttgcgttgttcaaaaagttggcgccaaagcgaatgatcagaaaagtgccgaggaagtcgaaaattcttgaaaatatatacatttcaaaaatcaggcatataaatcccaattaacatttcggtcaatcccgggactcgagaccaaaaaatctcgaaaaagctaatgtagaattgctctgttccgattaattatgctttttaatgccgtgccatcattacctgcacaagtacaatgcccggcccggttgtgcacgtacacgcgggcggacaacgcgctgaccaacagttgtgccgcgacgggtcgccacaacagcgaatagtcgagaatttgaaacgaatccttcagcagaattcattgaacgtaagaggaaagggtgtcgaacgcagaaaaattggaaaaacggtccccgaagttaaattcgcacccgccgaaattaacggcacaattacggcatatggaaaagagtttggcaatcatgtcgatcatttgtctcgaaattttttcttaatttttttctgaatggtcgaaatggaggccgggttcgtgctcagcgcctcaaaacacccctataaacatgttattagaatttacagaaaaaaatttccggaccaatgatcgacatgattgccagatattcagaaattcacgctctgaatttgaatttcctccggttcgctcggtgcaaaggcagtgcaaaaaatgataaaattatgtatggtgctaatggaaaaaatggtatacggtacaaaatagggatgggcagtcagttttggtgatctgaatttttgtgtgacttggatggagaggaaacaaaactacctacggtataccaactacagtatacttaagttttggaacaccgtatcatctgcgcattttccacaaagagtcgccaattatgcaataattattccttgtcaatttgcactcagaaaaaagttatggcaaatgaatccatttctttctccaattattgtacccaaaataaaaggaaactttcgcccatttgtccctttccctaccactggaccaaatggctggtgcataccagggatggcacgaaattcagaattttgaaaatttttggagctcggaatgccttgcctggtgttatacttcagactcaagaaaatgcgagaaaattacatcaacaaattttattttaaaatcatttaatttacgctttatttaaacaatccaaaaaaacattatggcaatggattttctgtcaaattttgccgtgcccttttctttcccttttgttccttcattcgtcgtttgctttcgttctttttgcggctggctcccctccgttttcttctttctccaaaatcggaggatcaatgggcggctaaataaaaatttgttatatgaatttaattgatgaaacatgtttttaaggcaaaaaaaaattttcaaaaaagggggggggggggacaaactacaaaattacctaaaattttgacaaaaaaataagaaaagaaagccaaagtaggcggctctgaactgaccaagggccaatgtaaaatcgggagcagctattccccccccccgggctcagttccccgcatggtttccccgccaagcaaaaaaaaaattttttgcaactttgaaaatttttcaaaaaaaaaacattaaattttacaatttttgaagttacagtaccgaactgacgggctgttgactcgtactttcgctttgctgcggcaagaccggcatagtcatcgtatgctgtgtttggaataaattagtcacttggatagaaatgaaaaatgtaaaaaaaggagaccatggtagaacggtgctccttccaatattcgatacgagcactcgcatcggcaatagctttttgcgaatcggcaataactttttgcgcatcggcaatagctttttgcgcatcggcaataactttttcaagaactcgaatttcttcatcagctttctgcaagagcaattaattgggagtataattgtaattaattaataaaggcattggaaaaaacataaacggatttgaaaaaggacccaagagaaaatgcttaagttaaaaaatagtacccaatgtctaattagctctgtaatgggctttccttgttctcatttccaattatttaatgcagaggaccaactcattaccttaattttattgtgacgaattttattttgatttttggcgagaaaatggtcaaaggacaaagaaattcggatgccataccagcgaaaattgtaatgaaggcaattggccaactccgaaaggagttcagggggaagtttaacttttttgggacagtccatggcttcagggtaacaattatacgaaaatgggaataattttaatattggtttgggtaaatggtggctatagcagcagagatggtgaattggtgggtctctcctccccttccgcgggttggaagagggcaaatcgaacaacggaaaaaatcaatccaatggagagcaaaatgtggacaattttttttctcataaacgattgttaataacgcattcatatggggtcggacggattacccaatttcaatgagaacaaccgaccgcgatgggcgaaggttggtcgtcgtcattctgctccgcttctttggcaacaatctgtaaaaagtaatacactttacaattgagcagccataggatgcattggtgaccaatgaccagtggtcatcaattccaatggaaagaccaaaaatggggacaaattgtttttcacataacgaacgataaacgcattcacatgcgatatgtctgaccatttacgaatggatgtcaggggaggtcaattaatatggggtctcaacttcgagttcaaggacctttttttgcttttgcgacgggagggcccaaaaaaatagtgaccaaaaattattcaattttaatgtaaaacaaccgaccgtgattggcggcgtgtccacacggtcagcgactttcgctgttatttccactctctgctcgtgaagcaatacctgtaaaaaggtcatacgtatattgacaactgagaagcgataggatgcattggtgaccaatgaccagtggtcatcggcaactgacctcggagcgggtcgttcctcagaccccgaaaagaataaaaaaaatttttcaaaaaaaattttccaccataaaattttgaaaaaaattctggacatgaccccggagcaagtcatcccccctcatcgttcccgaaaataaaatttaaactgtaaataattgttagaaaacttttataacaaaagttcaaagaaattttcgaaatttttcagtgaatttttgaaaatttttgtagaaaacagtaattcaccataaaatcttataagtgaaaaactttgatttttttgaaaaaataattgagttttttttaagaatcagtggtggttggtcatgaccccggggcatttcattccccccgaaaacgaaaactcaaaagttttaaacttgaatttgtcaaaaaaaaaaaaaaattttttttttaattttttcttcaagtttcattatatataacactctaatttgtaaattaatttttgttttaaaattttctgggggaaacgacagaggtaatgaagtgtgaaaagcaccccactaaccccccaccccccgctctgaggtcgctgtttcattcttcggtaatactgtggctttgccccccccccgctcccatttaaaaaaaaaaaattttttttcaagagtcatgaaaacatatttcaagggttttcggggtcactgatcgtgaatccggcatccatccattcgatcaattccggaccccgggtcaattcgaacaaaaaaaagtcgaaattcaaatttgtcaattttcatgtttagtctaaaaatagtttaattgaagcattaatggactttaagttcgttccgtgtacaaatttgaaccaaaatttgaaatgcgaaaatttttttaaacttcttatttgaattcgggtccggggttccaattgttagaaattgatgccatgccggattcgtgaacagcaaccccgaaaatcgctgggacatgttttcccgactcttgaaaaaaaaaattttttttcaaaaattgctggagcgcctttcttcgtgtcttgtaaaaaaaaaaaattctttttgagttgggcttccccacccatttttgtttatgatttaaaaagaactcacttcatattggtacggcaaaaaattctctggcaaatcgaattctttctccgtcttctttgtgccaaatgcgtgtgccaccgtcaacgtcagtttttgggcctcaaccttcgcttctgttccttccgcgattggatcaaatacgaaaagattgatgtggacggttccctcgtggtgtgtgaattcgtcattggcgtgaacagcgcgaggctaaaacaacggggggaaattactgtgtttttttctaagcgctgataaactaaccacgggtggtggcgcgccggagctgttttggcgaggctcataaaaagtcttgaagtcgtcaatgctctgttgcgcattctgagaaagggaatacgaatgatttaaattttcgtcaaatttcaacgcggaaaaccaccgaaaggggaggggggggggtagatcaaaagaccaaaaggtaatcttcgggtttttcggaaaattagggaggggaggcaaactttactattccaggtcaacgtgttcccctgattttgtctgccgaataatcataaatcggaaaagatcgcttcttacatttttggaccggtaaaacgaattttttgccacagtttccctttccagtcacaccaatccccgttcgtggtcacaaaattttttggtgattttgttttaaaaatgagcaaaaagacccctctgtaattactaattaggctttatgatcctccgcccactcacttttgtaagccggacagtgagaaatacaggattcatttttttgatcagcgtaattgaatcaagaaatctgagaaataaaatttttaaaaatgtgttaattatacatatcgtttatttttgttataaatgtacatatgccttaaaagccccgacaatggtctctttatagatatgatgcaacaataacagctaaatttctgataattgggtacttattttttgggttttgacccttaaaaattgttaccattcaaaaattgtgacctaaacgtgtgaattgggtcttattcggacgaataacctatgtggaacaaaaatattttcccattaaaaaaaactaggtacagacaaagtacacacctccgatagaccgaggtaatactaaaattattctaaagatgagaaacagaaatgacgaactaactttttttcagtaaattttttgaatacaaaacgccacctttttgggcgttaatttaaattttaccaggcaatgtaagacaatgtaagagacgggccttaacattttctgcaactgttttcatgcggccgttttcgtatgagcgtttacaccaaaaaaacaaaacataatactgtaattttttaaaatacaaccccttccccttaaattagagcgctgaaaaagcccctcttttgaggtggttgaaaaatatagtccccccccccccggaacccgtcagt

SEQ ID NO: 109 - DNA, 2965 bp, Heterodera glycines
aatttgctgaataaattttaatttatttttgaattcaaattttaattaagaaatctaagatcactgattaatatttaatataccttgttataaaaacatttgtttctttctataatttaaattatagaaattataattattataaagctgattgatatatttattgtcgatgataaagatttttagtttcaaaatgttactttaaatggtctaattgagaaagaaatacaattgttttttctcaattcttcataaaatctattaatttttgctttaaataaaaattacattaaatgaaaccgaaagatgcagaagaactttattataaaagacgcgtgtacgacgtgaaaataagaagaatcaagaattcaagtaaaatgaaaaaactggaattatataatctgtaaataaattggtattttgtcaaattaaaagaaattgcaattaattataaagatttgaaatgtagctagctgccttgttcaacaaaaaggtatcttatcggacatggaatttgaagcaatcgactaaattagttagcaattaaaataagataacaaaatatttaatgaatatatcatattattagaagtattcattgtagaaaacaatttggatcaaaaagcgaaaataaatgttttcaaatttcaatattataaatgcttctataatatattgagatataaaataaaattacttttaaaaaataaattaaaccaaaaataaggaccttatgaagaatcgggggatatttgaaggtgccaagatattgaaaataatttaataaaaggtatagagaaaaatatcattttaaaaacaatatatttttattaaataaaagaataatattaacaacccccccccctgccctcgcccttgggtatgctcctcccctctagaaaatttttccaaaatgaattcaaattttgtatgctaatttttgaaaattttcattggacggctgattcaagcgagagaacctgcgggctcccgacgaatggtccgaacagttggactgcgtgcatttgtgcatcaacgtgggcggagcggttgcggaagggacgcacgcggagagtgacggccggcgactgactgtgacggtggtgcacgcatttggtgccaaatggagtgtcagaaattacgaattggtcgcagaaattgtgccgtcgcaaagcgtggttggttatgcctgtgccagctttatatcgtgtccaagcccgtccgtattcagaaaaaacaaattaaatagaaaattcgaagattttttgctctttacattaaaaaatttaaatttccaccatttgtggatcactcttcaaaaaattaatgctgcaaaatggcgtttcctttagtgccgttaggcgccccctaaaaaatttttggaaattttaaaaaatatgacaagaaaatatgccaaattttcaaaaaaaaattgcctattttccttaaaaaaattttttttttcgttgaagggtggaggttaccgcaaaacatcgccggccaaaacgtatcgccaaaatttttttaaaaatttaaagaaaattttgaaattttttcgttccccccccataccaaaattttaaaattttatgggtacatttttcattttacagacaattttttgtaacaaatagcactcaaattttcaaaaattttcccggcggcgcctattggcaccgccggacctccattttacatctgggactgtccctgggtcccacccgaaaaaccaaaggtgacttttgaattggagtcatttttcatgggatcaggcccgtatccagaaaaaatttcggggagggcacccgaagaatttttttttttgtttgttcctcttcgggtcaaaaaatttttcctccggtgtttaatttgttttctagttttttcctttttattcattccttagctttttttccagcatcaaattgtttattttacaatgcttttccacagatgctgatcaccgtagaaaaggtgacgttgatgttgaagaagcgagtgcaactgagttggaccgaatttgtgaagacaccgccaagagaagaattggcttggtatgaccaatgtgccgagttggaggacaaaatgatgggccaaattgagaaaaagcgggagaagagagagaaagcgaagagttggaaactgcgcgaaatggacgaccaatgaatggatgaaatgattttttggattccatcttttttttaatttcaaatttttacgcaattatcactgcaaatacctaaactgttttctcataaatacattaaaaagtcttacaacaaattaaatttttataagccttcatgaattttgaaaaatggtgggccgacggtgctataggcgccgcctgaaaaccttggaaattcgagtgcaatttgttaagaaaattgactataaaattcaaaaatctacccataaaattttgtaattttagtttgggggattaaaaaaactccattattagctgagaatttttaaaaaattttcatttcggtggggggagctagctagataggcaaataaataagttaccatccgtacggaaaatagaatattatattaaccgaatattcactcaattaaccatgcttattttgctagactcattacaattcttatggatcaatgtcatataaatgcataatttgtatcattacaaggctaacgtcagtctgttgaagatttaatattttatataaatttaaaaaaagatgggtcttcttaatattttcgagatatttttaaaaaacaattaaaaaattaccgccggcccggcaaataacaatggcattaaatacaataaaaacaattgttgtgtataacaatgagatgggaattagggaatgtgatttgttccccgaaagtgagaaaaaagcttatattaaccatcacataatttaattaaaaaaacgaatttttattatttcaaagagtgatcagaaatgttttattgatcattgacact

SEQ ID NO: 110 - DNA, 1739 bp, Heterodera glycines
cccccctccgtccgtccgtcccaatcagccggcaaaactgttctttggcccacacttttccttggcccgtgcactgccgaccgcgtccatttcgtcggcgcggagccaatagcgcagcgcggacaccacaaacaacgccttgccgaccgcggcaaaaaccgtggcatgggccatgttttggaggaaccattggccctgttttaaaagttgaattaaaaaataaaaatgcataacaattgataaaaagctgtataggattaaaattttgcaatcggattattttcaaaatatttaattaaaaatttagcaaaaattgtctcagaaaataattttcaacaaaataaacccttttttattgaattttaatattatttattttttattggttttgaaatattttttatgtatggatataaaaacatacaattgaggcaatgaagtatttggagtgttccaatgcacaaaattgatgtggctaaaattggaatgtgatggttagggatgcaatttataggcactaaaaaccgccaaaataggtaggctttaggctctaaaaaatccccaaaataggcactaaaaaatggaaaataggcactaaaaaaccccatttttaggggtgcaaaatgtattcaaaaaagaaaaaaattaggccaaatcagtattgagataaataatttttaaagcacaaattcttgtcaagaaaataaataaataaattttggagatgaatttttgaaaagtttttcatttcttaggggtatatttttgaaaatttcgggtcgattcataggggtgtttttttgaaaaatgtttgggtcgtttcttaagggtgtatttttcgtttttattgcatttttgttaacaaattttgggcaaaacgccaaaataggcaaaaataggctctttcaaaatttattaggctttttaggcgctaaaaataaaagcctagaaaataggcactaataactcgaaaagtagcttaacaacacccgaaaaaaacatgtttttcgtgcgtttcaggccatggggagctcaggaaaaaaataggcttttgcctaaaaattgcatccctagtgatggtttattatacattacaagggatttttgtatcggaatttaagattttagaaaaaaaattttcggttcgtcagataattagcacgattcaagataaaatatcaaaaaagtgatcaaatttggatagtttcttggattttggtttattttatacaagagcaagcaaaagatttgctgtactgtcactttgaaagaatggatactttttgcctcacctccaatcggctgatcagccacagctcggagtacttgaagccgctcatgaacacaacggacatgcccatcaacagctgaaaatgatcaattttagagatggtttattaatagcgcttttaactttttagatcgctccctctctcggtttacattttatgccaagcgacttaatttttagtcagagatttgctaaccgatcggttgataagtgtatcaatgtcttcaaccaaggtttttggccaagaatcagtgggtcgggagtgatccgtttgtcttttggcaattttttttgaaaacattcttttcaatttgattgggccattattggctttgttttacatagtcaatggattcccacgaggcgtcgtacggcaccacggaaattgcgtaggaatggagcgcagtcggtgccaaacaagtgccgacagcgaccaatagcacagcgc

SEQ ID NO: 111 - DNA, 3057 bp, Heterodera glycines
  unsure (1)..(3057): unsure at all n locations
attggcccattggtataagcgtatcaacatttttcaaaaagcgcataacccactctgattttccacttcccgtactgccagatatggtcaatgtaaatgggtgtcgaaattttgtgtcatccacattgaatatttgaaaattttgctccattaaaaaaagttgtttttcttaaatctaaacatttatatatattctggttcaatttttattgtctaaatggaccaaatcatggccactgactggattcataatgcttatcctgaacaagcattaggaggaggaggaggagatgaacccgtcaatggcaatgtaaactggcttcaaattatggacgacgacgacgatcaaaatgagaaaagagagatgcaaagcgaggtggacgaggaaaacaaaatgaaaaaaggtttttgctaataaaaacgatttttttaacattttttattcagcggaaattgcaaaagtcataccaagaaaatgtagctgcggtgggaatgggcaatctcaacaacaacaacaaccgcaacaacaacgagaaaagaccgaaatgccattaattgagcatctgtgtgaacggtacaagtgttcaaccaaggaactggaagtgttgttccagaacctgaaatcgcggcgccaaatcttacaacacatgcgcttcaatgttcgtctccgtacaaactacttacatccggcaaatcgaaactttgtggtgcagtgtaacgatttgtcatccctttcggcaagtgaagcatttgcaatgcgtggatatttaggcattacggttggtcatataaattggattttgtatattaatattatattttattaggtccaaacctacttctatgttaaacatggagttcgtcttcgtcatccaaatcttccatgtgcgattcgttttggaggacgcgaccatcatgatttattcccgatggaatgcttgaacgtagttaaacagatctgagaaaaaatatgcaatcaaccgaatctataaaaacatattttgaaattgtatgcccattttttaagaaaaataataaattgatgcttgacattcaaaattgcacagttactttcaaagtacttaaacggccgttgaacaaaaccgagtttttggcaatcgcgcacaacggcgtgaatgttgaatggaatccgcgccgttttcatgccataattatgcgacttcgttacaccccgagaacagtggctgctctaatttttcaatctggacgtgtggttttaactggcgtgcaacacccggaccgtgccaagaaagaagcaaagcgcgttttgcgccgcctccgtgcttcacttcgatgcgccaacattgaaactacccttttgctgctgattttacgtgtggttaacattgttggctcacatacatttactcatcgaatacatattacgcatctcgtgccaatcatgcattcttcgactagcttctgctctgttcattatgacccaacaatatttccagctcttcggtgtaaaataaaattaaatgatgatgatgatgatgtttatgcaacatgtattatgtattattctggcaaaacaattctgacgggggtacgctcaataacatatatagacagtgcattttccattttgtcatcatttattagcggaaacaataaaaaattaccatgacctataaaactttttctcccattattactattatggttatgcgctttttgcttatctcactccccgcccatcgaagcacgtcattagcaagtaagcgattttttttttgattgattaaagtatgaatttttaagcatccgagaagtcatggaacagtattgcggaatcggttgatcgcaaagccagagataacaattttcaatggcctagcacacatgaaaaaggcacatgggcagcagttgcagcaactggagaagaatcaagggcgagagcgcagacaggagcgaatgtaagggatggtaatgaaatggtacaagcagaagcgataagcgaacgagaaggcggggttgcacttgctgctgcgacgaaaaatgcattatcggaacgcgggagtgaggttgaacaacaacatcagcaggtcgtagtgatggcccgtggaggagcaataagcaatggggatggtgcccgtgcaaaagcagaggccactggtggcgctaaaagtgttgttgaaacgaggattacggaacatcacggtgaagagaggctagctgcagctacagccgtcatacatagagaggaaaggagagaagaaagaagaagaaaaatacgcgtaagaaacagagaccgacaacaaggaggagaagagaggcagcgcggagaaggacataggcagtctcacccaaacgaaagacacaacgacaactttcacagttcgctacaattgaatttaccgcccaacagaatgaaccgaagggaacaggatgaacacatgcatcattcacgagatggtttgatgggacagtcgaacaatcaacaaggagaagagaggcagcaaggaggaggagggcataggcagtatcgcccaaccgaaagtcccaacgacaactttcacagttcgctgcaattgaatttgccgcctagcagattggaaggaagggaacaggaggaacgcatacatcattctcgagatggtttgatgggacagtcgaacaatcagcaaatgagaaaacgaattcaacgagaatgtttttgcacgtgctaattttttttgatgtttggtattgtatgacttatattaattttttaaataaaataacaaaaaaaaaaagaatattaatttttttcaccaatgagagcaaccaggcaaattggaaagacggtcttggtctanatcatcattatcatcatcatcatcatcattagtttcttcttcgtcatcttgttctgttctgtgtcgtggttgctggtgcgcatttcggaaaccaaaggcaggtcctcatacccttctcagtatctggcagaaccgccgccttatcctttnngctgtacacgcgccatcctttgcctgtaccgctgccccatccttgcctgtaccgncgccccatactttgcctgtaccgttgccc

SEQ ID NO: 112 - DNA, 1595 bp, Heterodera glycines
aaaaaggtaaaaagaaatggaacaaaatttgggctttttcccttttttttttttttgttaggagaaaaaaaacccttttaaaagaaattaaaccaaaaaccgggtggggttttttcggggccgaagggttagggcccggaatttaaaaaaattttggggtcaaaaggcctgaaggaaaggttaaattcctaagattattgaaatatattaaaacccatgaaaccaaagtgaaaatgcgcaacaaaaagggcaataaatgaatgaagttataatgcgcaataaaaataactttataatggtcacaatttgttatgtacaaaggctaaaaaaaaatcataagaatacataattatggatttataaagccaataaaaatgaaataatgaaagtaaaccaaggcaacataattattatgtaattagcgcgcaatacgttgctagaaatgaaataaaagcacgaaattattgaataaatggttgtaaaaaaaaaaaaaagatcgtaaattaatgcataatccaaaaaatgccaaaaaatgaattataataatattcttttgtaaatgccacttaaaaaaggaactggtgaactatgtcacaatttttttaatttattaatagtcaatttaaatgggggttgaatgcgaaaaagtgaaaaataagctgaaatttctcagttactcaaaaaaacattgtaataaatgtattctaaaagatgacgattaataaaataataataaaataaattttaattataaaatcgatatttttttcaattattttataagtgtttataagaacttttgatagcaaatgatcataaaaatgttttttggctctttttctccataaatttttatttattctacgataatgatgatttcattgtatagcaaatgatcataaaaacgattttttggttcttctgcgccataaaatggttttttctaccaaattcggcgaattctataataatgatattttattgtttaccaaatggtcataaaaaccttttttttttttgccttattcgccataaacgattattttttctaccgaattcggcgaattctatgagaatgatgatttcattgtatagcaaatgatcataaaaacgattttttggttcttctgcgccataaaatggtttttcctaccaaattcggcgaattctataataatgatattttattgtttaccaaatggtcataaaaacctttttttttttttgccttattcgccataaacgattattttttctaccgaattcggcgaattctatgagaatgatgatttcattgtatagcaaatgatcataaaaacgattttttggttcttctgcgccataaaatgttttttttttctaccaaattcggcgaatgataatgatttttttttcaatgccaaaaatagaaatcgtattattttttattgccgtattaaatgatataaaaggggggccattcttgcaagattttcattaattcattcattattttctttcttttattaattatttattctatttttaatatatttaaatatctttcaaggcctagagagttttccataaaaaaatgtccctttcccgttccaaat

SEQ ID NO: 113 - DNA, 12810 bp, Heterodera glycines
aaaatattaaagaagttattagttatgctggggccggggacctttttaattactggaaccattgctgatttgcattaccaggtttatgatgtgcgtttgtttggttgtttgtatatgtgtttttttaattaatttgttaccaataagtcgtgtccgctaaaagtccgcggaatcggaatcccatgtcgccgtaaactccccgtaaatttattgtgcgaatcctgtggccaaagggtggaaaagccgaataaaacgatttacttaaaaatcgttttacaagatggggaagatagcacatgtacacagcgagcaacgctgttttcagcggtgtggggatttttttttcaaaaattttcataatccataggttgccgaggcctttctcggattaaaagcaattgatgttaacgagatgaatgaacaaaaattgtatcagcattttgaagcaaaattggggaccactatcaatgccaaagtgacaatcaaggttagttttattattttatatttttctttctatacttttttttacatttttaggaagatagccaaaacttcactggatttgattgggtcataacgcgcatttacaaggcgggcaaaaaaagttcaggggagtctgagaaaaagaatgaggataccaatggagctgaacgcccttcgaccgcaaagaatgctaaatttgattaattcatccaattattgggctgtattgccatacaaaaaaaaatatttacattcattattacgatgaaaaaaacatgattatgttccatatatgtcctatgctattttttttatatttttaaaattaaaatttctagatgttgagacacaagttacaaatggaagacgatgttggggctattctgttttttttgaaggagttgacccaatatagtgcccgcataatagttgtatgccgcaatagtcaaaaagtcacctttttagcattatgtcccccaatggaatgccaaaagcaaggggaattatttcaatcaattaaacaaaatttaattgaaagtattgggccgtattcatttgtggggtaagtcttttcgtattatattcaaattattattattaatattattattaattatcttttttaattttagtttggacgagccgcctgcaattaaaaaatgaatgaagtaatctattgattgtttccatgttgtacccattctaatcaacgtatatgtggtaattgaatattttgtagttcactgaccatatcatttgcttcactctgggtaatatgccctaaacgtttcataaaatttacaattgaaatccagcagagcagtaggatgggaaatattataagataaaggccaaaaaataaaattattttttcaaaattggttattgccagaggcatttcatcgttatatccattcaaaatctggattgttggcggtgtgttattacttatgtccattttttgccaatttacaaaacttttgggaatatttatgtattttcaaccaagttttgagtccgaaactatatgcctgttgtagtcaatcattatcatttgatcaaactcgccaagcactatcatttcaacccctccggccggaattgcagagttgaaggttgcacggattgttgttgttccacttctaagcaattcatacccaacgctgtcatccagagttgatgtaagtggaatgacaaacaatgtccagccatttttgaattgttgtcgggtgatgtcacatgagcgatcagagttagccatgcctagcgcctcgtagaagtcaacatacgctctgacaaatgcatcttttttgaaagccaacttatacggtaccattgggtatatgaaaccgcccgcgtgcaccgcaatatctcttatatcaaaatgtttgaaattgaaagggtccaattttgagtttccgttaaatgccccattctccaccattccaattgttaatcgtcgaggaattgttgcactgaacgcgttgtattctacctcataccgcccggcactaataaaagtggattttacttccgttttacgcacagcataggttgctggttgtttttcaagcatcttgtaaatgtttaggttcaacgatggttgaacttccaccattttggcataaatcttaacatcgtgaacacgcagtctgtattcttgagtgtcatttgctttaagcgtttgaatgagaaaattatcttttgccttataaattgaaaacaataggtcaagattgttgagcagatacaattcctgatttccaagatcaaaatccaaacgcgagagaaattgagcctttttcccaccctcaaactgtttacaacgctctttgaaacctttgtccttatcactatcatgtttctcgctatggtaaaagccggtggaggttaaaaaactatttttcacatttttcgaaaaagacaacgcatttgttagatatgtcctgtagggatacaagttaccgctgtcatatatttctgtattacctactgaaactttaagctgttgaataaaggtttgaccaacgccctgtattacacccacattctcttcatcagcattgctaatatctacccaattgtcatctttatttttttcaatcgacagctcaaggtgaaggtaaatacggcagaggtcacaccacaagttatcgctgtatagcctgaacaaatatggtgattcttgggtaatggtaacgagtggaagaacttcacggaaaaatgaacgaacaaccgacacgtttgtcggaggagtcgaaaaaatattcagagcactgttgactgctaatgcgctttgttcacttattttttgcgagcaactcatttatgcgataatgttataatggtggttaataagtaccaaaaatgtctttttgcgttcgtttcttttttttgctcgatttgttcttttgttttccaccaagtgtggtggggagaaattgtggaggtccaatgtttgattttagtttatttataccttttttgggcgtttccccacctaattttatcgcaccaaatttattgctgttagagttttggtctgcttccttcgttttgtaacgtttaaaatcaaaaccctttcccttttgggtgttaatattagtggccgccttttccaataaatttttcaatccaacctttccctcacttatcaatgattctttgaggtccttgccctctaaaacatttgataaaacacgattgcccgactctagtccttgacgaccaattgttgaaccaatttccctcccaattggaaccaaataacgcattagactgcggaacaccgctccaattccattcccacgttggtatggttggccacgaaaaatattataacttcctactcctcctccccattgattaagagccgacgacaattctagtgatgacgcggaattgttaagtggaaaggatgaccattcaacctttaaagggtcaaaatcaatatgcattatcattattattctaaatattgcagtaactaaattctttgttttttagtttatttatattctaaaaaaattctctctcgggtaaatgtgttgacaattgtgtcagggggttgttttgattgaactaaatattgcaagatttcttcaaatgagtagtgaaggcatctatggtgtaggaaaaatatggcatgtttaccacaagagcgagcgtaaggtgattgtaatggggcacggctatagcgaatagatgagaattttgacagaaaagttctaatatgttcgctgctcgggggccaaacaccactggaatcataatagtctacagttccgaccgattcacaatagaatgctacccagtgtgacccaattaaatcactgggatcaatgttggcaacaaaacagcgggggaacaaacccacacttggattgaaaactattttatcagccggaaaacaaccgagatatgcatattttgtgaccggatttcttgacagaattttattcagatcaatactgttcattattgttttttttaccaggatttttcaaaaatatgaagactttcgaaagtgtagtgttaatgtacacgttccgtattgaaatggcattagtgctccgcttgacgttcttatttctacgaaaatttctgaaacttctttgagcaaaacacgatgatattgaactgagtaaaattgttcctcaatcacctcatcggggttaccacggattattgtaatgcgcagtatgggggcgatgacatttccaatcatcattggctcaatcaaatcgggtatgtagacatgaagtgtggacactcccccactcatatccggcatgaattttgctggatttttatcttttttgaactgagtttggggcgcaaaaccaaggatatatgctaattgttctgaaagtttaacccgtttaatgaattttgtgttgattgccaaagtaaaacgattatgacggacatcaaaaatgaattgcactacactactcactttcttgtaagcctgtatccatgcttccattccaaggtccttaatagatttgttaagcgactgctcatctttgctcagtttgttcagctccacctccaaatgtttggcaattaggttttggaaaagtagaagatcatctgaatctctcattttcaaaaaaaagttatccaattttctttgatattcttcttcgctatcactctcttctcgcaaaggcacattgctggttgctgctcgcttctcgcgatcaagcaaagcaccggcaaccatttcagggtttatagtaccgtcctcattactaataagagcatcgtcaatagtgtcaatagcaatcagaagtgcggacaagagtggaagagcttcattctggtcaattatttttctcttcggtctcctctttttatcgtcacttttcatttttacatattctttctgtgccagtttacgtgctgcgttcatcgcttctttatagctttgctgagcgtcgtgaacctggtttgacagatgctcactgctaatatccaggagactgtacaaacttttgctcaactcataagggcgtataatgttggaagaagggaccggaatgcgaacaatattttcagtttgccattccagttctatgaattgttcctcagtggtgcccaaggatggccatgagtggggatatatgatggttgctagccccacatcccattccgcattaaattgtaattttcgcggcagacgcacacggaaggagttggttcgatttccatcaacgttagtgttggaagggacaacaacataaaaggaatttgatgaaatgggtggcattccttccgtttttctaattaaaattttttccgtatatttatatatttctgtgtgtaatggaactggttggaatccaactattatgctgtttggtgtaccctttccattttacaagcacatattccaccccatcctttttcttttggcccagcactttttcaatatcgtacaatttttcggcatcgctagcgctataactgtcattacgcactcgacataaatcgttggcataaaagcgacctttaatcagttcaccatccatatcacgaatgcgataggtaatcggagaacgcccctcgtctacagtgtctatcgtgaaaatttcactcgtaaaacgaccaacatatcccttctggaacacgtgtttatgtttttcaatacgaacccgatcaccaaccttgaagcgaggcgggcgctttggcctaagcaaatgggccttatcgcttaattttttcctcaaggcactggcattctcaaatgttacatccaccggacgcatttggattgatgaatggtatgagtgattaattccgttcacaatgtcctggatggcatcaacccagcgttgggtatggcgggcagtaaaatagcgaaaaagacgttccttaattgttctgttggctcgttcggccatccctgcatgaaactgaggcgacgtgtacatacaaaaatgtttgatattctttgcttcaaaataggattgaacgcgtttagctgtgaattctaagccctgatcggttaccagtttccatggtatgtacttggagcgggcaaacaaacgctcaaatgcatgaatcatttcctcactttttttgtttttcacaggctcgacaaacaattgtctgctcaacgtatcgacgcagaccaacaaataacgaaagccccgattttgtggtgctaaacggtctaaaactgataggtcagcttgccattcagtatgaagaccggaagctagcgtaggtaaacgtgtgaatcgtcggatagcctggcgatgtaaagtgtaactgggctgccctgccaaatattcttccacatctctccgtttaatagtactgtttcgttttcgcgcttcattcaataatggaagcgtgcttgtatagctgactggagaattgacatctttataaagatagtcgaaaattgcacgcttttttttatctaataccatagtgacggtttaaaacttactaaatttctccccttttcacactttttattcactttgatgtgatgaagcgcctggcttccagcaccgcttccaaactgatacggtctattggaaattaatttttttcgcaaataagcatcctgataggctctgtccacgaattcctttaggccaactggaaaatttttaaactgcgttctgctgtctctattaagcaaatatgaaacaatctcttcaatgttactcgttttgtatgtcgcatgtccacttgcggaagtctttcgcacaatcctaccttctgaattcacacctaattctaccccattatttttaatataatccaaaatatactgttgttttttcttttgtttggccgttttttgactgcctttttgtttttgttcatcagctgcgatagcaccagcccttaatccataaggaggcgatgaggttgaaggttgttgttgttggacatcgcctgatgtgttttcttctaatgcctcctcccattcagtttcgtcacttaaatcatcctcttcttcttctacaccaagtttttttgtttttttgccttttttttttgttccccgttttaagtttttatttttatttttcatcctaaactgtttttgtgggtggagtacgggttgtgttggcgactttgggcgagaaggaggtgattgaggtggtgcaggaacagtaggaggaatagcgctgataatttcgtttaaattctgtaaacgtacatccaatgggcgatcctcctgttctcgaaccattttgtttagtcgtttaaattcctggtgataacgtgatgatcgttcattctcatccatagttctgttctgctctatttgacgcaaacgctggcgaacaagtccaattgcgctgccatcttctgaagctattgtcgagggtttcatcatgctattgaacatatcctctgggatgaggaacatccgcattgtgtggcgcatttttaaaaaattcttaaacatatagccgtttatttatttatttattattttcattttttccactagaattggaaccagaatactggccaatagtcctgcaatggcaggaactccagacccaacctgtggcggcgaggcgcttaacaatatttttctggcgctttttgcacattttgtacgtgctaatcctctcaaccaatgtttgattgtataaagtttacgcaaatgtgactttcgccttactggcagttttcccctcaatatgttgaggcatatttcaacaaaacataacagttgcgcattcgttgctccctgcaacatgcgacgttgagtctgaagagcacgtgcctttgaattaaaatgttttaaaaaatcaatatttttgtgtattaatggtccaattggtataccaatttttttgatatttaagctgctgctgttgccgttttttttcattttggcaaataaattattgttacctcccctttatctgttaaatatatattgctttttaatcgtaataaatctgaagtttcgggatgcatatcaacaacaaggtagccaaattgcttttctgtcgcatccctgtatgcctccatcaaatgccctacacgcccagggaacaattgggtggccagggtgcgtacttgtagcgcccccgcaggatttcgcattaacaccatgtagtgtgagttgttcctggcgattcgcaattccttgctaaacaaatgctgagtcactaacacaacactgaccccccagttgtgcgaaccgcgtgtgaaaattgtgtccaaaaaattttgtccaatcccaaccatcaggtcatccagtaccatcaataactttcctttagcatcgcgtgacttttgttttaccatttcttcgtcgggagcccctgaatgggtgctcacttgtaccccgccgatcgatcccattttttgaagagaagcaatgttttggttaaactctccgtagcaatagaaaactttatttattggcccatttgtaataagcgtatcaacatttttcaaaaagcgcataacccactctgattttccacttcccgtactgccagatattgtcaatgtaaatgggtgtcgaaattttgtgtcatccacattgaatatttgaaaattttgctccattaaaaaaagttgtttttcttaaatctaaacatttatatatattctggttcaatttttattgtctaaatggaccaaatcatggccactgactggattcataatgcttatcctgaacaagcattaggaggaggaggaggaggagatgaacccgtcaatggcaatgtaaactggcttcaaattatggacgacgacgacgatcaaaatgagaaaaagagagatgaaagcgaggtggacgaggaaaacaaaatgaaaaaaggtttttgctaataaaaacgatttttttaacattttttattcagcggaaattgcaaaagtcataccaagaaaatgtagctgcggtgggaatgggcaatctcaacaacaacaacaaccgcaacaacaacgagaaaagaccgaaatgccattaattgagcatctgtgtgaacggtacaagtgttcaaccaaggaactggaagtgttgttccagaacctgaaatcgcggcgccaaatcttacaacacatgcgcttcaatgttcgtctccgtacaaactacttacacccggcaaatcgaaactttgtggtgcagtgtaacgatttgtcatccctttcggcaagtgaagcatttgcaatgcgtggatatttaggcattacggttggtcatataaattggatttggtatcctcatattatcatactaaatacggtactgaagccattataatagttttcccaaaattattttacattaatttacctaatgttttgtgctcctcttgtgtgaggaaagatttggaaaattataaatattttgaaaaaaagattattgcaaaattcttttaataaaataataaaatatttttaagtacatttggtgagttttatatttttcttttatgtgaatgattttttatgacattttgaaagaaaaattttttaactaaaatacgattcataaaaatttttaaagaaagaattggtaaatttacaaattaattgggtttatttttgtcctaattcattaccaaatccgatccgttttttaaacatccatttttatatgcactttttaatcgttttttaaaatcgtccaaacaattaatttgttttatcatattgatttgtttggcttttgttatttttcttttttattgtacatgcaattaattaaattttttaaagaatattaataacaatgttaagagtttaattatttttgatgaatttaccgtatttattatgtttttaactttattaaattgtttctcattctttgggttgtatgttgcatttttaaatttattttttttattttttatttcatgtgaatgcgacactgtcgattatttccattgattgccgcactttttattaattaattaatatttctaagttaattaattttattagaaatgttttaatgccttttaaatcgttcaactatcatatttaatagtgttaaattattttataatttaggtacagttatttgttttttaattttaatcgcggctcactccattaaatatatgttattaatttttaagtttcattaatgacttactgaaaaaattccaaaagaaatctcaattaaactttttgcagatgtcacaaaatttatcattgctattcaaatgaatcccaacgtaaagttttagaaacatctctaatttcagtttttgattgggcctaaacttttcagtaaaaaatcttccgtcttatatttaggtaaaaataacaaaaaaataccgtacacaattaaaaatgcaaattttccggaataacaaactaaaattcaacggacatgtttcaattattctccaaaaaatatttctgtattttttgttcttatacagttacggctatatgtttatgcagtaaaatatttttcaaagaaaaatgtcgataacttttttaaacacaaacaaaattaagtttctttatcaatttttgtagcattttttctcctctttctaatgatatcattcattagaaaaattaactgaactttttaaaatattttttatttgtcaattttcctcaattttgcgtggtcatatgtttatgcagtagtaacctttgtctttaacatttttcaatattttgtgggccaaaattttgtaaaaatttctcctatgctaacttttgatgctgaacaaaaaaagtcttttacagcaacttgatcagatcacttcttcatgttgatctggacacccaaacaaaatacagtgaaaatcggggaaaagaaaagttgggaacagaaccaagaaacaaccaactggaccacgcaaaaaatttcgctaagtttcaaaaatatttttaaaaatatcgaatatgtcgcaaattttaaaaaatatttatttttattttgctcttaatgaaaatctgttaagaaatcgtgccaagggcatctatctgcccgctagcccaattcattcttggcacataccaggctgttgtgaatcgaaaaataaaatgcgaaatacgaaaattacgaaactaaaaaataaatacgaatacgaaacgccttaaaaacatgaaattctggattgagttttaaagatttatagggattttggcttcggaggtagagcccggaaatttcaaatttgcggatcccgctgcgggactggaactcaaaattttttgcgggacgggatcccgcgggattaatcccgcaaatcccgcaatcccgcaaatcccgcatttaaaatttgcaggatcccgtgcgggattgcgggattttggaaaattcgaaaaaatttcaattaaatttaaaaaatttccaaaaatcaaaaaatgctgaaaaataaatttttaggggctgtcgggatgcattaaaaggggctgatgggtcgactaaggtttttcgattggatccgacggtaaaaagttgatcggaaatcaaattattaacgttcataaatttgactattttttttttcttcaaaaccacttttttgcggtgcaagaaatcgggaatttttcaaaaaatatacaatataataaaaaaatttctaaatattttaataggctaaattttttaattcttaaccaagtaaaaggtatttcacaaatgtttttagtagagttcgacctggacctggatccaggcctggatttttcctggatccaggtccaggggattttcctggatttttgtccagaaaatccaggtccaggcaaaacacgaaaaacctggattttcctggacaaaattttagaatttattatttcaagtgaccgatgttttttcacgttttcaaaaacagattaaataaatttaaaaacacattattattatttattagatatttttagatgcttctaagcaaataattaattttttcaaacattcttttgatttttaaaataaatttcaaaaaatccaggtccaggcctggatccaggtctcgaggagcctggatttttcctggacctggattttcctggatttttgtccaggaaatccaggtccaggtccaggcatttttcaaaatgtcgagctctagtttttagtagtatattcgcttgaaaaaattattcaattattttatcaaaatctctttttgtcatttttcattattttagaacattttgggaaaaggagtgactatttacacgttttttacagcgcgattttttcaaaaactttttgggaacttggaggagggtacggcggtgccgataggcgccgccgggaaaatttcacaaattttgaatgaaatttgcgatgaaaaatgagttaactttaattaaatttattatttaatttatttaaaaatatttggcattctgtcttagaaaaattttcaaaaaaatcaataaaatcccgcataatcccgcacaaaaaatcaaatttgcggatcccgctgcgggattggaactcaaaattctttgcgggacgggatcccgcgggattaatcccgcaaatcccgcaatcccgcaaatcccgcattttccaaaaaatgcgggattgcggactgggatcccgcaaaatcccgcgccgggctctagtgaggatattggagggtgaaagtcattgatgtcaacatttcgtcttctaccacaccagaattgctgatgaagaaaaatataactttgctcaaaaaaatggcgtttcgtacaattccaaatgggaatggccataacttttttgttcgtcagttaatttcttcaaaattggtatcattcgaaagctctacgtgtttagaaactatcattaagcagaagctaagcgattaatcatctcaccaaaaagttatgatttataagacttaaaaa

SEQ ID NO: 114 - DNA, 3002 bp, Heterodera glycines
  unsure (1)..(3002): unsure at all n locations
tcgtcgtgagtacagtcggtaataatttctcaattcgcgnatatcgtgacatttttgttaaatattaaatttatttaaaataacattctttttaattttactctcaaataatttagaaaaatatgctctttcgaataatttntaatcaatttattttatgttcagtaatttagaatctttgcataataaatttataaactaatttttaagtttaagtcacattttgtattatgatttagtgatttggaattctcatttaaagttgaggcacttaatcttcggcgagaattcatatttaaataaattaaaaatataacacatttgaatttccataaaatgaaaaggaggttgttcctgaaaattttatcctttttcttcacaaaccacgttaaaattaaacctttgttcttatcgcaagaccaaatctcttcatattgcaagatgaaaaagcaaaaatctcgaaaagaaagaacgaaaatgaatcaaagttttaaatgtattaaaatggaaatggaattaaaaaagaaaatcaaaaagaaatgaaagccaaaaatttaaaagatttaaaaaatcaaaaattaaaatttcgataattaaaaatataaaataaacacaaaaaatattttagtgggatcagacgccctcgatcccaatttattactatttattgtataacttaaaattaatttctttttaattattatgattggttcttaataaaattttggttttagataacttcttatttctacttttacgatttttttatttggcccctcgtcgtttcatcagtgttgttttggtggttgtggcggaaaaataaaatttatgaataatcataaatgttttaaatttgatcaaaatcagagatttaataaatgctgtctgctgggtatgacatttttcttaaatattttagtaaaacatgtgatccaacttttcttcaagattcattaaatcatatccaaattggtccagtaggatccaaattataaattttgaaaatcaaaaaacggtccacttttaaagagtacgaataaacaaataaagaatgaatttgtgagttcttttaattaaattttttgtttcgataagtaaaattattatttttaattataattagacaattttcacttatttttaattatttaaattataaagttataatttttttattacaacaaaattgcaataatcctttttaaaatatttaaaattatcgctttgtcgcaaacaataacaaaaagcgcagctgtctaagtaatgtaatgtaactgttaaatttttaattatatttatatattatttattcgcttcatattctattaatttgatttttaatttaataattatgtccttactgaaaacatcggtcaacaattctttatattttatgctagattaagccgaataaagagaattttttgatttgcattagcaaacaataatattaacaaacaatattaaattataaaaaattaaattgaattaatattcattattaatgattgattataaatgaacttacgcgaatttaaaatacaaatgataaaacaattaataacacagttttcaccagtggtcagaaaaaaattaattcatccatgattcacataaagcaccaaaaaataaaactaacttttcataacctgtgaattttattagtcagaaaatttgaatttttaaaattatttttctgattttctgccaattttttagtgaattccaataaatatatattaattaatgctgacttattgactttcggttattaacaaacaattcatgaaaatttcaaaatcacttgcgttattatttcttttaaaattatttttatttatggatttttgtgattgtatgtttaaaattaattattttactcgtttaattataaaattatataattacttttatgctattcacttttaaaaaaataattattatttaaaaccatttaattatccttttggattataaaattaaaatttcattttataaaaattatatctacagatttaaaatttaaaatgttttatatttattaaaagcaggattcgatgtcgctttttccgtctcccattaccatcaaacaatataattaattattgaattcaaataaattttttaattcattggtttttctttttcttttatatttatctcaatattctcgtgcactaagacaatttatcaatacatatattaatccaattatagaagttgcattcaataattcgttaagaaatataacaaaaaaaacatttttcttcaatttttggtttaatttattttttaagatggtttacttaagttaatatctatttttaattattttatttaatgaacattcaaatgttttatagtatttagaatatatataaatattatttaatttcttaatttatattatgcgtggagccaaaagcctgcaaaatttagattgttttttcttattttgatttacatatttatcaattatgagagagtatttaaattaatcgtttttctgcgatgaataaagtttattgaatttttttattatttttctataaaattatttcttatttatttaaatttaattcttgtctacctgcccctttcatggctaccttatcctccattttaatatgtattttggtcgtgatcggagaatggatttgccaaatcagttggggtttggatttgccaaatcagttggggtttagatttgccaaatcagttggggtttagatttgccaaatcagttgaggtttggatttgccaaatcagttgaggtttggatttgccaaatcagttgaggtttggatttgccaaatcagttggggtttggatttgccaaatcagttggggtttagatttgccaaatcagttggggtttggatttgccaaatcagttggggtttagatttgccaaatcagttggggtttagatttgccaaatcagttgaggtttggatttgtgaaagcggttgaggtttggatttgccaaatcagttgaggtt

SEQ ID NO: 115 - DNA, 1863 bp, Heterodera glycines
  unsure (1)..(1863): unsure at all n locations
aacacccatttccgatcaaaactattatacacccgacccttttaaacggtctttttaggtacgtgaaggaaaacaaagatttatttaaaattacggcggccggaaaggtacagtcgaacatgaatttgccgattgaaaacagtaattatagagatgttttgttgtatctcgcagggaagaaagatgaaacgccgcgcggtgcaaaatttctcaaagatcggttactgaaggatccaacagtaaaagacatggttgataaatcaaaggtcatgtggggacgtggaaggaaaaaggcaataaaatctataaaaacacccggcatagtgcgagagaagaaacccttcaaaccactaatatgggcaagactgtagagaaaattttatcgaaaatttattttaatttaaaatctccggcaagttttgctggaattcaaaaaattttaaatgaggccaaaaagattgacccgaaaattacgaccgatgacgttaataaattcctagaaaagcagaaaacatacacgattcacaagcccatcaggaaaagattcccgagactaaagacgataccaagtggcttccataccgattggcagtgcgatttgtgcatatttgaccagttgaaaaagcataacgacggttataaatatttattggtctgcatcgacgtgctgagtcgaatgatcttcagtgcaccggccaagtcaaagaagagtgaggacatgatcgaggcttttgatcgggtgttcgaaaagtctaaaattatcccgatgaaaatatatagtgacagtgggcttgaattccaagcaggaaaaatgaaaaaatattttgaggaaaaattcatcatcaaaaatgtaatgtatagtcctgatctgcacgccggagtcgttgaaagggcaaatcggacaataaaggagcgcttgtacagatattttacaaagaaagacactcttcgatgggtcgacgtaatagacaaaataataacaaacattaacaacagtgtgaatagaacactgggagccaaaccgtcttcaattaattttgaaaatgcccgtgcgctctgggaaaaattatataaggagaaggaatttaaaatttcgaaaaagaaaaaatttaaaatcggtgatatcgttcgtattaccaaggaaaagggaaaattctcaaaggggtacctcccaaactttaccgaagaattgtttaaaatcgttgttgccaattcgacgacacccgattcatacaggatcgaagatttggaaggaaatttaataaaaggcatattttataaccaggaattagtgaaaacagatggatgatttttacattgtactaccttcgaacacaccagggcaggagaacactacgtcaaaattcacagttcgactccccgagactttggaattgggcacaaattggtcagtagctctctcatcaattatttacccctactcattcaccgcactcggtataaacggtcaagagtttattaaagtatgggaaaacgacatcagtgtccctactcaagtttatttaccggacatgaattttaaaaccgccgggggcctgggaaataaaattaatgaggcattcacacatcattacaaaatcaaaaaacaacgtggaaagagagaagccaaggctgaagataccaaagattcaaaaattgatgtcgcaaagagggccgcagaacgcgccgggagagacgtagaaagacattttaatcagatcaacaatatatcgaattccatccaaacccaactaaacacactacgagaaacaaatcctcaaattttagaagagcctgatataaaaaattggtttgacaaaatggttgagatgggaaccganattncaacatcccngaatgaac

SEQ ID NO: 116 - DNA, 1860 bp, Heterodera glycines
  unsure (1)..(1860): unsure at all n locations
tagacaaaataataacaaacattaacaacagtgtgaataggatcattgggggccaagccagtatccgttacttttgaaaatgcccgtgcgctctgggaaaaattatataaggagaaggaatttaaaatttcgaaaaagaaaaaatttaaaatcggtgatatcgttcgtattaccaaggacaagggaaaattttcaaaggggtacctcccaaactttaccgaagaattgtttaaaatcgttgttgccaattcgacgacacccgattcatacaggatcgaagatttggaaggaaatttaataaaaggcatattttataaccaggaattagtgaaaacagatggatgatttttacattgtactaccttcgaacacaccagggcaggagaacactacgtcaaaattcacagttcgactccccgagactttggaattgggcacaaattggtcagtagctctctcatcaattatttacccctactcattcaccgcactcggtataaacggtcaagagtttattaaagtatgggaaaacgacatcagtgtccctactcaagtttatttaccggacatgaattttaaaaccgccgggggcctgggaaataaaattaatgaggcattcacacatcattacaaaatcaaaaaacaacgtggaaagagagaagccaaggctgaagataccaagattcaaaaattgatgtcgcaaagagggccgcagaacgcgccgggagagacgtagaaagacattttaatcagatcaacaatatctcgaattccatccaaacccaactaaacacactacgagaaacaaattctcaaattttagaagagcctgatataaaaatttggtttgacaaaatggttgagatgggaaccgaaattcaaacatcccgaaatgaacttaaatcttttcaagaagaagtagataaagccaaaaacataacattggagcatgtggaaaagaatgacatgaaagaagcaaagaaatcagccgacgtcgcaaagggaatcgccagacaggcaaagaccaaatatacatcaactctcgaggaatataatgataaatcggaaaagggttttagcgggatggtggttaggcttaacgaggcgctcggtgagcattttaaacgtaaggaaattgaaaataaacaagtttcagaagctgaaaaagggccgcaaaaaagagagagattagccaatgaggatgttcaatttaactacgacagtattgatcaaaaatttattgtctatctttcctctgccgtcacccatatagatttgtcaaaacacctcgcatatgttctggggtttaagaatacaaggctatttcacgcggaagaggcgacttatatgccggatttgacgggaggtgtaaggcagctatacatttatgcaccaaatttaatcgaaaacacaattatcggcaaccagatggccccactcttaagaatagttaacgtcgtcgatgacccgggatcaattagtgaagttatatatagcaccgagtattttcatcgtctacagtcgaaacgaatttcagaaattacaattgaaattcacacaccgtttggtgaattcgttaaatttcactggggaagttgtattcttacattacattttaagaaaagtatattttaaaaaatgacacatgtgtttttcgatcccgagtcggtcgattggtcatcttttatcactccccaacatggaagaggacagaaacaatattttgtcggaagcaagtatcaacgngggattcggtttcctcggtaatgtggcacgtttcttgacccctattgcgaggaatattgcctcgagtgcaggacatgaggggctcgccgctgggcagagaggtctgagtgacat

SEQ ID NO: 117 - DNA, 6881 bp, Heterodera glycines
  unsure (1)..(6881): unsure at all n locations
ttcaatatgacagcattgatcatcttttcagaagaagtagataaagccaaaaacataacattggagcatgtggaaaagaatgacatgaaagaagcaaagaaatcagccgacgtcgcaaagggaatcgccagacaggcaaagaccaaatatacatcaactctcgaggaatataatgataaatcggaaaagggttttagcgggatggtggttaggcttaacgaggcgctcggtgagcattttaaacgtaaggaaattgaaaataaagaagtttcagaagctgaaaaagggccgcaaaaaagagagagattagccaatgaggatgttcaatttaactacgacagtattgatcaaaaatttattgtctatctttcctctgccgtcacccatatagatttgtcaaaacacctcgcatatgttctggggtttaagaatacaaggctatttcacgcggaagaggcgacttatatgccggatttgacgggaggtgtaaggcagctatacatttatgcaccaaatttaatcgaaaacacaattatcggcaaccagatggccccactcttaagaatagttaacgtcgtcgatgacccgggatcaattagtgaagttatatatagcaccgagtattttcatcgtctacagtcgaaacgaatttcagaaattacaattgaaattcacacaccgtttggtgaattcgttaaatttcactggggaagttgtattcttacattacattttaagaaaagtatattttaaaaaatgacacatgtgtttttcgatcccgagtcggtcgattggtcatcttttatcactccccaacatggaagaggacagaaacaatattttgtcggaagcaagtatcaacggggattcggtttcctcggtaatgtggcacgtttcttgacccctattgcgaggaatattgcctcgagtgcaggacatgaggggctcgccgctgggcagagagttctgagtgacatcgcccagggtcgtgatttaagggatgccgtcagggaacattcaagacaggggttgactaaccttaccgacaagttacaacaatgtgggaaaggaaaaaggtctctgatcactaataagaaccggaaacaagtatatgatcagttaagtttcatctaaaggtataaatggaataaataatacaaaaagttaaaaatgacaactctcaagaaaatcgacacggcgagtgaggacggtctcgaggggggcctttcacttttcgacatccctccgacgaacgttgcaattaataaatccagtattcgggaattgctgccactttcagcaataaatcaatctggaccatatatctttagacttttttcagataatcagttttgtgatctcaataaaacttttctttatttgtcaacttcaattgagagaaaagacaaaagcaattggattccgattaccaaggacagtgaagctgaccaacacgtcggtgtcattcaaaattttgggcacagctttgtcaaaaccttaaaggtgtcaatttcaggtgttgagtcttatgattccggcatttactatgcgtttagggcatatatgatgaatgaattgggattttcagaagatgtcaaaaagggtctctgtgaagcgtcctgctattatgtcgacgatgtcgaccaggatgattacacaaatagcggctttaaaaacagagcgtcacgttttgctgatggtgccaaatgtgaaaccatggtgaaacttaattttgatctcgctcgtcagcccaatctattgcttaataactcggatgtcatttttagcatacaccgtaacaccgatgattttctaattatggcaccgccatatgtttcaggaaatgcagtcatagcgaacccgcacacatatcgtattaacatacatgatattagaatttatgtaaaaacagtcgacattacccagtcattaaataacgtaataagcaatcagctacaaaccaccccggccaaatacccggttagaaaaattgagatcaggagtcttttcatcccacggggcacttctgatctctcacacaatgtttttaccagcattgttccgagacgtttaatcgtcgggtttgtttcaaccggtgcgtataccggaaatcctaaagagtcacccttcgtctttgaacatgccaaaatacgctctatcagtgtcgaagcgaatggaaacattttccccgggtccccctattctcttaattttgatagaaacaaatacattcgagcatttgttgacatgtatacggggctcgggatggacgacggagaaaggacaatgtcgatcaatatacaaaaatttgtaaacgggtggtgtttcttcgtcatcccgatgacctctactctagaggacacccccggttttgaattgattcgaaacggaacgaccagcatcaaggtgcaatttaatgagcctataaaggacggcgggtatgagatgatcgttctgggggaatttgattcgattttgtctattaatgctaatcgtgtgctcagtagtgacggaagcatatgatgaattctcatgagattgaaatatttctatccaaacatccaacaacacgaaaatattttatcggtgtttttgcttccgacaagatgcctaaattgaatgacaggcattttccctactgttttgtagcaaataccgacagggcgggcacgataggtgaacactgggttgcctgttttgtaaattcgccgacagaaatagaatattttgattcattgggcgattatcccaacgaagatttaagttcatatcttaacctattcaaacgaattctcattaacgaccgcatcgtccaacatcaattctcagatgcatgtgggcaattttgcatttatttcttgacacaacgatgctatggaatcacttattgtgaggtcattgacggtctatataaggttcgcccgagggccgatttattagttaagcaatttgtcagtaatgtttaatttaattgttctcctaacgatagtcggtcaactcagtggagaaagggttactattctttctgatacacaactttttgacgacaagtatctcactatgacaaagagttcggtcaatgaaagacagttcggattcgatcgctcgagattatgtacgataaataggaatctgatttcagggtggagtgtatcaatccaagaaattaattcaatagaaaagagcggaccaactaatgttaagctttaccaggattttcgacaattaaagccccgagcgtgcttttattacaacgatcatagttatttaattttccaaaacgaaaatacaaatgaaacttcgataacaagaggaagtcaagaaaaggttgttaggaattttcccagtggggaccttagatttgatcacattaatggccgactttttgtaatcagtgacgatcgaatagatgaaattgacattagatcaatcgagaatttatggacacatcataatggcaccaaaattattactaaaccgatcggatcaatgccgtcttcatttaccgatttcctaataattgagggacaaatttatctgattaaggaaaagaaaatatataaagatcgatttgactcaaacgagatacttcccaaatatgtggcagacacaaatagtgaattctttaattttgtcgtgttcaaagaatttgagaaaattaaagtttcaagttcaaatatttgggtatattttttgtcaattgtcgatttggtagtggtcatcatctgtatttcagttctcagaattttaaaaataaaaagaaaaggtaaaaattcatcatacggcggtgaggtaacggtatataaggatttgcaacgaatatgaaaatgcctactggtgctcaaaatgaattctctcattgaaattctatgcgattttaacgaatgcgaacctcacgaattatcagaaattctacgacagcggaagaaacaaaatttgaaatttttgagaagacacgccctaataacgagacaccttaggcacaatcagtttatctcaccggatgacatcgcatttaacggttctaataggctttttgcctaccgaggtttcctcggggttactgtcgagcagcacctctattcaagacacagggtcaaactacaattccctcaactcccatgtataactatgtaccagaataacggtcatagatgctattttccccttgaactgctggattttttataaaaatattacggctaacaggagtgggccttcactttagaccgttccacccccgttagtcctaatatcacattaatttttattcaactttatttaacaaaaaacaaaaataaaatacaaaattaacaaaatccaaatggcatcacattcaattcttcatcaataatccccttctgacagaccggcttgtacatcttgtgcctctccctcgtcacgaccttcgactcccgcgttggactaaaataatatgagattgtttaaaaaaattttcaaaaaacatacccaaaatcatttttgtaaacaaagaatgcggggtctacttccccctttccataattcagcaccatctccttaaacgcatcgtaatgcaacgccttccggttgtccacatcaaacgtcacacccctaatcttcatcacgtaatcgacctctcccgtctccttgctcctgatctttaaaccatactgcttcgccccaccacaacaaaattcttcaatttcgtaacctccatactcctcactcatctctccaaggtatttccccgtcgttattggctccactcctctgtcatgaaacacgaatatactatccgtgtccgtgtacaaaatctccccgccattcctttccgcctccatcataaactccagcaatttcaaccgcgccatgctcgtcgtcctgttaaaattatattttctcgctttttttcaaaaaaaaacttaccataagctgaccacaatattgcttgacttgtgctcagtaacaaactcctccttgtccctgtagatcacccgcatcgcgtcacccgagtactccacaatgtcacacaactccaccttatgatcacacgccaactcgtaaaaggcagactctctgtcaatcaccgcattcttgctcaatgaatttctcatcgaaaatttcccctaaaaattaacattttatcagatctaagaattcgtatttcatacccataaactattcagcataagcttgctgatataccgcaaccccggattcttctgcaccctgctcagttcaatcgcaattccgtacttttccttgtattcctcagcccattgcctcttctgttcatcgctctcaactcctttcggaaatccgcttgactcctccttcaacttcaagaatagccgcacatatcccttgaataaatcatcatccgtcgcttcgtaatgccatgcccggcaaaatctgtccaccctgtaaccacattcaaatgcttttgcctaaacataaatttttaaatacgtttaatgggtgttttttaccaattccaaacttgtatacgttgccacatatctccgctgtgcgtcatcatgggggcatttgtggccacatcttgtagtctccttcttaaacatcgacgcgcacctccagcacagcggaaatagtaatctctcatcacacttcaactgcaggacaggaactcacaacgccctcggcggtatcaccctcactttatacaaccctctgtactgcaaatcatcaggctttgtccactccacattgatctaatccccttttggtaccacaatctccgggactccaatctggtacgctgtcccataattcaccgacggatacaaactgacgatatcaaacaccgagatcttcttcttctcgtcggactgcgcaaacaatctcagaggccctgttcttcctcccgcatacgccatcctcggatcgatcggccctttctcgttccccctgtcgtcgaaaaattcctgcatttctttgtcccccttcagcttgattattggtcgcatcatgatatgcatccatgaaataattcagtctttttgggaacagttgtgaccccagtgtcctcacttgtaattgtccgaagggttacgcattaaaaccagataatgggcgttcgctcttgccgttttgatgtccctaccatagagactctgggttacaaaaattacgcttacgttccaattatgggagcccctggtaaagagtagatcgaggaaagtattctgcatattaagcattaaatcgtcaagtatcagtaaaatgggtttttcctgttctttaatcttattcatgtccggaatcccgttaaaagtctcaacgccctccccgattaatcctaaaatactatcattcatctcaccataacaataaagaattttttcaggcgatggttcaattagattcttatgatgctttaaaaaccgtaatagccaacgggtcttaccactcccagtagtccccgagagaattagagtgaacggaccgcgaaacacttttaatgcatcttatttatttgacctatttatattttcatagggaacatgtttcgcgcatttggggcatagccagaaattatcaaaaaatgatgtaccgaaatgcaaaagactgtgttttttacatctgttacatatctcgtaatgacaggggcagtaatgacaacacttaattttatgtggacagttcattttttcaatttaattttatttttggttgctatttatagaaggagtatataaagggagtgaaaggacaatttgattggtacattgtatcaaaatgcaaaacccgataatcgtaaatataattgctctcgctaatctcggtaccggnattanactanactctctgacgatcaccgaatgcgaatttaagtataacccntagaaatttcaatgcccgcagtatataatgcacag

SEQ ID NO: 118 - DNA, 5147 bp, Heterodera glycines
cttttggacctaatctccgggatccatcgggctctcccatgctaattcaccgacggatacaaactgacgatatcctacaccgagatcttcttcttctcgtcggactgcgcaaacaatctcagaggccctgttcttcctcccgcatacgccatcctcggatcgatcggccctttctcgttccccctgtcgtcgaaaaattcctgcatttctttgtcccccttcagctctttctcaatttgacatccctaaaataattggccagttttttaaaatattcttcattactcacccaaatttcttcaacatccagaatttgccgcaattccgccaacctttcttgcgtctcatcgttcagctcctgcgcagttcttcctccaaccaaatccgccgacgggtcataacagctcaaacaaccgtggatgtaacagcccatcacttcgatacatttgtctctcccgtccatctgtgaaatgaacccgtcgagcttgtacttccccattttcatctccccgccgttgcccgcatgccttatctctacggcatccctcttgctccgccattccaaatattttattgccaccacactcgcgcgatcgttccgctcatacccccgttccggcacaatcgacagttgttcctccaacaaaaacatcgctttgaagatattcatggcgatgccagcattcgtacagctcctcggcaacgggtcaaatcctttcgttatctcatttatcaatatcctcctgaactcaacgaccgcacccaacaatatttccgtatcattcctgcaataattcttcaactcctcgggcaagtaaaacgacgtttccatattctcattatacctaaaattatgggtgatcaatatttcacattttcaccttaccatttctcaaacttttcaaatttttccttcctcattgatcctggcgaataatcctccatcggtggtaaatgcggcaaacgaactccataattctcccttctgttgtaatagtaggggaagaagggcttatcctcacactgcaaattgaacgtcgactttaacgattcaagtttgacgggcatcagcaaacatgaatccctccatatcaataaagaatgcttcttcgaattcttcactttaactcatagatcttcatcccattaattagcggtatcggagtcctgccggtccgacacagataattaaacacaaaatgccctaaaatggagggtttcaaaatcaggataatcatcaaattaccgtcaaaccgcccagcattgtgagcaaaaatgtaggtgtcgtatttcacaaatgccgtcaaaatccactccacaaagtccttggtcggttcatgcccctcagcctcgctccaatccttttccctctcctccccacaaatgttgcaatttgtcctctccttgtcgtcgcagcactccgtacatgtcactcgaaccgaaatgtagttgatgacatgctccatttgatcctccttgtaaattgtgtcctgtgaagtctccgaatcctgaataataaatgaaaactaaaaaattttttctcttcgtacccaaataacaattctgtaaatgtccttgtcctctctctccttgatcggtctgatgtaacatcccctctccacatcatgacaaacattgcacagccggcaaaacatctccccacattcatgcagcttctgtgggttatgcagataggtcttactgcatatcacacatcgcctccacaacatgcaagtttggtgtccctgatggtaatcgtagcattgccggttgtagaaaaagcggtggcaatgtggacactcaatcttcactccaacatccttcacacacggcacgcccccaactcggttgcagtaataacaccgggccctacactcgtacgtatgtttgctttccgttgaataaaaacattcgcaatcaatgcaaaacttcctccctcggttgaaaaagctcacataattcttcaatccgtcccaatgatttccctccaaaaatatcggcaccaccttctcccgggccatcggtcccttccacagcacgcgaatcgatttcctcggatccgcagatttctcaaatgccacaatcctgtactttcccggattcaaatcgtcctaaaattacttttatttttctcatcatttctccaaaactaacccaatgagcctgaaccatcaccaaatgctcaagtccatagccactttcattcctctgcactcccgaatttagcaaaagttcaaacgctgcctccctctgcctcgaaatattctttataaaacgttgaaaagcgaaacgatccatcatcagataattcttcgccgccagcagcgcataaaacaagcaaaatttgtcattgttctctatccttaattttttcgttttttttgttttttttttgtttttattcatttaatttaatctaagatcactcaagcctacttaattcgctgctgttccttgaaaccaaaatcgaatttatgcacatttcgcggtccctctccagctggcagcgctacacaggtgaccttcatctttattgattccgaaagcagaattgttcttttgtcctcctccccttcttctcctccgctctgccccaatttattgatttcctccatgacaacatccgcgttgttttgggggaagggtcggtacggcagccaaattgggtgtccaagtccagccccagtcaatgccacaccaaacattttcactttgcgccccattgtctcctccgtcttcgatatggaattctttatcatgatatcgatcgcttctcgcagtgtttcatcggggcgctccacatccgggttgatcacaaattccgttatgtttttcgtgaaaccaaatttttcgcattttgtagtttggtggtcaataagtttaaagggctccatcgggaaattatttctaaaacggattagctatttatatgttattgtttattaaacttacccgattgagcggaagtcccattttttggccattggcacggcagtgggttggacagagttcacgcgtttaaaagacatttttaaaaaccaaaacgcgaaatttaagaagagtaatagaaaagagcagagagatttaaagaaaatagacggcagaaaaattatagtagattggaaataaaatgtagaaaaaaaaatagagcggagtaaaataaattagagcgcaaagagagtttaatgaaatccaactatttagttgaatgatttgcgatttgggccgggtgtacgaattgggggaaaggggaggggtctagtcacgtgactgtctgggtctaccttaatttagagggtcatcaatcattttagtagacaactgtcacattttattcaaaaactgcaaaaaaaaatcgtctggatattctttatttcgaaagtcgtcaatcatttttttgtgacaggtgacccaaataatgcgcatattgtgaaatagttggtccaaaaactaaaagtcacgtgcacattacaaaataaagggtgaaaattgcgaaataaggaaccaatcaatcatttttattgacagttttattcaaaaacggggcaaaaaattgtctgacgaaattttatgcacatttaaagccgtatttcgggagtcatcaatcatttttcttgacagcttttatttaaaaggggcaaaaaaaaagtgagtcatgcaaaaaaaaagatttcgcaatcgtaaaacaaaaaaattacgaaatcgcaatgcaaaacaaaagaattttatatgaccttaaatttgtacttaaattctatcgtaaattgcattattaaaaattcgctactttcactcacaaaagtgcaaatgaccttcacgcgggagaggggccgagggggcagaaagtgaaagggggaagatgtggtaaaaaaaaaagtttttgaaaatatttaatcattatatattttaaacataaaaattttattggagattaataatcacaaattcttcacaagtttccttctatttgttttttttaatggattttaattatatttaaaattgagcaattttgcgtcattaacatgtaacgattaatgaccttcgcgcggggcgacggaacgggcggcgggagggagggatgggagggacgggggagagacgtaaaaatacacttaaaatatttaaatttgtcataataattgcgtattttaaattgttcttaaagcttacaaaatttctttttatttatttcaaattttaattgtttttttttatattttgcattattaaatgattaatgacctttgcgcggcggccgacctaatgggcggcgggagggagggaggggcggccgacggagagagggtggtggagaggaggggcaaaagtgcagatcaatattggtcaaatttgaatttaatgatagaatagccgcaacattttgaattatgcggcaaattaaataattaacattttttattttgtaaggcggctgcttcaaagggtttggattgtgctcacaaatatcgactttattttatggcggaattcgggattgtgagcgggcggcaacttcaaaacatttaaatggctcgggattttggggaaatatcacgggcggcaacttaaaaatcccccaataggctcgtgattttgcggtaataatcctaaggcggcaacttcaaaggaaaaacaccccttcaataggcttggaattttgcgcgggcggcaacttcaaagataaacaccccttcaataggctcgtgattttgcgcgggcggcaacttcaaaggaaaacaccccttcaataggcttgggattttggaggagtcgttcctgtacccgcgccgttttggcaccatatactacttatctttgaactctttaaaatattatagttgaccgttgttgttataaccatgatgtatgctatatagaaaaatggaaaaaacgatatgattgcgacaatagttattgtaaatgtctatatgaaagttcggagtgttctctaacaaaagtctgtatttacttttttttttaactttattatttttagaatttgttatgctggtctgttaaaatttttggtgaacaatttaaagaacaatcaaaaacataaacaattttttcgcatcaaattaataatactacataatcaacaatttttgaataaatattatattaagcgagttctttctgtaaat

SEQ ID NO: 119 - DNA, 3567 bp, Heterodera glycines
agaaaatgctaaactaatttgattcggaaaaacaaaaatcactcatttagtcgagattatggccacacctccttgaaattgttggcccaatcgaagtccgtttgtcctttaaagtcttcgcaacgcaatcgcttgggttgtccatcttttctcggagagtgcaaccatttggacaatgcttggccagcagaaattattgaatttggcccatcaaaatcatcaccaaacgcagcgggcgacaaatcacaggaacagattgaattcaattggttgagatcggtgagaattgttggcgaagtgcgacgacgcaaatggtccaaatgatcaccaccggtaaagcccaaacagcgaatgtttgtcgaaaaaatgggccaaatttcacgaacaaaaacatcccaaatcggctggccattcgtagagtgtgatgatgaaatccacaaatataaatcggtgcctcttttctcaaaaatttggtgatttaaacgaagaaaagcgatgacgaagtgatcgatgtaactgtgaaaatggaaggaatgcttttattgtcatagctctctgatttttaattactcaatccgaaggttcttaaagcgaattttgctgggcaacggacggtccggcaatggaaatggcacaaattcgtaatcgattcgtacagacagcttcggttctggtcctttgtccttgcgacgaatttcgattggtctccaaatagtcaattcgcttttgccatcgaaatgtttgtccaccaacgcatcgaaacgtggcgaaagaagtgccaatttgaggccgagttgagcacggtcaaaggatgggaaaatgtccatccaaacatcgttgcaaatccaactgaaaaaagttttgttaggtaaataaatgacgaatttgtgcttaccgtcggttcattttttggcaattagcaaaatttgctgttgaatttcgaatgatgtcacacaaatagcagaaaaataattgcgttggataaagcctggatttttagggttttcctattttttacggataatacttgatgagaaaaacacgagaatcgcattttattaaaacaattttgaaccagttcagcttcaactgttgccaatgggctcgaggggttggacaagtgccaataggaggcgaaaaatcattgccaaaaacggaaggcgcggaaacattttgacataaaatgacgacggatcgaaagaaaagggaacgcacataagaggaccaccaaataggagaatattttgcaaatgatgagatttcggggagttttactttaccccaaataaataatcaattcgactagagttgagcggtaatcggtaattgtaaaaaaaccggtaccggtactgaccggtaatgcaaaaaccggtaccggtaccaactttttccaccggtaccggtaccggtaaaaaccggtaattttccaacgtaaaaatttttggacaaaatttttcaaatacaaaatttttattcagttttcgcgcgagtgcctgttttttagcattagaattgttcagaagtatatgtatattgagggtgaccaagtttttttttcaaattcaggataaagaacactaaaattcagatgtagacctcaaaattcagattattgcaaaacaagggatcagcggccaattttccaattttacgaaggggtctccggccatgtaaattaatgtaaatcaatgaccttttttgctttcaacaccgctttttacaggcgcggctgctgcgacaggccgcgcacgcccgcgtcgcccaccacgccaatggcatagccggcgcccagtccacacagaccgcacacgaggcctgcagcgaactggctgaacccgcggtcgatggtgtagccgggcccggccgcctccagccggccggaaatgatcaccgccaccaccagcccgtagatggccacaatgccggccatgaccactgaattttcggatttttttttttgagggggaataatgaaaaaaaaattttaatttaaaaactgataattttcaaaatttagcgctgttctaaaacttgaatcaaaaagtcgaaattctattttgttgtttgagttaaggattcgaattggtcaaaaatggatgtcagatttttcaaaatccgagttcagtgattagcgtatttttaagcctagaaaaagtgttacaaatttaaaaaaaaaatttttttcgggaccgcaattccgaaagattgccagttttattgttttaagttagggttggttcggtgcgtttttaccttttacttcgagttcgaataaaaataaaatttcaaaatttttttggcaatttttatggcattttgttttcaaatttcaaaagaactttttttgatctttgattctttgatacttctctttcattggattttggcgattgaattggcttttttcgttttaaaattgatgtataggcccaaagattagttaaaatttttctataactccgttttttttattaatttgtatgaaaaaataaaggtacaatcagaaattcttgaaaatttttgatttaaatgattttaagaaatttggattttgtcatacgacttatttactaattttagcattttacaaattcgtgccaacaatttgagggatgtctggtgacaattcggcacttattgcagcggagcaagcggcgtatggcccattttttggctcacttggcgtcactgcggcgatgattttcaccgcggccgggtcggcctatggcacggcaaaatccggcaagttttttctgcgcgggagggggagggttggaattttgaaaatttgtgagcgcttgacgcagccctatacctgaaaaacttgcgattttcttccgccagattttgccttccaaaatttttcgaaaaagaaaagttattgcaaaaaacattcgaatgatattaaattcattcaatttgggcaactatgaaatgagttataccccaaaaaccgggctggcgcccagtcgaccttttggggtcggtgatgacgaatctgacatccatttttgaccaattcgaatccttaactcaatgccaaaaaaattgccaaaaaaattttgaaattttatttttattcgaactcgaagtaaaaggtaaaaacgcaccgaaccaaccctaacttaaaacaataaaactggcaatctttcggaattgcggtcccgaaaaaaatttttttttttaattcgtaacactttttctaggcttaaaaatacgaagttttgaaaaaattgctagtctttttttttgttgactttcttataacaaattttctaagaatttttttttgaaaattatgagtttattttttttctacccaacaataaagaaattaaaaaaaaaaattttttttttgaaacgtacctaattctaagaaacataaatttttaaaaaattgatggcggtgaattggattgggaacctgggtacaagccagggacggtccccggatttcggcttggggggggggggggggtaccagcaaggaaaatctaaaattttcagcaaaaatactaatttttccttaaaaatttcgggtgcgtaggggccttggggggggggggg

SEQ ID NO: 120 - DNA, 2324 bp, Heterodera glycines
aaaattttgtatcttaggatcatgataaatttcagtacatattctatttagtgtatttttttcaagtgatatttgttttaatgctttaagtttctaatacgcaatttgttccattatcggaaataattaattgtgtcacttttcttcgcgtgatgtatgggcgaaatgctaaaagaatttattaggcaatgacattggtaagttattccaaatgaatttctcatacaaataagcaatggaaatattgctgaacaacatttgttaattaacatcaaaaatatttagggagaggggttcaatataatcaattacaacatgttgtaatgtatttttaccttttactgtaaaaagtggtagaggaggatttttaggataagtatatttattacttgaaaattttgatagaatggaacaattattattgatttataaaatttcgtaactcacccagttgcctggggggtacgtacccctcgtacgtcccccccccccctgggaccgtccctgtttttcgactataactcctttcataattgtccgaattgaatgtatttgatatcatccgataggcctaaaaatctttataaaccttgctaaagtttaaattgaaaaaatttccgtttttaaaaaagttgtgttcaaaaaatgtttggaaaaacaaatcctaagtcttttggcaataacttttttgaaattaaactaaatttttcaaaaatttacaaggaaattgagaactcttagggctatcgaatgatttcaaattcattcaattcgaacaggtatgaatggggttatacccaaaaaccgggctggctggcgtggcctcagtcggtcggtgctcagtcgtcccaattcgtttcgaaactgttgggtaaatttatttgaattttctttttgctctgttcaggtgctcggtctctacggaatgattgtctcactgctgctaagttcctcctgaacaatggaaggaagaaagaaggaaagaatggcacgtctgctgaacattgtgccgaccgtcgtgttttgatgatcaaaatgaccagccaccgtatataatagataaataccgtattttccatccattcttttttactgtgcccccttttctcattttttactattacattttaaaacgtccaaaaatttggaaaatgagtgcggtgagcgggacaccattaaggcttgggctactgtacatattttgctgaaaatctatatgtaaataccgcattaaaataccgtatttgctctaattatcccccaatctccattaatcccccaatctccaattatcccccagtctaggaggggtttgaaaaataatcccccagtctccatttatcccccagggggataaatagaatttggtcgtaacatttttaggggatgcataataacggaaaagtacctccaatttgtgaaaattttggcctaggaattccgttttttgttaatttgaataaattaggtataatatttcttctgtagcaattggtgaaaattagcagcaattcgccgtgttcatgtgtgacatcatcgtttggaagcaataaaattttttggaaaattcgattcggaatttaattttatttccattttcaattttttttgtaatttgtccataattttatcagttggatttgcaacgacgtttggatggacattttcccatcccttgaccatgctcaactcggcctcaaattggcacttctttcgccacgtttcaatgcgttggtggacaaacattttgatggcaaaagcgaattgacaatttggagaactatcgaaattagcaaggacaaaggaccagaaccgaaactatctgtgcggatggatgacaaatttgtgccatttccattgcccgaccgtccgttgcccagcaaaatcctttttaagcgccttcggattgagtaattaaaaatcagagttatggcaataaaagctttccttccatttttaggtacattgatcactccgtcatcgcttttcttcgttcaaatcaccaaattcactaaaaaacctcatttttacgggtataaaatgacaaaattttagtcaaaaagcaacaaattaagcaaaatcagtattgagtctacacaatttctaatatctttaattttggaggatgaatttttcatttcttagctgagtcgctctcagttgggccggcacggttgggccccagcatgcttttctactattttttctttgtcgtccaaatccgacgatcttggtatccgttcgaaagctcttcagctctattagccttacaaaaagcgaagtgtggtcaagcccatgaaaaattttattaagaaaaatttcga

SEQ ID NO: 121 - DNA, 1469 bp, Heterodera glycines
  unsure (1)..(1469): unsure at all n locations
gctacaatccgtgcgcaagtattgcagaacactgcaacccccgtgttggctgcttttccgaccaaagctgcgactanaaaggtcaacgtttgcaaatttttatgccaaagttgctattttgatcacctctatggcttttcttcctgtccatcatctctctgctggcctcactgttttgcaggcacaactccctcaacaacttatgggcgtcttcaattggtgaattttttgaaacgttaactcaattatttaaatttaaaggttcatggacaattacaccgggagaccgtggttcaggtgctttgacagtgcctcggtttgcaccggaagaatggagtgtgcacaaaagaacgttggatggaggagacagaaccaacaattacgcagaagccttccatcgaaaacttcaacgggcatttgattgtacccatcctactgtcttccacttcatcaacacaattcgatgtgagcaaaagtcaattgatgcagacatctcacgatgcatcgctggtgaagtccctcctctaaagaagcccaaatattgtgccgccgatgaaagaattcttcgacttttgcagggctacaatgccatcaacaataacccggctatccaaaatgatcacaattaccatgccaatgtcaatgttaatcccgataacatcaatcatttgctcgttggtgtttctcgcaattatgaaatgcgcccgtaatttttcaatgcttgttatttttttttgttgttaacacattgataaatatgttatgttattaattttaaaattttttcggaaaaaatcagtagaatctatttttgacaaaaacagcttgccgtactaaaccgacccctcgtactaaaccggccgtactaaaccggccgtactaaaacggccgtactaaaccggccgtactaaactgacccggtccgtgaaatttgggaccagagcgtttgggcccccgtttttgggcccccgacgattgaagcccacgctgttgggacccgggctccccttggatccgcgtttttgggccccgggggactgtgccgcccaacccaaaaacaaaattttgaggtgttctgatagttgaacatcctaaatatataggccatgagggatccctcgccaattgacataacagacgataagtaacctattctcaaaggatacagtctcctcattatctgcctattacgtttcagtaggactgccccgagaacgaaatatcgattttttcatgtgtccgattggggtactccaactgttatggggagccaaaatccaacgcagaatcaaaggacacggctttagggaagctattccgagaaggattgggtctccacataaatctgtgcgcatcggttcaggaggactgtcccgaaaacccaaaaacaaattttttggatatgaattatgtaaatgaactgactagataatatttacaataggttatttctcttcctttcagtatcc

SEQ ID NO: 122 - DNA, 6485 bp, Heterodera glycines
  unsure (1)..(6485): unsure at all n locations
gcgtttgggcccccgtttttgggccccggggtcgtttgggcccccgtttttgggccccggggtcgtttgggccccaacccaaaaatagaaaaatgtgcttttttaaaaattaagattctaaaaactaagcctgagggatccctcgccacttggcataagttaggtttaattacattcgctcattttttacaattttacttattccaaatcctattattttttaatagttaaccaatttgatgtacattctgatttggacatttttcagaaatggctaacccaattgcaaccaaaaaacaaaaagtaaaattgactctaatgcactttatgagtccaatcaattgacaatccatggtttttatacaataactttttccatgttcgaacaaaccctatctttttggtatcattcgaaagcacaaagtctgaataatgtaataatacgagaaaacaagagaattctaacatttcaagaaagttacaaacgaaaataatcagcaattacttaattaatcaaatcttttgtggtaattgcaaattattgttgaatttatttttaaaatttttattttacatttttatgctgaaatttaaaaagttgtttttactgtgatttttcatttttctgtacttggggcccaaacgaccctggggcccaaacggcccaaaaacgggggcccaaatgcgggggcccaaaaactggggcccaaacgcccccgactcgtgaaatttggcccatttttgcgccaaacattggccatttgaccatttcaaatgctgagcatttggacaatttgcgtcggctcatttcaccaacaattctcaccgatctgaacacaaattcaatggattcccattttctgtaccctgatgggatgatcagtgcttttgatgggccaaatgcaacaacttcggctggccaagcgttgtccaaatggttgcacacgccgacaaaagatgggcagccaaagcgattgcattgcatagattacaacgaacaagcgaacaccaattgggtcaacaatttcaaggaggtgtggccataatctcgaaaaatcactgatttttgttttcaaattgtttagcattttcttcgtgccaccatttcttccgtcagttaccaaattcgttgtacttttcaaagaactttttttggttacaaaaaagttatggttaaaaatatttagaaaaccagttttttgaaatcataaccttttttaaacccacccaacgaaattttttgaaattttgcaggctattagatgactcttaacgctatcgaaacaaataagaatctttaatttggatgcttttaaaaaagttatggtgcattaaaattgtcgaattattttatggtcgtgtctttttttgtggtcgtgtgaaccagggttgttccgggacgagaaaaatgtcgggattcggacaaattttgattttctttttcaattgtttaggcatttctctgtgccatcacttcgtcttctgcctgctacacaattcaattatatttgtccgcctcattgccaattgtgccatttgaattggtgaacgaacgaacccatgaaaagctgacaatggccaaagacggcacatttggatttactattcgatggataatccggcggtgtccaagtggggagacggttcgctggactcttgcacttttattgtggcaataattgcattgggtgagcagcaacgcatttgccattgttaaagtttgttaaagtgttcatcatcaaattcaaattgcacttaatttaggccattgtatccacaatcaacaaaagaagcggagaaaagagcgcctaattaattatgtggtagccaattaattacatttgacaaattgccaatcatttcgaattattgaatgaaaaattgttgttttgatacttttttttgtccatttttaattgttgattttatgttttcgaaaaaatcttgtttattatgtaaattaataatacttcccgagaaattattgttataattgctacagtacccattcattccttcggcatatggtaatcgactttgttcccattttaattccattcacattcattctctttctttcgtttctatcctttagcaaattttcctgttcgattaaatttccatcctaaattgtccccccgccccgttttttaattaatttgcctttgcccgccggcgcaatgggcgacgaaaactaaccaggcacatcacttttggccgactgtttataacggtttagcttcaaaatagtgccaaaatatttttgcccacaaactcaaacattctcttgttatccttttgaaggcgtatagtgtgctttatcacctcacaaaaaaatttcaaaaagttgccaattcgcaaaaatttatggcaaaaaaaaaacaaaaagtgcgcgaggaatttcaattttttctttttgagttttggccaatttttttttgaaatttgacaggagggctctctaataatttaatgtttgattgggtgtaaatcaattaaataataatttgcctcccctccaaaaaatgatgccaacaattggccacgccctttgcctctttggcctaacattcaaaatgccattccatgccaattttatcactaatcaattatgattggtccattattttcttaattaattcattcttcttctgcggctgatcaccgttccgtttttgttcgtttgtccgtcactaattgtcagcagaagacgaccctttttcgctgctttgtcccgcttcttgttcttcttctgctgatggcggagacaatggccttaattaagcgaaatttgaattatttaacaaaactaaatgttttttttaattgctcacccaatgcaattagtgtcactatcaagccaaatgaacacattgttacaattgttgtcccaattttcatctttctgaagctgaacatccgcggcctctccaacgattgatctccaaattgtcaattcgcttttgccattgaaatgtttgtccaccaacgcatcgaaacgtggcgaaagaagtgccaatttgaggccaagttgaggacggtcaaaggatgggaaaatgtccatccaaacgtcgttgcaaatccaactgaaatgggaaaacagtttagtcaaataaacgacgaatttagacttttaaaattcttttaccgtcggttcatttttggcagcaattagcacaatttggacgagttccgaatgatgtcacacaaatagcagaagaattaattgcgttggaaactttatttttatataatgagaaaagcggaaaaccaaaaattctaacgaaaatcatgtagaacataaaaggtaactcgcccggtgggactcgaacccacgacctcagcaatccgtgccgtgctctaaccaactgagctacgggcgcctcttttagaggttctctcaggtcctttatcccactttctcccacactccgttccttctggcatcacattccgcctccctcggaagaccggtccctcgggctctccttggcccttcaccgacggacttggactctccttggtccagtggtcccggcagtgtggaggggatccacccaggagcgccaaatagtaaaacttctcgccgttcggtgctgttcgctgcttatttgccttagattaattagggcaggggcacgggaacagtctttaattaggacaggagagattggggacaatattattattagggactttgaccaattcgttcggcttctttccaattatgccgactcagtcaattcgcaataaatgcaattgactgcacaattaaaacacaaacaaaattattccacagcacacaaatatccgcaattaccacgaatcattattaaaacaaattactacaattaacgacttaaaaaaaacgcaaatgaaaaagctcaacaaaaataactaaacaaaatgccaaaaataataaattaaaataatatcgaatggtcaaagtcaaaatatcactacatcccccgctcctcaaaaaaggcgtccctgccgtcaaattggaaaggtttggtgggtcgatcagaacaacaaggctaacgacgagagtgcgacgggccacgaccacggtacggcatcacggcgcggttgttccaacggctgtatggatgatggcgttcacggctgggcacttctccgaatgtgtggcgccgatggtcccccagaccaatcgagcccaagctctgacgtcgctgatcacgatcgcgatgtccaactgatccaattgtgtgacgtcgacggtcccccagacctatcgagtcatttacggccaaagacgaagtgcttgcttggcgatggtcccccagacctatcgtagcaacggcacgaacggtcgatcgaattgaccgaattttcagcttctgatcgcccgggaagtcggattgggtgaacagccatgccttcagcgctcgcaaaccggcctcttgcatcagtccatccgttgtcactctttggttgtcgaatgaattggcgaatcggaacacttcgtgaagcgatcgccctttttctgtcacccaaacaggaagaaaaggtttttggctcatcatcggcaccaagctttcgatcagttcttcgtactcgtcgtgtttgtcgtgcacgtacggtgggcatgtccaaaagaacttcacttgcgggaatcggcggcacaaattggcaatcatctcgtattgctccatcatcacttcaatggtttctccgcccaagagtgaatctcgtccgacaatgatcagtgcggccttcactttgctggagagcaccacgggcttcaggcttcgcactgtctccgccaatgttccattttttggcccgatcaccgccgtttgatccaagatttcggccaattggtgggctgtcgaatctccgattatgacacgtggcaaggcgatcagttttgtggccttgtgaatgattttggccctcaatttctccagcacccacggtgtctctcccatcgcttcttcccatttcttcttctcagaatcggccaaatgattgagtccgacgggttcgtccatgccgatgcgacacatacctccaattatttcgtgaaaatgtgttgaatatgctgaacgaagcgaggaaaaattctgatgaagaaagaatgagaagtaaaatttggtacgattcccagccgaaagtgacggctaacaaatttgaagcggggcaacgcgtaatggttgcctttcccggactgaatcgccgatctcggcacaagaaattgttgtggtctcatttcgggccttatcttatcctagaaattaacgaatcgtcggcatttttagtcccaattgacaacagaaatgctgagcccataaaagttccgattgagcgtctaattcgaattcctccaggaatcccggacatttcaacacttccaaaggggaaaaacccatttaaaaatgcgttaaaatcattaattgtcagcattttatcgagttttgaagtctgtgaatcagatggacaaatggcccattatgagcaattaggggcaattgctaatttaaagggtggcgaaggaatgattagaaaaatggaaaaggcggcgcaatcaagagaaattcccttttcagagatggaaattgacaacgaagatgaagcagaggacacgttcggttggaatgccaagtgtgacgtcggtcaaggcgaacatgaattttgtgccattctccgtgtcgcagaactcgatccagcgcttggaaatgctgaattgggctcaatcacagtgaagacaccactgcaggcacttttggcggtgttccttttgaaggccgggactgtcaaatcaatgacagccgcaagaagttttgtcaaatcgataattgaaggagcgccaaaagaggagctcagtctgttcgtgaccaaaaagggagactatgtggcgacaggacaatgcccaactgaagaagaccaaatgaaggcgctggagtgttggttcgaaaagtgctccgtggcaaagcatgctttggaagagagcggattcaaaaaaatcggcatggacgaacccgtcggactcaatcatttggccgattctgagaagaagaaatgggaagaagcgatgggagagacaccgtgagtgctggagaaattgagggccaaaatcattcacaaggccacaaaactgatcgccttgccacgtgtcataatcggagattcgacagcccaccaattggccgaaatcttggatcaaacggcggtgatcgggccaaaaaatggaacattggcggagacagtgcgaagcctgaagcccgtggtgctctccagcaaagtgaaggccgcactgatcattgtcggacgagattcactcttgngcggagaaaccattgaagtgatgatggagcaatacgagatgattgccatttgtgccgccgattccccgcagtgaaagtcttttgnacatgccccaccgtacgtgcacgacaancacgacgagtacgaagaactgatcgnaagcttgnntgcgatgatgagccaaaactttttcttcc

SEQ ID NO: 123 - DNA, 6297 bp, Heterodera glycines
ttaaaaaataaacaaaataaatatataaaatgttatataaatcattaaaatttagtaaaccttaacaacccttgtgctcaaaaatttctatgttattgacaattaaaaaatttatctatggaaacctgttcaatcttattatttagtcaattcttacggttgtttaaacgcatagttaaacatgtatttagtttctgtttggacttagacctgaatacccagattagttggccccgaaataacaagacccgtctaattttgtttaaactcataaaattttagaacccgtctaattttgtttaaactcataaaattttagaacccgtctaattttgtttaaactcataaaattttaagtcttgaacagaccgagccttgcaatgttataattataagttataaaatacatatgttggcattgttttcatgacttttcaaaagaaaaattttttttcaaaaaagggggctaccatcggcagtattaccgaatcggttttgcacaatgaggattttgtgaaaaagaatttccgacttttgttcgaattcgggtccgcgttcaaaactgattgaaattaaaatctcgaaaaaatctaaatttggtatacaagactaatttagaagagaaaaaagaaaatttattattttggacgaaaaaggggaatgcgccaaactatattgaaagaaaaataattatattcttgatttttttttgtgtgaaacaattatttttgataacatgccataagttaattttctgactccttgttttacctttctcaaaaaattgattcacccattcaagctcgttaaggttaacagcatgataaacattgcccatttgttagtaaatttcttcaattttcagaagcgaaatttgccgttttgccatgctgtgggtcgacctttcttggtagcacttgccggagctaaattttttttattaataaatggttattttttgctggtcaacataataaatttcatagaaacaaatactcaaaatgtcattttaaacagtgatcgaaaccatttttacatattttttaaatcaaagcaaattcaaaaaaaattactgaaaatccatttttttgtgttgaattatcaaaagatttacttttttcattttcctgctgcggttagttcataagtgacaaaagtcggtgcgccgtgacacgggcattttacttcagcggttataacatgccgtgtcgctgtatttttgactttgttaacttcgattttgatcaaagttttgtctgagcatgggcacgggcaaaggtactcttcaaccattctttttggatcactaaatatgaactgaaattattttgcccttccttccgagccgcccagcctggggtcctcttcaaagaggggggggggacagaaatcgaccacccgcccccttaaattaataattaccattatcgaagaaatcgtctgcccatttttgacaattgtaccatattacacaatagcccctcaacggcatgtcagcgtatacgtcattcagagtttggtgacatcgcaatttttttggttcgaacgattttgatgaagtttccgtactctcccaacctaaagtgttggattttcatttttggacaaaaaactagccaaaatccctaaaaatttccagtcacaaaaatccattattttcttaaaaatgagctccaaattaaaaaatggaaattttttctgttagttaacatatgtattgcactcaatttttaaaaaattttccggcggcgcttgttggcaccatcgtctcccactttttccaattgttaaaaatctgatgttttttgacggatcggattccgtaagattttggtgacacccctggtcaccacaaaaaaaattttacattgcgctctttccttttctgctgaattcatacgttacgtgagtttttttggcgcatgtcttgcacaagaatgtgaccacagcacaatggtgctttggagcaggcgcaatgggaagcatgtcatatgaggtgattcggattttgattgcggtttgatgttcgtagatatgacagaagtggtcattcctccaaccgccagagtgtgccaatgtgtcgggcttcaaagagccaccggagctgctactgctacttgaggagtgggaagacatttttgaacagaataattggcttaaaaagagtaatggttttacgaaatttttacaaaagcaatgagcaaaagaaaacccaattctcaagtaattttggatttaaaacgaccttttttaaatagccacctaaaagagacacgaaaaaaaggcatctaaaatgcatgaaaaggacaaaaagtagggatgtgcgagaagtgatttttactgggaaccgagaaataaccccggaaacgataagagatccaaaaaccgagaaatttctcgactcggaaatcgagaaatttaaatgaaaagaatccaaataaatcaaaaacacattaaaaatgaggtagatcaaagggaatttttgcgtagaagtctcagaagtctcaacattaaagtgacagcgttttttgctgttaaaaacgctttttgcacactttttacaaaaaaaaaacttgggaaacatgagggtccgacggtgccggtaggcgaggattctgatcgaaatttggggaacaaatgaataagcaaatcgtaattttcagtgcattcgtgattcaaacggctttttttgcggcatttttcaaaaaactttttttaggcttggggagtcagggtggcaacatgaagtttgggcaccagagggagggatttaaaaaaataaaacaaaataaatatataaaatgttatataaatcattaaaatttagtaaattttaacaacccttgtgctcaaaaatttctatgttattgaaaattaaaaaatttatctatggaaacctgttcaatcttattatttagtcaattcttacggttgtttaaacgcatagttaaacatgtatttagtttctgtttggacttagatctgaatacccagattagttggccccgaaataacaagaacccgtctaattttgtttaaactcataaaattttagaacccgtctaattttgtttaaactcataaaattttagaacccgtctaattttgtttaaactcataaaattttaagtcttgaacagaccgagccttgcaatgttataattataagttataaaatacatatgttggcattgttttcatgacttttcaaaagaaaaatttttttttcaaaaaagggggctaccatcggcagtattaccgaatcggttttgcacaatgaggattttatgaaaaagaatttccgacttttgttcgaattcgggtccgcgttcaaaactgattgaaattaaaatctcgaaaaaatctaaatttggtatacaagactaatttagaagagaaaaaatacaaaaaagaaaatttattattttggacgaaaaaggggaatgcgccaaactatattgaaagaaaaataattatattcttgatttttttttgtgtgaaacaattatttttgataacatgccataagttaattttctgactccttgttttacctttctcaaaaaattgattcacccattcaagctcgttaaggttaacagcatgataaacattgcccatttgttcgtaaatttcttcaattttcagaagcgaaatttgccgttttgccatgctgtgggtcgacctttcttggtagcacttgccggagctaaattttttttattaataaatggttattttttgctggtcaacataataaatttcatagaaacaaatactcaaaatgtcattttaaacagtgatcgaaaccatttttacatatttttttaaatcaaagcaaattcaaaaaaaaaaattactgaaaatccatttttttgtgttgaattatcaaaaggtttacttttttcattttcctgctgcggttagttcataagtgacaaaagtcggtgcgccgtgacacgggcattttacttcagcggttataacatgccgtgtcgctgtatttttgactttgttaacttcgattttgatcaaagttgtttgagcatgggcacgggcaaaggtactcttcaaccattctttttggatcactaaatatgaactgaaattattttgcccttccttccgagccgcccagcctggggtcctcttcaaagaggggggggggggggacagaaatcgaccacccgcccccttaaattaataattaccattatcgaagaaatcgtctgcccatttttgacaattgtaccatattacacaatagcccctcaacggcatgtcagcgtatacgtcattcagagtttggtgacatcgcaattttttggttcgaacgattttgatgaagtttccgtactctcccaacctaaagtgttggatttcatttttggacaaaaaactagccaaaatccctaaaaatctcccgttacaaaaatccattattttcttaaaaatgagctccaaattaaaaaatggaaattttttctgttagttaacatatgtattgcactcaatttttaaaaaattttccggcggcgcttgttggcaccatcgtctcccactttttccaattgttaaaaatctgatgttttttgacggatcggattccgtaagattttggtgacacccctggtcacctcaaaaaaaaatttaaatgtttacattgcgctctttccttttctgctgaattcgtacgttacgtgagttttttggcgcatgtcttgcacaagaatgtgaccacagcacaatggtgctttggagcaggcgcaatgggaagcatgtcatatgaggtgattcggattttgattgcggtttgatgttcgtagatatgacagaagtggtcattcctccaaccgccagagtgtgccaatgtgtcgggcttcaaagagccaccggagctgctactgctacttgaaaagtgggaagacattttttaacagaataattggcttaaaaagagtaatggttttacgcaaatttttataaaagcaatgagcaaaagaaaacccaattctcaagtaattttagatttaaaacgacctttttttaaatagccacctaaaagagacacgaaaaaaggcatctaaaatgcatgaaaaggacaaaaagtagggatgtgcgagaagtgatttttactgggaaccgagaaataaccccggaaacgataagagatccaaaaaccgagaaatttctcgactcggaaatcgagaaatttaaatgaaaagaatccaaataaatcaaaaacacattaaaaatggggtaaatcaaagggaatttttgcgtagaagtctcagaagtctcaacattaaagtgacggcgttttttgctgttaaaaacgctttttgcatactttttacaaaaaaaacttgggaaacatgaggatccgacggtgccggtaggcgaggattctgatcgaaatttggggaacaaatgaataagcaaatcgtaattttcagtgcattcgtgattcaaacggctttttttgcggcatttttcaaaaaactttttttaggcttggggagtcagggtgcatgaagtttggcaacatgaagtttgggcaccagagggagggatttaaaaaaataaaacaaaataaatatataaaatgttatataaatcattaaaatttagtaaattttaacaacccttgtgctcaaaaatttctatgttattgaaaattaaaaaatttatttatggaaacctgttcaatcttattatttagtcaattcttacggttgtttaaacgcatagttaaacatgtatttagtttctgtttggacttagacctgaatacccagattagttggccccgaaataacaagaacccgtctaattttgtttaaactcataaaattttagaacccgtctaattttgtttaaactcataaaattttaagtcttgaacagaccgagccttgcaatgttataattataagttataaaatacatatgttggcattgatatagaatgaatggtaatgaactaatgagtttagcaaaataagcatgcttaatcgagtgaatattcgttaaaaaattttctattcctaacttgattcgacttgataacagattttcaccaaaaaggccaatttttgcatgacaaattttaggtcaacttttgaaatctggggaattttgtggcacggcgcgctgaagacgccgaccggaaaatttttaaaaatgtgtgtccagggctattctgggtcgctgatcaagaatacgacatccatttcgatcaatttcgaacccatgacccgaattcgaacaaaagtcgaaaattcattttcaccaaaa

SEQ ID NO: 124 - DNA, 7367 bp, Heterodera glycines
  unsure (1)..(7367): unsure at all n locations
cattaaaatttagtaaattttaacaaccctntgtgctcaaaaatttctatgttattgaaaattaaaaaatttatctatggaaacctgttcaatcttattatttagtcaattcttacggttgtttaaacgcatagttaaacatgtatttagtttctgtttggacttagacctgaatacccagattagttggccccgaaataacaagaacccgtctaattttgtttaaactcataaaattttagacccgtctaattttgtttaaactcataaaattttagaacccgtctaattttgtttaaactcataaaattttagaacccgtctaattttgtttaaactcataaaattttaagtcttgaacagaccgagccttgcaatgttataattataagttataaaatacatatgttggcattgttttcatgacttttcaaaagaaaattttttttttcaaaaaagggggctaccatcggcagtattaccgaatcggttttgcacaatgaggattttgtgaaaaagaatttccgacttttgttcgaattcgggtccgcgttcaaaactgattgaaattaaaatctcgaaaaaatctaaatttggtatacaagactaatttagaagagaaaaaatacaaaaaagaaaatttattattttggacgaaaaaggggaatgcgccaaactatattgaaagaaaaataattatattcttgatttttttttgtgtgaaacaattatttttgataacatgccataagttaattttctgactccttgttttacctttctcaaaaaattgattcacccattcaagctcgttaaggttaacagcatgataaacattgcccatttgttcgtaaatttcttcaattttcagaagcgaaatttgccgttttgccatgctgtgggtcgacctttcttggtagcacttgccggagctaaattttttttattaataaatggttattttttgctggtcaacataataaatttcatagaaacaaatactcaaaatgtcattttaaacagtgatcgaaaccatttttacatatttttttaaatcaaagcaaattcaaaaaaaaaattactgaaaatccatttttttgtgttgaattatcaaaaggtttacttttttcattttcctgctgcggttagttcataagtgacaaaagtcggtgcgccgtgacacgggcattttacttcagcggttataacatgccgtgtcgctgtatttttgactttgttaacttcgattttgatcaaagttgtttgagcatgggcacgggcaaaggtactcttcaaccattctttttggatcactaaatatgaactgaaattattttgcccttccttccgagccgcccagcctggggtcctcttcaaagagggggggggacagaaatcgaccacccgcccccttaaattaataattaccattatcgaagaaatcgtctgcccatttttgacaattgtaccatattacacaatagcccctcaacggcatgtcagcgtatacgtcattcagagtttggtgacatcgcaatttttttggttcgaacgattttgatgaagtttccgtactctcccaacctaaagtgttggatttcatttttggacaaaaaactagccaaaatccctaaaaatttcccgtcacaaaaatccattattttcttaaaaatgagctccaaattaaaaaatggaaattttttctgttagttaacatatgtattgcactcaatttttaaaaaattttccggcggcgcttgttggcaccatcgtctcccactttttccaattgttaaaaatctgatgttttttgacggatcggattccgtaagattttggtgacacccctggtcaccacaaaaaaaatttaaatgtttacattgcgctctttccttttctgctgaattcatacgttacgtgagtttttttggcgcatgtcttgcacaagaatgtgaccacagcacaatggtgctttggagcaggcgcaatgggaagcatgtcatatgaggtgattcggattttgattgcggtttgatgttcgtagatatgacagaagtggtcattcctccaaccgccagagtgtgccaatgtgtcgggcttcaaagagccaccggagctgctactgctacttgaggagtgggaagacatttttgaacagaataattggcttaaaaagagtaatggttttacgcaaatttttacaaaagcaatgagcaaaagaaaacccaattctcaagtaattttggatttaaaacgaccttttttaaatagccacctaaaagagacacgaaaaaaaggcatctaaaatgcatgaaaaggacaaaaagtagggatgtgcgagaagtgatttttactgggaaccgagaaataaccccggaaacgataagagatccaaaaaccgataaatttctcgactcggaaagcgagaaatttaaatgaaaagaatccaaataaatcaaaaacacattaaaaatgaggtagatcaaagggaatttttgcgtagaagtctcataagtctcaacattaaagtgacggcgttttttgctgttaaaaacgctttttgcacactttttacaaaaaaaaacttgggaaacatgagggtccgacggtgccggtaggcgaggattctgatcgaaatttggggaacaaatgaataagcaaatcgtaattttcagtgcattcgtgattcaaacggctttttttgcggcatttttcaaaaaactttttttaggcttggggagtcagggtggcaacatgaagtttgggcaccagagggagggatttaaaaaaataaaacaaaataaatatataaaatgttatataaatcattaaaatttagtaaattttaacaacccttgtgctcaaaaatttctatgttattgaaaattaaaaaatttatctatggaaacctgttcaatcttattatttagtcaattcttacggttgtttaaacgcatagttaaacatgtatttagtttctgtttggacttagacctgaatacccagattagttggccccgaaataacaagaacccgtctaattttgtttaaactcataaaattttagaacccgtctaattttgtttaaactcataaaattttagaacccgtctaattttgtttaaactcataaaattttaagtcttgaacagaccgagccttgcaatgttataattataagttataaaatacatatgttggcattgttttcatgacttttcaaaagaaaaatttttttttcaaaaaagggggctaccatcggcagtattaccgaatcggttttgcacaatgaggattttgtgaaaaagaatttccgacttttgttcgaattcgggtccgcgttcaaaactgattgaaattaaaatctcgaaaaaatctaaatttggtatacaagactaatttagaagagaaaaaatacaaaaaagaaaatttattattttggacgaaaaaggggaatgcgccaaactatattgaaagaaaaataattatattcttgatttttttttgtgtgaaacaattatttttgataacatgccataagttaattttctgactccttgttttacctttctcaaaaaattgattcacccattcaagctcgttaaggttaacagcatgataaacattgcccatttgttcgtaaatttcttcaattttcagaagcgaaatttgccgttttgccatgctgtgggtcgacctttcttggtagcacttgccggagctaaattttttattaataaatggttattttttgctggtcaacataataaatttcatagaaacaaatactcaaaatgtcattttaaacagtgatcgaaaccatttttacatatttttttaaatcaaagcgaattcaaaaaaaaatttactgaaaatccatttttttgtgttgaaattatcaaaaggtttacttttttcattttcctgctgcggttagttcataagtgacaaaagtcggtgcgccgtgacacgggcattttacttcagcggttataacatgccgtgtcgctgtatttttgactttgttaacttcgattttgatcaaagttgtttgagcatgggcacgggcaaaggtactcttcaaccattctttttggatcactaaatatgaactgaaattattttgcccttccttccgagccgcccagcctggggtcctcttcaaagaggggggggacagaaatcgaccacccgcccccttaaattaataattaccattatcgaagaaatcgtctgcccatttttgacaattgtaccatattacacaatagcccctcaacggcatgtcagcgtatacgtcattcagagtttggtgacatcgcaatttttttggttcgaacgattttgatgaagtttccgtactctcccaacctaaagtgttggattttcatttttggacaaaaaactagccaaaatccctaaaaatttccagtcacaaaaatccattattttcttaaaaatgagctccaaattaaaaaatggaaattttttctgttagttaacatatgtattgcactcaatttttaaaaaattttccggcggcgcttgttggcaccatcgtctcccactttttccaattgttaaaaatctgatgttttttgacggatcggattccgtaagattttggtgacacccctggtcaccacaaaaaaaatttaaatgtttacattgcgctctttccttttctgctgaattcatacgttacgtgagtttttttggcgcatgtcttgcacaagaatgtgaccacaacacaatggtgctttggagcaggcgcaatgggaagcatgtcatatgaggtgattcggattttgattgcggtttgatgttcgtagatatgacagaagtggtcattcctccaaccgccagagtgtgccaatgtgtcgggcttcaaagagccaccggagctgctactgctacttgaggagtgggaagacatttttgaacagaataattggcttaaaaagagtaatggttttacgcaaatttttataaaagcaatgagcaaaagaaaacccaattctcaagtaattttggatttaaaacgactttttttaaatagccacctaaaagagacacgaaaaaaggcatctaaaatgcatgaaaaggacaaaaagtagggatgtgcgagaagtgatttttactgggaaccgagaaataaccccggaaacgataagagatccaaaaaccgagaaatttctcgactcggaaatcgagaaatttaaatgaaaagaatccaaataaatcaaaaacacattaaaaatggggtagatcaaagggaatttttgcgtagaagtctcagaagtctcaacattaaagtgacagcgttttttgctgttaaaaacgctttttgcacactttttacaaaaaaaaaacttgggaaacatgagggtccgacggtgcaggtaggcgaggattctgatcgaaatttggggaacaaatgaataagcaaatcgtaattttcagtgcattcgtgattcaaacggctttttttgcggcatttttcaaaaaactttttttaggcttggggagtcagggtggcaacatgaagtttgggcaccgggaagtttgggcaccagaaggagggatttaaaaaaataaaacaaaataaatatataaaatgttatataaatcattaaaatttagtaaattttaacaacccttgtgctcaaaaatttctatgttattgaaaattaaaaaatttatctatggaaacctgttcaatcttattatttagtcaattcttacggttgtttaaacgcatagttaaacatgtatttagtttctgtttggacttagacctgaatacccagattagttggccccgaaataacaagaacccgtctaattttgtttaaactcataaaattttagaacccgtctaattttgtttaaactcataaaattttagaacccgtctaattttgtttaaactcataaaattttaagtcttgaacagaccgagccttgcaatgttataattataagttataaaatacatatgttggcattgatatagaatgaatggtaatgaactaatgagtttagcaaaataagcatgcttaatcgagtgaatattcgttaaaaaattttctattcctaacttgattcgacttgataacagattttcaccaaaaaggccaatttttgcatgacaaattttaggtcaacttttgaaatctggggaattttgtggcacggcgcgctgaagacgccgaccggaaaatttttaaaaatgtgtgtccagggctattctgggtcgctgatcaagaatacgacatccatttcgatcaatttcgaacccatgacccgaattcgaacaaaagtcgaaaattcatttttcaccaaaatccggactcgattcgaacaaaaagtcggaaaattcaaaaaatttcgaaattaacttttatgttctgatctgtgcagagtgattattttttggtgttgtaatggtttgtaattaatttttgcttgttttaatctattttagaaaaaaatttctaattttttaaattttcgactttttgttcgagttctacttccggattacaatataagtcgaaatcgacgccggatcgtgatcagcgaccctgaaaagccttggaaacatgttttcatgacttttcaaaagaaaaaattttttttcaaaaaagggggctaccatcggcagtattaccgaatcggttttgcacaatgaggattttgtgaaaaagaatttccgacttttgttcgaattcgggtccgcgttcaaaactgattgaaattaaaatctcgaaaatatctaaatttggtataaaagactaatttagaagagaaaaaatacaaaaaagaaaatttattattttggacgaaaattgcgtaaaaaccgaaaattttcgaaaagtagcatcaaatgaatattttgaatttcactgatttgaggccaaaatagccgatttgatagagggggccatcttaatagaggattttttttgaaaaaatgcccaaatatgcacataatatgcatataaattgctaaatatgcacaaatatttaaaaaatgcatattcaatgtcctcaaaccaaagctaaaactcgtttttcgtgtgcattaggtcgtaggaagttagtaaaaaagtcataagcctcaaaattcgggacctaatcatgaaaaaagttaaataagttttgaaatttttggccaataaaatgatcagtaaagggagagagagagagaggggagagagagaaatagagaaagaaaaccgatttggagagatgaagtgaagtataaaagaaagtgatcagctctagtgatcacccatccaagttagagatcatgctttccttttttataaattanatttgatagtgccatgccgccatttcta

SEQ ID NO: 125 - DNA, 1928 bp, Heterodera glycines
  unsure (1)..(1928): unsure at all n locations
acgtcaagcgttacatcaacttgtcaatagagctgtacaaaatgcggaaaagcaaagcggacgctctgtttcaaaataggaataatgtggctgggaaaaggattanccgatccggttagtgctgcctttgagccctccagcacaaancaatatgacgttgtaaatgnccgagatggacaaactgnnccaaagcgagggagacgaaggaggcgttaccaaaaaaaactttgctactcagcgagccggtggagatcatcgttacatgtttaactattccggcaggatcggcaccacaattctttccacatcagaattggggctacaatcaaacgcaaataattcatatatccaaccgagacaactattgtctctttcatgctcttgctgcaggccgagcttatcatgattatgaaatttttcgctccattcgcagtccaccagataaccaagctccactttttgcagctataaagaatagaacagacttttgcaaggattatgaagcgtataaccgtctattatcaaacagcgggcgaatggaatctgtagttgaagatctgatgaagaactcaggcatcattattggccaagattcttatggaattgaccatctgctacctgttcagcaatactgggtaatttttgtctacaatttcaattttttactaatgaaaatatatgagtgtgcttcaggatagcgtttttcctggaatgtatcgtatagtgttatttgaagaccggccagaagagttaccccggcccttatggaaaggagcagggggacatcgttttaacgtcacgctttttctctctaacaaccattacgatgtgatcaaaaagattcactgtttcttcaaacttggtcggaaatactgcgttgactgcgaatgtacgtacactgttgatgctaaacatacaatgagttgtaagagcaagtgtcctcaatgttctaaaggtttgcttatttgtgaacatttttaaatgactgatattttagttggacctcaacatccttgcccgagacaggacggcgttcgtattttttgctcagaatgtaaccgtttctttttctcgtcgccgtgttataatggccatcttggtctagcatgcaaactctataacggtgttcgctctgtaatagggtttatcgctctgataatggtcagcggcacaaatgtgacacaagctactgcaaaagatgcaaggtttaaatggtcaaatcgaagtaaatatattatataataaagaatattcaggtttatcatgacaaaaaggcgagctgttttattaaaaagatcaaaatgtctgaggaagaaccgagctatcggattgttgtctgggacacagaaaccagacttgaaaaacttgaggacgaagggcagcatatacatgtggtcaactttctttcagcacgcattacttgtaccgattgctgtgacgcatcagtgttagaagcagattgtgaaatttgttgccagagcgacgggacgcttgaacgagccaaagaatggttgagcaaattgaggaaattttaatattttaccaaaattcaaataggagtgaagcagatggcgatgatcaacctgttgccgcctttgtcgaatggattttaagggcgtggaataagcaatacaaaacatacatatgggtggggtgaaaaaaagttacttttaaaaatttgtaaattattaggctcataacgcctcaagatttgatggccattttgcgttaaattatctatgcaaaaccgttaggcgccctgatgtcgttatgaatggactcagaatataacgagtttcgtgtttgacacagtccaaagcattcaatcttgatcctggcgtgactccatgtctgaatatgccgattgcgctcgcttgattttaaaaaagaatttcaaccttgacttgagaagacaacaccgatcttcc

SEQ ID NO: 126 - DNA, 9056 bp, Heterodera glycines
agctcgttgacggaaagtcgtgtcaagagctgaatgaaatgacgcaagaccgacttcgtcaacttcgcgagctgacgcggatgggcgcagtctacaagttgaagaaatttgggaatgtgaaataaacgaccagctcaagagaaaccatgaaatgaaagtgttttttgatgacttggcaaacgaacgtggccctttagaccctagacttgcatatagcggtggacgcacgggtccattacgactttttgctgaaccgtccgcggatgaaaagatttccgtcttcgacattgtctcgttatacccgtgggtcaactacgacacggcttatccaattggtgttcctaccattgttcgtcctagcgctgaggagatgattgtcaactggaccaaacctgagcatctaagctaccgtggtctttatcgtgtgcgtgtcatccctcctcgtggtctacgaataccagttctaccgatgaagattgatgagagactgctgttcagctgttgtcatcgatgtgcggctttgtttcgtaaaagtgtgacacgctgtgcacacaaatgcgaacattcggaacagcagagagccttcactggaaatttcactcatattgaattggaaaaagcgttggaaatgggctacgtcatcgatcgattttggagagcatggcattatgatgaatggagtgatcaggtgttcaaaggatatgttcgccaattcatcaggcttaaggttaatcgttccaggaaatatttcattccaaattattttgacaggtggaatcaagcggatttccagatggtgtggaaacgttagaagaaaagcatcaatatatccgcgagtaccggcgcatatacggagttgatttagaatttgggagtattaaaaagaatccaggactatgattcatcgcaaaattaatgcttaatagtctatggtcagtttaaaaaatttttgtttggcattttagcttatatttttcaggggaaaattcagcatgagaaatcagcttggctcgaacaaagtgataacgagaccgcaggagttttatgatctagtgctaaaccatagaatggtttggttttttctacatatattgagttatttttgaaaattaaggaaatatcgtcaataatccccatatccgatgcagctattcgagtgctgtataagccgaagaaaaacttcatcgtagaacatacatcaagcaatattgtcctaagcctttggacaacgagtcgagctaggctgaaactgcttgactatatgctgcaatgttataatacaccgggcaccgagttactatacactgacacagacagtgtaattgttcggcataagcgagaccttgttccagttcacacgggcgagtatttgggtcaaatgagcgaagaatacgccgattacgacattttaacttttgcatgtggcggagcgaaacaatatgcaatgaaaatggtgcataaacagacaaaagcagttaaatttgtgcagaagatccgaggcattactttcgacgtcaacaattctcaggagcttcagtttgatcattttgtacgcaaagtgatcaactacggaaaagaggaggagcaggaaaatgcagcaaccttcaattataataaaatacagccgacaaaggataatcgaattataactcggaaacaaaataaaaagtatttacctatctgccagaaaggcattattagtcaaacccttgaggttttaccatttggatatgaatgattttttgaatgtataaattttcaatttacaataaatttatttatttgtataatattaaaaaaaacaacaacaaactagttaaacagtttcatcttgcatagctaacgaagatattttcaaaagttcaagtgggaaataactttgatggccgttgccgccatcttgtacaacacatgggaggttgggaaattttagacggacacgatgcttagcgtataaatgttgctctaccgtgacaccaagcataccacgataggcgtacatacgattagcaccaaaaagagtaaatgattccggataaatttgtaaattctgtcgaagatgtacagtttcgattttccgatcgcctataaatttgatattttccttcttccttcttcgaagcatcatggcgagatattccggtctacatttattaaacaagcatagctctttcaccaagctccttctgcgatgtcgtcgtcttcgtcgtgccaatccagctcgtcgacgaccaagttgcgctgatccttccgatgtccgaagtgtgacagacatttccgcaaatcgcccggacaaaccatcagatccttcaattccacatacagaggttcgctcctgaataaataaaaatgattaaattgacatttgaataataattaaaatttttaccaatcgatcccctgtctcttcttgggataacatgttgaaaagaacagatctcctatcagatcaagtgttccttctacaacaacaggctgattttcgtactcttcgttcacaaggtgcacacaaggaactgattgcaagggatttggaaaatagttggacggttcagagtctatttcggatttgaacagagcataaagctgagctatatcatctaacgcataatagtcaataaaatattttattgcacgctgcatatacgtttcgggtagaaataaagtcagatggatagaatagtcgccttaaatactcctttctctgaccgttgttggcctgtacactaaatctttcggattatccgaaaagatttccagttccatttggtcaaacatgccaacatcttcggatgaagttttactgctgctgctggtacgacgaatttgtcttattacatatgcgcaaatgacgaccagcagtacgtcaaatgtataagcagaccataacaataatttgatttgaggcgttggcgagctggcttgaagtatattaattacatcgtcgcgatattctttaaataataaaaagttaaatttcgtgtcactgatgttggacacaaattttgggttgatttgaccgtcattaattccatatttgtaaatacgacggtccgatcgaatcagatacaccttgttatctattattatgaaatcagttttatcctgtggtaacatgcatacaaaattcagctttagcagcgtaaaatttgtcggattcttatttgtccacaaccgctcgagatagcttagttcaatttcactgatctgacgttcgtacttatcagatatgtataaacgctcggtcatatagtcaaacattggtctgtttgcgttggccaaaaatttcttaacaattttttgctcatgcccacgataaaggtgcatttcgtccgcctcacggtcctcaaaaaacacatagctcttgccattatactcaaagcatgccattggttcaagttttcgaatgctttcgaaatgtactggactagaacgaactagtttgttaaagttctgaaaacttattctccattggctgttgttatttttacttgcaagacatgcgtttttttttgctgtatccaaaaactagctgatcacctgtgtttttggaaaaagtcctaaaattgttgtcaaaataattaggatgatcaaccgtcacttcaactgtaaaaaattcccctttcgcgccgttgttataacaacaaatggtgaaaagcaggagaaaaaatatactcatggctggaaacaaatttattcaactttgagtgccttttatacacgtaaaagcgcctgaacaaacccctttactagtaaatctgcaatagtacgtgtacgataaagattgaccatcacctcacaatacgggacgccagagcaacgagcgactaaaaaataaatgcaaaaatgcccgcaagtgtctgctgttgatgattgaatttgacgcttattaatttgaatgtgcctaaaattttttaaatacgctcccaaatcctcgttcggtgcattgcctaagctgtcaaaatactcaacccttgtagcgttaagagcgaagcaggcgacccaatgttcgccctgtgttccctctttgtctgtatttattatcatacaatgggggtattttcttctccactttggatgtggaattttatcagatgggaagacgccaatgaatttattcttggttgaatgtacgcctttgagaattgctgttagctgaaccgaattcattattacacacttccgtcagtgctcaacacgcggtcggcgttaatggaaaggactgagtcgaattcacctaatataagcatttcataaccgtccgcctttataggctgctcaaattgcacttttacggtgcaagtaccttgtctgattaactcaaaaccaggcgtatcatccaacgtggatgtcattgggattacgaaaaatgcccagccactgaggaatcgtgccatcgaaatggacactgttttgttgtccgaatcgtcaaggccaaggcctgcatacatgtctacaaatgctcgtacaaaccttttctgattgccaaacgagaatagataaggcgtgcttggaaatgtcagcccatttgcttcggcgctgattgaacgtacattcgcgtgctcaaaattgaacggcgacaaatgccgggcgcctgaatatgcgtccgtagacacaaacgcacatattagacgacgtggtagagttgaggtgaacacgttgtgtgatagctcagtacgacccatgcctaagaagatggaacgcatctctaccttacgaagcgcatatttggccggcgtgctttccaactgtctactaatcgcaatattaaggcttgaagttacgtctacagtgcgtacgtaaagtcttatatcatgtagacggatacggtattcggctgtgttatcatgccatgtcacacgcgctgctgtaattatattaccttgtgcatctttgaccgcatctgtaacggttttccattttggtgtaagcagaaggaaaggatcgctgttccgatggattgtgaacacaacatcctgattgttcagcaaaagtgtgttttgacgagccaaatcaaagttgagttttaccattgtttcgcactgttttccgtttgagaatcgctgtgctcggctggtaaaacctttgtttgagtagctatcctgactgttttcatccggataatagcagccagcctcgtgaaatgctttgcgaatctcatgtgaatagccaagctcctgcattatgtacgcacgatagtgatagtatattgagctatcaaacacttcgacaccagaaatgttgactttcaatgatcgaacaaaactgcttccaaaattttgaataacacctacatgtttgtcctcttcaatcgcatcgtcggtcggcacccattctccggcggcattcttacgctctatcgaagttagcagatacatgtacgttttgctaagatcacaatattgactatcggaaaacagacgaaaaagatagggtcctgtctggttgagagcggacaatggtaaaagctcccgaacgctcgttttattaatagccacatttgtcggtggaaggttaaacaatgatagactaccttcaagaccttcaacactatctttgtcaatttttttgataatactcatgattaatcaataaggaatatttagtactgctatatgatgatgatgagttcctaaatgtatgattttgcaaaattctttacctatttatagactttcgcgttcaaggtgtcaaggggagcttaactgatccatgattttgttccgtcggcgtttaacagtcccaattctgccaataatagaatcactggagctgatgccactagcttttttaacctttgacactcgttgtcctcttctaccatcggcaccataatttccacctttcccacattgttgtaattttcctgccaggttttcgaaaccttgcttagcatgcgtttcaagagattctttcaatgctttaccttgggacaaatcgccaagaacgcgtgttcctgcagcaattccctccttcgaagcactggagagtagatttgatgccactggcatcaaaaatcgggctacattttgcagaagaccgcctccgcgttggtaacgtgtaccaacaaaatactgctgttcgcctcttccttcttgctgcgaggctagaaatgttgaccattcaatggagtcagggttgaaaaagacatgagtcattttaaaatagttttcgtttaaaatgaagtgttagaacgcaattaccccagttaaatttaatgtaacgtccaaacgctgtttgaatttcgattttgatttcggaaattcgtttgttctgtatcggtttaaaaaactcattggtatatataacctctggcacgtccagaggaactgtgcctgacacgttgacaacgcgcaacaatggagccatacggtctccaataattgtatcttccaccaactttggtgcataaacatacaattgccttacaccacccgacagatctggtaagtatttggccggatgattatagtacaatcgagtgttctcaaatccgagtacatatgcaagatggctactcgcatcaacatgttgtactccactacctatgttaatgtaaaatctttgagttatctcattgaaaagaaattctactgctttcctttgctgtttctgatgacccatgagcattttcatcctgtcagacacagaagttactccttttttatcacctcctctccccttggcagaaagcgcttgaggatcaggcagatctgggagctcatctacatcataaggctccgatttcggcatatcttcttcgagaacagtagaagcaagctgttcttctgacaattcattgacaatagtatctctgctatcatcgtcattatatgaaggaaaatctgatggtaccatttgtattgttttttgctcattatcccctgtcattggtagttttttaatttggaccgttaacaatccttcttcacctttggtcgttaccgatggttcgttttgggcaataaatgatgatgatgatgatgacgatgaataattatcttcaatctcatattggttagatggaaatacttccccttttttatcggtaacgataaccaaaattgtctcttcatctttttggccatcgggctgctcaaacggctcctcgtttcctttcaatattttttgtttagcttgatccggcgaccatttctctgtctcctccgtttcactctcttctattccatattctgtagatggaaattcattaatggcggtatcatccttggtttcaattttttcttcttccaattttccttcctttttcttcaatacatatgatacctctgcctgttgttccgttcgttccggctgcttctcagagctgtcgtcaatttcatattcggaggagggaaattcggtttccgtgttctcagcagtggtgttaatatcatgctgacttttttcccgctccagttcctttaagacttgaggaatttcctttactagcttcttttcttgttgtatattaatcgccgcaccttttttggcttcttcttcttccttctctttgactgcaacagtgaatttgtcatttaattcatgcattttattattcaactgttttatttccagtgaatagtttagtataacttcaaacgcattttttgcagcttcgattagctttcgcgcttctgtcaaatttttcattcgataaggtttatcaaattgctgcttagcgtttattacctttgacggttcatttcctaccttttttgccaattcgtctatcttcttatctaattcaacaatttggtcaagccaatcgtagaattgagggacacctgaatatgtgttaagcctaccttctgcaacgcctctattatgttttgagttggcaactagtgtgcgaatatattcagcttttaaggctgcattctgtgctgtttggtcaatttctttttttgctttttctaacaaattgtcttcttgcgtagactgttgttttaccataggttccagctctttgtccgctttttttgggctttcaggctccaattctttttccggtggttttactggttctcgttccatttctttttctacggttggctttgtaggttcgcgtttcgtttcagtttcatcagacagttttggaactggtggcttgattatgcttccaacttccttttctacggttggcttcagcttttccatttgtttttcttgctgctgtttcggttgcccggcagggagctgagggtcttcgaccggccttggaaccgttaattctgcatttaaaaaattgttcactgccgtcactacacgatttgcaagctcattcacgccaagctgatcctcaggtactgtgctaaaatacatgggtgtaagctgagcaatgtagtttttcgagtttttaagagcttgttttgacatatctgcgtgtttacggcattcattcaagttcttggaatcataatgtacatctaatttccgttttgcttcggccgcctttttcgactcttgtgaaatcttttccacaagttcacgcaaattattctccatatttgatagactgtcgaaccatttctttacatgtggagcattaggtgcccgtttgcgggcttgttcagctcggttgagggctgttttagccttttccgcgatatcggctgcattagcagccaatttaacggtctctttccacgattgttccgttactcgtttggctaagtccatgcgctcttggtctatcgtagatatttcaccatgttcaacaatgggagtggcttgcagctgttccttttgcggtttttcaccttctaattcacccaattgtttgtcagaaagttgcgctggtcctgtttcacgtcctatttccttctccaatggttttggctcatctccacgtggtagttcaatgtcatgtgttgctggtaaaggcgcttcacgtatcagttccttatccaatgttttagatgaaggcacttcacgtgtcagttccttatccggttctcgtcgcgtttctggttgcaattctttgtctgcagaagcagccgccgctctcttttacggtttttcttttggaaactttacatcataggccgattgaa

SEQ ID NO: 127 - DNA, 6852 bp, Heterodera glycines
tttatggaacgtccaacgctgtttgaatttcgattttgttctcggaaattcgtttgttctgtatcggtttaaaaaactcattggtatatataacctctggcacgtccagaggaactgtgcctgacacgttcacaacgcgcaacaatggagccatacggtctccaataattgtatcttccaccaactttggtgcataaacatacaattgccttacaccacccgacagatctggtaagtatttggccggatgattatagtacagtcgagtgttctcaaatccgagtacatatgcaagatggctactcgcatcaacatgttgtactccactacctatgttaatgtaaaatctttgagttatctcattgaaaagaaattctactgctttcctttgctgtttctgatgacccataagcattttcaccctgtcagacacagaagttactccttttttatcacctcctctccccttggcagaaagcgcttgaggatcaggcagatctgggagctcatctacatcataaggctccgatttcggcatatcttcttcgggaacagtataagcaagctgttcttctgacaattcattgacagtagtatctctgctatcatcgtcattatatgaaggaaaatctgatggtaccatttgtattgtttttttgctcattatcccctgtcattggtagttttttaatttggaccgttaacaatccttcttcatctttggtcgttaccgatgcttcgttttgggcaataaatgatgatgatgatgatgacgatggataattatcttcaatctcatattggttagatggaaattcttctccttttttatcggtaccgataaccaaaattgtctcttcatctttttggtcatcgggctgctcaaacggctcctctttccctttcaatattttttgtttggcttgatccggcgaccatttctctgtctcctccgtttcactctcttctattccatattctgtagttggaaattcattaatggtggtatcatccttggtttcaattttttcttcttccaattttccttcctttttcttcaatacatatgatacctctgcctgttgttccgctcgttccggctgcttctcagagctgtcgtcaatttcatattcggaggagggaaattcggtttccgtgttctcagcagtggtgttaatatcatgctgacttttttcccgctccagttcctttaagacttgaggaatttccttttctagcttcttttcttgttgtatattaatcgccgcaccttctttggcttcttcttccttctctttgactgcaacagtgaatttgtcatttaattcatgcattttattattcaactgttttatttccagtgaatagtttagtataacttcaaacgcattttttgcagcttcgattagctttcgcgcttctgtcaaatttttcattcgataaggtttatcaaattgttgcttagcgtttattacctttgacggttcatttcctaccttttttgccaattcgtctatcttcttatctaattcaacaatttggtcaagccattcgttgaattgagggacacctgaatatgtgttaagcctaccttctgcaacgcctctattatgttttgagttggcaactagtgtgcgaatatattcagcttttagggctgcattctgtgctgtttggtctatttccttttttgctttttctaacaaattgtcttcttgcgttgactgttgttttaccataggttccagctctttgtccgctttttttgggctttcacgctccaattccttttccggtggttttactggttctcgttccatttctttttctacggttggctttgtaggttcgcgtttcgtttctttttcatcagacagttttggaactggtggcttgattatgcttccaacttccttttctacggttggcttcagcttttccatttgtttttcttgctgctgtttcggttgcccggcagggagctgagggtcttcgaccggccttggaaccgttaattctgcatttaaaaaattgttcactgctgtcactacacgatttgcaagctcattcacgccaagctgatcctcaggtactgtgctaaaatacatgggtgtaagctgagcaatgtagtttttcgagtttttaagagcttgttttgacatatctgcatgtttacggcattcattcaagttcttggaatcataatgtacatctaatttccgttttgcttcggcagcctttttcgactctgtgaaaatcttttccacaagttcacgcaaattattctccatatttgatagactgtcgaaccatttctttacatgtggagcattaggtgcccgttagcgggcttgttcagctcggttgagggctgttttagccttttccgcgatatcggctgcattagcagccaatttaacggtctctttccacgattgttccgttactcgtttggctaagtccatgcgctcttggtatatcgtagatatttcaccatgatcaacaatgggagtgggtggcagttgttccttttgcggtttttcaccttctaattcacccaattgtttgtcagaaagttgcgctggtcctgtttcacgtcctagttccttctctgatggttttggctcatctccacgtggtagttcaatgtcatgtgttgctggtaaaggcgcttcacgtatcagttccttatccaatgttttagatgaaggcacttcacgtgacagttccttatccggttctcgtcgcgtttctggttccaattctttgtctgcagaagcagccgccgctctttttacccttttttcttttggaaactttacatcataggccgattgaataatgctgttcaatgatttttgcatatgctctacgctgtgaaactgtatgcctggaatttttaccttcagagttacagtagtcggacctgtaccgtctgatttatagtcgggattgagaagttttatgttgacaaagtcgtcctcatccacccctacggaagggaacgagtgtggatagatgatggaggaaagtgcaacggaccagtttgagtctagctctagggtgtgtggtagtcttacggtaaaatgggatgctgtatttcccggaaagggaacatttaatggtagtacaatataaaaatcatccatgcctaacgaacgagatctgaatccctaatccacttattgtgattttctgaataacctatccaatgaacaaaatgttgcttaacaccgtttcgcaccctggatttcaaaatttctgctcgatgagttgtctgttcagcagcaacagtctttaccagttcctgatcgtaaaaaataccttttatattttcaccttctaaatcactgattcggtatgacggaggattggtcgggtttacccgaacaattttgaataattcgtcagtaaaatttggaaaatatcctttggagaagtctcccttctctttggtaattcttacgatatcaccaattttgaatttttgtattcgcttttgttgttccatgtctttatatagacgatttctcagctctgttgcattgcgaaaattcacatcaacaggacgcattcctgttgtacggttcaccgaattgttcaggtttttaactattttatcaataatgtctacccatctgtgtgtgtttttttcgctaaaataacggtaaagtctttccttaattgtgcgatttgctctctccacaacacctgcatgtagatgagggctgtacattacatgtttaatgatatcttttgaaagccagtactcattcattcgtttggcttggaattctaggccactgtcgctgtacattttattaggcagcacttgtgcctttttgaaaactttttcaaacgcttcaatcatatgctcactcttcttcgactcagcttcggcgacataaatctgtctactaagaacatcaatacagacaagaatataccggtatccatcgttgtgctccttcagcgagtccataatgcaaagatcacactgccaatccgtatgcaaaccacttgggacagtttttaaccgtgggaatttgtttcttttgggtttgaaaagtgtgtaagtcctttgtttatgaagaaacttctgtacatcgtgaagctttaggttggggatacgttttcgcgcttctgctagcaccttttgcattcctgcgtagctggccggcgaatttaggttgtaataaacctgttcaagttgactttctatagttttgcccataacactggtttaaatggcggtttttctctatttaatccttgggtttttatagggttaacctggacaaggactagttttcttttagttcttctcttctttcctttaccctgttgtaaattaaataagtattttgcaatttccggttccctcttcaaacgttgaacaaaaaatgtatgacctcgaggcggagaaatatcttcacctgataataatttcagcgattcagtataattcgatccggtgactggcttattaaaattggtcaaaacctgtcctgattgcatatcgattccaaatttgtccggattttttccaataatattcataatttttgaaaaatttttctgacttaattttacgtcttgggaacgtattggcgtactactgctaccttctgtagccgaagaataatctgccgatgattcaaacacgttttcacttttctttttacgtgatgctcttattaatcgtaacggctgacgcttattctcttgttctacggctgtttctatttttggtattttatgaattcccatatatggagcaacgtttggtattgcagaactcgggtttccttctatgatcactttctgtggtttattttccatcagctctttgagttgacgtctccgtttgtacagccaagagtgtcgtttcattttaatatcagctccgattgttttatcattcaaatttttatgtatatttgagtctaatgatgttttttcatcttgtataggatcgcctcggctacccatactcttcactatgttcataagcgcaatgtattcggtttccggaaccatgaccattttctttgtgtgcttcattatgctgttattttttcaagcaaatgttgggctaagacactgagaacaggcacaagaatagcaccaagggcaattccgctcccttgttgaagtttttgccgagctgagttctcactgcgagcgcgtgctatggccctgtaatagtccgcgtattgtgacaaccgtcgcctctggctcggatttagacgaaaattaaattttaaaatatttgcgcaaatttccacaagggcaagtatttgttctgcggatgctccctgcaatagatcgttttttcgtttatcagacctggtggccgcaagcttttttaagaaatctgtattttccctaacgtaaggactaaattgatacattttagttttttttctatattcatttctttatatagacaatgcggcggttagcgcgcatacattattcgctcggtaaatagattactctatgctcgtctggaaatattttactagtaagacgttcagtttccggtgcatttggatgcatatttataaccaaatagctaaacggtttatttgttgcgtcattatatgattccataaaaaaatttaaacgctttggaaacagttgagatccgactgtccgtacctgaagctgtccggatgggttacgtgtcagcacaaggtaatgactgttcgctcttgctgtccgaatatttcgcccatacaggctctgagttacgaaaattacgtttacgttccaattatgcgaaccgcgcgtaaacaaaaggtctaaaaaatcattgtttatgttcagcataaggtcgtccagcacaagtaggagaggcttaggttgactgttgattaatgtctgatcgggaatcccattatgagtttctatgccacgcttaatcaaatcaatgaccgaatcgttcatttcggaataacaatataaaactttttcgggaggtgggttaatcatttcgttatgatgcttcaacagtctcataagccattgggttttaccgcttccagtggcgcccgataatataagagtgaagggggcgttaaacattttttatatttgtttttttctaattgcaactcatttaaatactgtttgtcctcaattttgtatgggacatatgctgcacattttgggcacaaccaacatttttctgcccatggggagtgtgctgtgtcgaaatgtaaaagactatttgtcctacaccttttgcaaaattcataatgacacgggcagtaatgacaacatttaacttgatgaatacaatttttgttcatttctaaaagttagggaatttgtaaaaaaaaagtggttatatatagtatatttattgcgttggggaaaggggttggttactcggctttcatgacgtattcgatccattgtgttaaatcagtcgaattgccagataattctactgtttccttccacgagcactctgttgttaaaatggcttttttaagcagagtctgtgggtctgattcggatattttggtatatgttttggatttctcgcctgtcaattcgttttcataggtatgagtaggtattggtggaggtttttcttgtgtgaaatcttcacctgacaattcggtcttcggtagtttgagcggttgttcacgttccaactgtttgtctggcgctggtgatgtttcatgctctagttctttatcaaccgctacttgtatgcttctctccatgtttattttaagtaatgtatatttggatagtatgtgtatatttattttaaatttttctgcttatatagtgattgagagggtggttaacaaaagattaaattagggcgaagag

SEQ ID NO: 128 - DNA, 1241 bp, Heterodera glycines
cccccccccccccccccccccccccatatgatgctattttatcccactaatggcatttcttcggcagctgactgatcgtgaatggaacaacgacgacacccttcacattagcgcatcacggcgcaacaccagcaacaacaacattttatttgtttttccatcccatcatgtccatttagggaaaaaagaaaaattttaaaaggattttgtattttaaaattacccacaaaaaatcaagcaaaaaagaaccgtttacatttcacccaaaaccacgacttttgccaaggccacgttttcttaatgcatatacaatcaatcagtaaatttttaagcaattcagtgtaaattgctggattttaatgcaaattttgctgctgattgtccgggaagttaagtgtgaattgtgtgggaagtgaagcatgtccaaaaattatttagtcaatccttattaaatttaaaaaactaaatcaaccaaaaaaaaaatttacggtatcaacttactgtaaataagtttactgtacatagcttatttgcatatcaatttgactttctgcaagatattctgatgcaaaaactattcggaaaattttctcactattaattaatctgctgtcgggatttgcaaaatccgatcggatatttttcactggtccacttggcttgtagttagtgctgctctccagcgccgacaattaatttctctttctgttttttttgcgcttccaattccactcaataaatgcttttccttctccacctactgggaggggcccttaagcggcaattagctgcttcctctcttttctgtcgctcctccaaaaaaaagaagccaatttcactgatcaacaaaaactgcccccgcggagcagtctttttgatcgaattgcctttcgctttctcttaattgaacatttgcagagtgatttatttatttgttgtgaagcgatcagattacaaatttatccaaaaagtaaataaatgtttttttaatgtatgtaatgtttttaaataatttttattacttaattttagaattttttcccctaagtttctttttcgtggaaaaccaccaagctataaaattaataaaagttatattatatattcataatttgaattagcccaaccatgtgcatccaactgaccaccaaaaaaaaaaagaaacataactgtcgcaaattgcctaacaataggcggacgtatgcacgattcggctcgtttaggcgtaccacgcccagcat

SEQ ID NO: 129 - DNA, 12625 bp, Heterodera glycines
caatcatttcatatctcaatttcattattaagtagtatatccatttttaaaagataacatcatttttacgaacttttggagatgcgaaaaattttcttaggccatttttgagatattctgatcaccaggggttctttttttatgtaaaaaatctcaaaatatgtaaataaaattaaaaaaaaggttctagtcggttttacgcgtgccatcactagggatgggatttaagtcatgaaaaatctcaaaaaagtcacgaaaaagtcacataaaaatgccaaaaaagcactaaataaacccaaaaaaagtcctggaaaaatagccaaatgtaattaaacccaaaagccgttttaaacattcttgaagaaagtaatttttcagtcccgtcatttgagtccttatggtataagaaatttaagttccgtcccgaagattgatttatttttcggaattttcatcacaaaaagtcaaattttgccttaaaaagtgtaaaaagtcatgaaaaagtcataaaaatgtatgttagaagcttcaaacaaagtgtagaacacttttgaagtcattttaaggtcatttagagtcagcaaaaaaggctcccggacatttcgacaatgaccgtttcgacaataccttttcgacaatgccgtttcgacaataaaattaaatatatttttttaaataaaattcaaatttctgcaaaattatatggacggtgcggatttgggatcaatataaaaaagttttttttcgtttttttcaaaatagcattatgaggatggctttagtttgtcaattttcggagcaaattgcttattttttttaattaaaaattgaaacattgttttacacctaaatagttgataatgaattagaagcttttaccctgcaaaaactattcttgattaaaaaaacaatttttttttttttttgttcgaattcgggtctggagttcggaattgggcaaacccgagttaagaggtccgtctcatttttcttctttcttcactattaatagggctcggatttttaggtgctaaaaatccctaaataggtactaaaataggtgctaaaaaagtgcaaaatatgtaggtgctaaaaaccccaaaaaaggccaaaataggtgttaaaaattgaaaaaatctagaaataggtaaaaacctaaaaatccgactcctaactattaataatcatacacaataggcgatagataatgcattcattaaatctaaaaaatataactacctaattaaatttttctctttaaatttcatcaatatttttttaattaatttattattttttatattcattttattatatttaatttgatattttaaattttggcgatatgatatagtcgtaaatggtcattgtcgaaacggtcattggcgaaacggtcattgtcgaaatgtaaaaaagccatttgacttaaattcccatccctactgatttcaagacagagatgatgattttttcttgagatgctgaatttcatagaacgtaattgacctaaaaattgccaatttccagtgataatctgtttagaaattccaatttttcccaaggcgcggatgtcggcacaccgtcgggccaccaaaacttattttttaataaaaattggctcaaaataacaaatcatttttggtgaaaatttctttaacaatttgcactcaaattttcaaagtttcggcgacaattttctaaaatgctcatttttgacaccaaatgcagattttgtctcccctaatccacatgtgacgggctaattatgcatgttttggggtgggatggattttcactagaaaagaaaaatcacttccaattatttatccggtcggcgcaacacagcaaacatacaatatatacacatagcagtgatcagaaaagaacaatacatcgatatgaacgttgatcacgcaaatatacaatagacaggtttatgtacatctctgttattcgtctgccgcgctcgttctccggttcttcagctcagctctggccctgaacgatcgccaccacgtcgatcatgacgtacgcgctcttcggcaacttgaccacttggaagaagctgcgcgcagggtacgtgtcctcggtgaagaagttcttgatcgtctcgttgaccgcctggaagtcgctcatgtcggccaccatgatgttgcagttgatcactgaaaaggggcgcaaattcacagatgatggatggatgatcaggcttttgctcactcaccgtgcttgaaggacgagccggcgtacgtcagaatctcgccaatgttggtcatcgcttgtttcgcctcggctcgcgctccacccggcaccacattcgtcgaccccgccgcgatcccggtctggccactgatgtacagcgtctggttgttgaggagcactgcctggctgaaaaaacaaaagacatgaacatggtttgtgatggcctccgttgttccgacctgtgacccgtcgcaggaggcgccttggacgtggtgatgagacgaatggagggagccgccatttggagaatggtggtttcagaaattaggacgttggtcgtttgttcgctgaaacacagaaaaaaggcaagcgaaatgcaaggaaaaaagcaaaatttgtgcaatttgaaaatgattcagcattaaaattttggcgtatttatacgctcagaaaaaaattcggaaaaatctgagcatttaattcatttttctgcgtataaaagggtgctgcattttggcaatccgcaccattatccttattcctaaatattcacacaacaacaccggcagcgtcaccattctgcgccagccacaaattgcacagcgacacatcccatcctgcgccttcgccacggaccgcaacacatcgctggccaacatcaagcgcaatggagacggacgaacagatgtgggacatgccctactaccacggactggtacgttttggtggttggcatgcaattctgaccactaatgcttttgcttgtttagctgccccgcgaggacgtcaatgatctgctggtcaaagagggcgacttcctgatccgcatgagcgaggagacttcaggacaggaccgcatctacgtgctctctgtcgtcgcgggaggccacaagcatcatctcatctttcgcaccgagcgtggaatgatcgcggtggacttcaaacacgaaagaggctacaggacaatgcggcgcttcatcgagacacatctgagcaaaaaagacacggtggttgacgtgagtttgttggggagagaggggggaaggaaggcgctaattaccccgaattcccttttcagcagaggaaggtgattctactgaaaggggtcggccggcagaaatgggagctcgcacattcgaccatcacgcagggcgctgaactgggcaagggcgcgttcggcgttgtcaagcgtggcgtcttccgcgacccgaccatcgggcagcccgtgcaagtggccatcaaggaggtgtcgcagacgagtacaaaggcacaggtaaaatggacgggcagcaaattggattttcagcctgctaatcgattcccctccccactttttcagatcaaggaattcatgaacgaagcgaggatcatgcgccacttggaccacaaaaatgtcatcagattctacggcgttgctgttggccgcgaaccgctgatggtcctcatggagctggcatccgacggctcgctcgacacgtatctcaagaagacgaaaaggagtccgcgcagcaaactcttcatgtgctacggcgccgccgcgggactggaccacgtgcactccaagggcatcctgcactgcgacatcgccgccaggaactgcctcttctcagaaaacacggtgggtttctgcttttcgcctgtgaccggcgcacaatttgccgttttctttcaggtgaaggtggcagacttcggcctcgcattcaaaggaccgtcaaagcctgtggaaacgggcaagccggtgccgatcagatggctgtcgccggagacgatgcgcgaacgcacattcacgccgaagagtgacacgtgggcctacggagtgctctgctgggagatcttcagcaacgcgcaacagccctaccagttcatatccaacaacgacgtcgccccgatggtcagtgcagtggggggaagggggttgaaaacgaatttcccattttcagaatcatctcccctctcccttttcaggttctgcgcggctcacgactccgcttcccaaatgtgacgccacctccgtttgcggaattcatcaaagcgaacgtttggactgccgacgtcggtaatgttttttgtttttgttttaacattttcaaaaataatgttttcccttccctttcagcgcgccgctatgcaatgagggatgtactcgcctggatcgagcaacacatcgatgagctgatcgacgataccacagcatcgcggcacgacacgactacagctacgactcgaaaccgcggatcccgtcaaggctctcgaactggctcatagaagatggtgatcgatgtgtcgctgatgcgtttatacgttctttatgtgtgttgtatatatgtatatgagtgtatattacgtcgctgttgtatcaatatttactgcatttgtcccgtatttcgatcaaatgactgtcatatttgtatttgtcatgaataaatgaacatcaatcatttcatatccaatttcattttaaaagtgtataaaaattaaaaagataacatcatttttacgaacttttggagatggaaaaattttcttaggccatttttgagatattctgatcaccagggcttcttttttatgtaaaaaaatctcaaaatatgtaaataaaattaaaaaaaaggttctagtcggttttacgcgtgccatcactagggatgggaattaagtcacgaaaaatctcaaaaaagtcacgaaaaagtcacataaaaatgccaaaaaagcactaaataaacccaaaaaaagtcctggaaaaatagccaaatgtaattaaactagggttgagcggtaccggtactggccggtaattaccggttttttcaaaaatgaaattaccgttaccggtttgcctagtaccggtaccgccggtaaaaatttgcactggtaagaatgggggtctggtcgagaaaagagtaggaaattggtgaagaaggagaaatttatgagaaaaaattaaattttatttcatttagtcatgggattgcacacgtgcacatgtggtgtagtggttaaactttctacctttcataatttttcgcctgagttcaattccccacttggatagaatattcctcatttctttaccattattttaattaaaattttaaaaaatattccaacttttttctttcatgttaagcatcctaaaaacccaaaacttaatcaattggtcattttttttacaaattctgttaacaaatcgcattaaaaattacaaaatttttcccggcggcgcctatcggcaccgcccggccctccttgtcccccaaaagtcttggaaaaaacgtgccgcgtaaaaagcggtgttgaaagcaaaaaaaggtcattgatttacattaatttacatggccggagaccccttcgcaaaattggaaaattggctgctgaccccttgttttgcaataatctgaattttgaggtctatatctgaattttagtgttctttatcctgaatttgaaaaaaaaacttggtcaccctcaatatacatatacttctgaacaattctaatgctaaaaaacaggtactcgcgcgaaaactgaataaaaattttgtatttggaaaattttgtccaaaacttttggacatttcgtggttttttactcttttggacatttcgtggcttggacatttcgtggcttggacaattcgtggcttggacactttgtggggatgccatttcgccaactcagtcaaaaacattcatttcgccaacttaaccaaaatctgacatttcgccaactgacatttcgccaagtagtcaaaaaaagtaaagaaaaaaagtaaaaagacgaaagaattgcatcaatcaaagcttaagtattcctttcatttttataagttcttttctaaccaaacaaaaaggtaattcagattttagtaagaaatgccagctgtacgtgaaatacttgagagtctgcaaaagccaagagtggtgaagaaactgatgatgccgatggaaattaaattcgaacaattttagattttatttccctttctttttgttattttattttataaagatttcttcgcattggtgtgcttttctgttaattttttaatcattatatatagggttgtaaattatatggattaacatattttttctgcgcatatgctatgaagaaaggggcttaaaaatagcatttctgcgttaaaattttttgatttggtgaaggtttttagtccatataaatccatattttgggggttttcgggaataaatccatatttcgccatttttgggtttttagtccatattttggccattttttggaaattttcacaagaaaaatgaaaaaaaaacgaaaaatacacccctaaagatcaactttttggaaatttttaaaaattacaccccacaaaacacgaaaaatttgagttttcgtcgtcattttggcatttcaataaatattttcgtcatttttttgcgaacatttctttttttttaatgagaattttttcgaaatttggcaaacttggaggtgtttttgatacaacgaacaacaataaaaaatatgcatttttaagttttaaaccccattttttggttgtttattgtactttttaggtttatttaagcaaatattaaatatgcacacctttttttgggatttttgggggtttacaacatatattttggcattttttatccatattttggtccatatttggccatttttggcctttttagtccatatttcgggcttttttagtccatatttaatgtccatatttcgcgttttttagtccatataatttacaaccctagcaattaccgattaccgctcaactctaaattaaacccaaaagccgttttaaacattcttcgaagaaagcaatttttcagtcccgtcatttgagtccttatggtataagaaatttaagttccgtcccgaagattgatttatttttcggaattttcatcacaaaaagtcaaattttgccttaaaaagtgtaaaaagtcatgaaaaaagtcaaaaaaacgcaaaaaagtcataaaaatcccaaaaagtgtaaaaaagtcacaaaaaatgtatgttagaagcttcaaacaaagtgtagaacacttttgaagtcattttaaggtcatttagagtcagcaaaaaaagtcatttgacttaaattcccatccctactgatttcaagacagagatgatgattttttcttgagatgctgaatttcatagaacgtaattgacctaaaaattgccaatttccagtgataatctgtttagaaattccaatttttcccaaggcgcggatgtcggcacaccgtcgggccaccaaaacttattttttaataaaaattggctcaaaataacaaatcatttttggtgaaaatttctttaacaatttgcactcaaattttcaaagtttcggcgacaattttctaaaatgctcatttttgacaccaaatgcagattttgtctcccctaatccccatgtgacgggctaattatgcatgttttggggtgggatggattttcactagaaaagaaaaatcacttccatttatccggtcggcgcaacacagtcacgcaaatatacaatagacaggtttatgcacatctctgttattcgttgccgcgctcgttctccggttcttcagctcagctctggccctgaacgatcgccaccacgtcgatcatgacgtacgcgctcttcggcaacttgaccacttggaatgttggtcatcgcttgtttcgcctcggctcgcgctccacccggcaccacattcgtcgaccccgccgcgatcccggtctggccactgatgtacagcgtctggttgttgaggagcactgcctggctgaaaaaacaaaagacatgaacatggtttgtgatggcctccgttgttccgacctgtgacccgtcgcaggaggcgccttggacgtggtgatgagacgaatggagggagccgccatttggagaatggtggtttcagaaattaggacgttggtcgtttgttcgctgaaacacagaaaaaaggcaagcgaaatgcaaggaaaaaagcaaaatttgtgcaatttgaaaatgattcagcattaaaattttggcgtatttatacgctcagaaaaaaattcggaaaaatctgagcatttaattcatttttctgcgtataaaagggtgctgcattttggcaatccgcaccattatccttattcctaaatattcacacaacaacaccggcagcgtcaccattctgcgccagccacaaattgcacagcgacacatcccatcctgcgccttcgccacggaccgcaacacatcgctggccaacatcaagcgcaatggagacggacgaacagatgtgggacatgccctactaccacggactggtacgttttggtggttggcatgcaattctgaccactaatgcttttgcttgtttagctgccccgcgaggacgtcaatgatctgctggtcaaagagggcgacttcctgatccgcatgagcgaggagacttcaggacaggaccgcatctacgtgctctctgtcgtcgcgggaggccacaagcatcatctcatctttcgcaccgagcgtggaatgatcgcggtggacttcaaacacgaaagaggctacaggacaatgcggcgcttcatcgagacacatctgagcaaaaaagacacggtggttgacgtgagtttgttggggagagaggggggaaggaaggcgctaattaccccgaattcccttttcagcagaggaaggtgattctactgaaaggggtcggccggcagaaatgggagctcgcacattcgaccatcacgcagggcgctgaactgggcaagggcgcgttcggcgttgtcaagcgtggcgtcttccgcgacccaaccatcgggcagcccgtgcaagtggccatcaaggaggtgtcgcagacgagtacaaaggcacaggtaaaatggacggggcagcaaattggattttcagcctgctaatcgattcccttccccactttttcagatcaaggaattcatgaacgaagcgaggatcatgcgccacttggaccacaaaaatgtcatcagattctacggcgttgctgttggccgcgaaccgctgatggtcctcatggagctggcatccgacggctcgctcgacacgtatctcaagaagacgaaaaggagtccgcgcagcaaactcttcatgtgctacggcgccgccgcgggactggaccacgtgcactccaagggcatcctgcactgcgacatcgccgccaggaactgcctcttctcagaaaacacggtgggtttctgcttttcgcatgtgaccggcgcacaatttgccgttttctttcaggtgaaggtggcagacttcggcctcgcattcagaggaccgtcaaagcctgtggaaacgggcaagccggtgccgatcagatggctgtcgccggagacgatgcgcgaacgcacattcacgccgaagagtgacacgtgggcctacggagtgctctgctgggagatcttcagcaacgcgcaacagccctaccagttcatatccaacaacgacgtcgccccgatggtcagtgcagtgggggaagggggttgaaaacgaatttcccattttcagaatcatctcccctctcccttttcaggttctgcgcggctcacgactccgcttcccaaatgtgacgccacctccgtttgcggaattcatcaaagcgaacgtttggactgccgacgtcggtaatgttttttgtttttgttttaacattttcaaaaataatgttttcccttccctttcagcgcgccgctatgcaatgagggatgtactcgcctggatcgagcaacacatcgatgagctgatcgacgataccacagcatcgcggcacgacacgactacagctacgactcgaaaccgcggatcccgtcaaggctctcgaactggctcatagaagatggtgatcaatgtgtcgctgatgcgttcatatgttctttatgtgtgttgtatatatgtatatgagtgtatattacgtcgctgttgtatcaatatttactgcatttgtcccgtatttcgatcaaatgactgtcatatttgtatttgccatgaataaatgaacatcaatcatttcatatccaatttcattttaaaagtgtataaaaattaaaaagataaccatcatttttacgaacttttggagatggaaaaattttcttaggccatttttgagacattctgatcaccagggcttcttttttatgtaaaaaaatctcaaaatatgtaaataaaatttaaaaaaaaggctctagtcggttttacgcgtgccatcactagggatgggatttaagtcacgaaaaatctcaaaaaagtcacataaaaatgccaaaaaagcactaaataaacccaaaaaaagtcctggaaaaatagccaaatgtaattaaacccaaaagccgttttaaacattcttcgaagaaagcaatttttcagtcccgtcatttgagtccttatggtataagaaatttaagttccgtcccgaagattgatttatttttcggaattttcatcacaaaaagtcaaatattgccttaaaaagtgcatattttggctacttttcgtgcatatttttggcagcactgttaattatatctcaactttctgttcacattctgaaatttaaaaaaatttgggtccaaaaatatttgagacggaaagcggctgcccataaagtgtggcaaactttttgactcatgaaagcataaaacctttattttggcaaaaaaaacataatttgatacataaaaaatgattggacgcataaaaagcgattggacgcatgaaatgagattggacgcataaaactttgattggacgcacaaaactttgattggacgcataaaaagcgattggacgcataaaaaacgattggacgcataaactgaagtagagccttttatacagcctatacaatgcaatacaatatatgtaatacagcaatatatacatatacacaacatcatgacatacatatgtgtacaattgagtcaatccatcggaatttaatcacccatatcaattgcgcgattcatctccattcacagcagcggcgttctattcagctccacctttgcgcttgttccactctctcagattgttgctgagcttgatcatcaaatcgagggcctccttcagggttttgttgttggattctgccaatatgaccgcatttgcatcgtcgtgagcctgcgcaaaaaaaaaataaaatttaaaaatgaacagccactaaaaaaatagaatccttcccccaccttttgtgcgattcggcgagcctcctccgtcgatttcagtaattcctcgtagaaaacggaaaagttcagcgccacaccaagacggatgggatgcgatggtcgaagtttttcctgagcaatgctgtacgcctcctgatacgccttcagtgcattgcgaagatctgaacattggggaggggggaatttgttgaattttagcattttcgaagcccttttacccttcgtttccgacggtttgatctcggccaagtagcggtggaagtcgcccttcatccgcatgtagaacactttggcctccgggtcggcagcctttgggatgagctggttgtccaacagagtctgaaaaatttcaaaaaaatttttgcagttaaattcgtacggacgcactgaccaaaatttcacggcccttctcctccgcctcgctctccaccttcttctgcagctccttgacaccttgcttctgtttgtccatggtcgactttttcacatgggattcgatgacacgccacgcggaacgacgagtgctgatcgcccttcggtacgcatcggacagcaaagtgcgctcttcttcggtgagttcgacgctcatttcggccacctgaatggggggaggaaaattataacagggaaatccggaaaaagcatccattcgatccatcgccgctcacaacacctgcttcatctccttggccatttcgtcgtagcgttcgcattgcctcgccagcttggcccgttggatgttgtccttgcgctgttctgccatttagaaggatgggttatgatgaatattaaggactgggcttattttttctgaacaaataatggcatacttatgacgaaaatgaaaaaacaataaaaattagttaaatttgtatgtcgtgtcttatcatcgaaaaaactgaaatcaagaaattctttttaaaatgtagggaaagaaatccagaaatgtgagtgctcaatttcagcaaacagtcaatgaaaatcaatcagaatccgaattcggattcagaaggttcacagttttagagtaacaaaggacaaacagaaaaggtgacaaattttggtttagaaattaaattagcaaattaatcaaggcgatgaaggcagaaaaaaaggcagaagaaataataaagtggaatgggtgggccaatttgattccttaaataaggatttttaaaagaaatacctatgcaaattt

SEQ ID NO: 130 - DNA, 1868 bp, Heterodera glycines
aaaaaagtggcgtgaaaagcaaaaaaaaaaaaggtcgtcgccctgggaccgtacctggagtgggtgtcaataaggaaaacctcttgcaaaaatgccccgcatacccaggaacggtaagtctcaggttggggggccccaaaaaaaaactcccctccgcaccctaattttatggaaaaatatcggtttttcttgttggtacccccctcatcaaaatttacaaagcagttctttcgaaaatccaaaaaattatcaatctttagtgaaaacctgttagaaaaaagggacactcccaagccaaaatcccgggaccgtccctgttcaacataattaaaaactaattttctgacccgtgtaaagcactgccattgcgttgtctccattcaattcactcaaatcatccgcataaatgaagttgagcatcactttgaacacatgcgcatcgatgtcagtgacttctacgggacccttcgcttcaaattaattttttttttttaaatacaaaattttttgttgttttttttacaccttctccacccgctgattcattgtcagtcgcattttttgtggtgtcaaaacggaacatcgcttcaaaaacgtccgaagccgaattcagaatcgctctgtgcgcgggcacatgcttaaagaaaacaatattaaattaaaattaatttaaaattaattaagcatttaaatttgtaacaatttccccttaaaactcgcctcctttccctctccttcccccaccaaaaagagaacgtccgcgtcatcgcccgagctcaacaaatgcttcatccgctccaccaaagtttcgggttttgacgacattttgacaaaacaaattttctataaatatgaattttagaaaaaaaaggaatatcttatccatttcatccatccgttcatttagtgaaggttaagggtgccgcggtagcagtacgcgaatcgcgcattaaaaaaagcataggaattttttatccaattttcacagattttagacgacgttagagcatttctgatctggtaatactgcagatggtccccacccctttttggaaaaaaaggttttgaaaacatgttattggagttttagggacgttgatctcgaaaatgccattcattttgaccaatttcgaatgccagacaagaactcgaaagtagaaaattccaaattttgaaaattcacaacgttcctaccaatgcatagagctctgaaattccatttaaatgtattttcgcgtttgctgagaacaggagcttacacaattagtggctcgcaaattttgaagcaaaaagaaacaaaacaaaaataatagacagtaaaacataacgccacaatggatttaaaaaaaacaaataagctgtcctgctgctctcctgccctgtcctgaactgtaactgtgagaccgattatttaattccaatggctgtcaagtcaagtgtccttatttctctagcatttgtccttattttgttaatattcagtaaatgaaaatatctcaaatttttttaattggttttttaaagattaaattagccatttttttgctgcaaaatgaaagtggtcgcgctggtgtcgggcggcaaggacagctgcttcaacatgatgcgatgtgcggaggaagggcacgaggtggtctgtgcggccaatttgcatccaccgaacgaggtagaaaagcaaaattccatattttacaaaatgcaaaatttccggtaatggtcccgttttgtcgcccattttaaatttaaatttattttcaaaagtcgtgtaaatatttttcaagtcttttcggggccgcttatcacaaatccggcacccgtttgactaactcagaacctcggattttttgtcagattctgacccctgggtt

SEQ ID NO: 131 - DNA, 13266 bp, Heterodera glycines
  unsure (1)..(13266): unsure at all n locations
attttggttatatcgttttgcttttggtggggtgcttggaacagtggaatcatgcgcacccgtccgatctggcaagttaagcaacgattgctgactagccaaaaggttcggtgccgtgatgaaacgaaccagcactgcttaccccgcggcacccggcacggtcccccgaaggaatggatttaattaaattctctccttcggggatttttttccattaggtcgtccgttagcgttcgattgctctagtcaatttttaaaaatttttgttgaaatatttgtcggctttgaanaggccgggggaagatctaatcattaaagaaataatgcaaaaatatgaataattaaaaatgattaattaaaaataatcataaggaataaaaaataaataatttcaattaaatcgttatttaataccggttataaaatgatttgaaaataaattatttactttttttcttgtaaaaaaggaaatttttaaacctataattttttacctagaaaaaaaaatttgacggtcactttttgaaaaaaaactttcaattcttagggtgtattttctgaaattttttcggatcatttcttaggaggttttcccgattttattgcattcttagtaagaatttttcggaaaaaacaccagaaaatgcaccaaaacggcaaaatgccaaaaaggcatttaggcacgaaaatcccgaaaaaggcaaaaaaggcataataaaggacaacgtaggagcctcaaaccaagtggaaacagccttttttatgcttaatatatagaaacaagtgcgcagaaaaaaaaagtttaatttttattaattttttaaatctggaatagaattttccaaaacgatgatttttgtttttgtctgccaatgttgattctggaaattttcagttggtagccttggttttaggcttctaggcccagctttttcatgctgactttttctttatggtttgactatttaaaaagttgtagaaaaaatttcgcgtttcgcatttattttcatttcgcattttttgctatcgcaaatttcgcgttttgcattttatttttcgatttgaccatccctgatatagatcccggttcaagtcccgccagttccgtcttggacatctggccagttgcgattacgcatttcaatacacgaaatttgtaataaaaaaataatttgattgtgttgtacagttaggtatttgcgggccaggacgttttcgcgtggacgttttcgcgtggggtacgttttcgcgtaagtgccgcctatttaggactgaaattggtcggatatgtgaatcacttgggggaagtgattgttattgatgaatagggagtccaattatatggaaatccatatttttttcctggactgtgggaggcctgaaacgcacgaaaaacatttttttagcttggtttgaagcttctaggaaggatttctatatccatattttccatatttttccatatttcgcgatttatgtccatatttccatatttttccatattttggcattttggtccatattttatgtccatattttggcatttttcaaaaaaaacctctattagaacggcccccagcagctaaattagcctttttgagcccaaaaaccggaaaattttagaaaaaaatcattttttcgccaaaatttctcgagaatattgaataaatttaaattttcttaaaaattaataaatttatgtcaaaaataagcaaaaaagcgaaaatttcgcttttgtggttgattttgcgctaaaaaaattaataaattttagctttcatgttttttttcttctaaaatgattgcacagaattgccgaaaaaattcgagaccaatttccgaatttggaaatgtatctcatatgcaatttcaaccaataaatttgaagaaattttacattcaatttgaaaaatttatgtccatattttgatatttttgccatttatgtccatatttcgcgatttttgccattttatgtccatattttgcgatttttggtccatattttatggccatatttcgcgattttatatccataaagttcgtctaaaacagggttaccattgaaaatcgctggtcaaaaatatgattttagggtcaaaaataaggacatttttaaaacacgcttccaaaatttaaatcgcatttttattcaacaaatcaagcattagcaacatatttctcgccgccaactatttttctgagcaattccggcttagaaatgagaaatttatatatttccaaaatcgattttaacaattttgtggaaaacataagcaacttgtaaattattttaagttcattcgggatcaaaaaatcagtttttaacaatttttttgcggcgtgctttttccaaaaaattttgaggaatgggcgatgggatggggtccggcggtgccgataggcgccgccggaaaaaaatttgtaatttctttctgatttgttaacatattttcatcaaaaaatcatcaatttttgcggtttttacattcaaaaggctttttttgcggcatttttttaaaaactttcttttttaggcgggtggaagtccggcggtgccggtaggcgccgccgggaaaaattttgtaatttagcgcgacttagtaacaaattttcaccaaaaagaccaatttttacatggcaaatcttaggtcatctcttgaaatcttaggggaattttgtggcactgcggcgccgatagtcgccaatgggaaaattttgccaggcttttcactgtttctacttcaaacaaatttctcgtattttttttcgcgatttttgagtcaatttaaagaaataaaaagaattttggagctctggcggtgccgataggtgccgccgggaaaaaatttgaaattttagtgcattttgttaatagatttagtccaaaaaagacaaaatttttgattgtaaatgttagaattatgattgaattcccatcgataaaggaataattttgaaaaattataaaataaaatattgcttggaggggaactgatccaacgataaaatgaagaaataacccaagatcacaaccaacttgaccacgcatatgagtaaataaattaagcaaaattaagactttggatataattcgcttcaaaaattatcatttaaaatctaaatttctctctgaatccaaaaaataagactaaaataaggacaaagagcttaaataaggacaaatcttacaaataagaacatttaaaatttgtaagatttgaaccctaaaaataaggacaaatcttacaaataaggaaggacaaatggtaaccctggtctaaaatggatcaaattttataatcttagtattttcgatagctctaagtgttttctattatcctgcaaaatttctaaaaaattctttaagtttaaaaaaagttatgacctgagaagctcaaaaaaccatgtttttttgaacattttcagtcataactttcttgaaacttaacgaaactttttgaaattttgtaggctaatagaaaacacttagtgctatttaatgatatcaagaattaaaaatttagatgctcttgaacaaagttatatcaaaaaatattttcatttgatggttttttgactaacgtcatagcacccattgcatccctagtaatgaattctctaatatgcaaccacgcgaaaacggtcctcacgcaaaaaaggccacgcgaaaacgaccccgaccgaggtatttgttaggacgataattcgtagattaattcttaactaaataataaaattctctatttttttctttctttctctctctctctctctcttcactcccccctctctctccctctctctctctctctttctttttctatctctctctcagttggtcttactgcactaaaatggtcaaaaaattatcgattggtttattcattttttttttgttccaatctcttcaatattaatccgccggattaccttcgtccttttttgctgcgtcatttaacttctcttttctgttaatttaccatcagcggaagacaaatacattttattttgcagaattacgatttcgaattttttgttagagttgccaaatatttttttcctttttgatagagtccgttaaaaaaaatttccgggagcgtgatcgggaatcccgttaaaatcccgctgaaattttacgggagtccagggcgggagcgagagttaattaaagactaacaaaaatatttttaatgcacaaatttgaaggacaatcctttattaaagaaaaaatagacagaaaaatttagtaagcagaaatttgaaattaaaaaaatcatatttttgtgtcgaaaatcagaaatttttcaaatttcttcaaataaaattttttaataatttatttgttgactcccttcaatagagccaaaaaataatcaaaccaatataatttttaccaacaaacggtaaaaaataaaccagatttaagatttaccaaatttctaattcgcataaaataatgccgcgaaattcacatgcaattggcatcgatcttggcacgagcgcttctcgtgtcggcgtttttcgaaatggatacttcgcgtcgatccacaatgaccgaggtgataaaaagaccattttggccatttttgaatgttttaattgctttatattttcaaaatttctttcaataaatttctttttttttcgtttcgagggttgggagatggcctacccaatttcctaatctttttttcattacgggaggttcaggagtttctcccattcccctgaagggcctaaccaaattttttcattttgtaaattgaggaaagcgtatgatgccatcttacgttgcgttcactgacagcggacctttggtcggagaagcggcaaaagcacaggcaaaaaaataatttataaaatgattttttaatgaattaatgaaaattgggtttcaaaactaaaggaaattgaaagaaagaaagtctgatctaattcaatcaatgatcagtgctaaaaaagggagagagagcgcgaaagagagtacgagagagagagagacaaggagagtgtgtgcgatagaaaaagagagagggaggtatctttgttctagagctttttgaatttaattttttttttctaatttaaatctgtggaagcgatcggatatgaattcaaaatttttaagcgtctgtttctgaatcatagaaaaatcatgtccaaatgttataaaaagcggatttgcagaaaaagtttttgtggaattaaataacctaactttttttatacttaagtaaaatttaataaaattatattctgatatagaacaccttgagctattgaacaatactatgaaatatttatttggttgaattaagaaacgacccaacacgcggcaaaagcacaggcagaaacatttaataggaatatttttatgaattatgaaaattggtttcaaaactaaaataaattaaaagaaggaaatctggggccaatcacaattacgaacgacaaatttggcaatcgtccgaattttgattacgacaacaaattatatcgttgaataagccgttttcagtttgtctctgtcgtgtgaattgtcgtccaatcacaattaacaaaatctaccgtaaatttgtcgtcacttttcttatgaattaaccaacatttctcaggaaaatgcaaaaaaattgaaaaatggctaaagggtttttctagaggttttttggtaagtattgtagattccaaatctaatagattcgaaaaacccgaataaatttaaaaatcatcgataaaagtatagaaattaaaatctgagatctgattcatgaccaacgaactcatttacacctggaaacatgtttttaatattaaataaaaaattttagatcaaaataatttggtgaatttttgggacatttctcagacgccaaatttgaggggcgaagttgaacgccccccaaatatttggcgtttatcgtctgaaatttgtcgtttgtcgttggtttcaatcacaattacgaacaacaaacgccaaatttcagacgaaaaacgacaaatttcggtaaacaaacgacagattttttaaaattatgattggagataacgacaaacgacatattttacgacagatttggcgtttgtcgttcgtaattgtgattgacccctgctctgatccaattcaatcaatttaagtgacaagagagagtacattttcatatttatagttcgttatgttcccttgataatttgccggcatacgctaattacatattttggcatttagttggccataaatccgtctaacaccattttcgacttttttcatctcatcggacggaaattcgttgaccgagcagttcaggcgaacatcaatcgttggccatttcgcgttgtgcctggagaggacggacgccccaaaattgccgtgcaaagcaatggaaaacagcagacattcaccgtggaggtgtttcaattatgaacatttttccctcaaagtgaaattgacaacaaaaaaaggaaattgctctttaattagtcagatttgattcagctaaaataaatatttcgacaaaatgtaggaattgccctacatttgaccaacacattaagtagggccggtcaggtgtggcgctcatatttggtgtagccagtgaagtttagcgcgacattttttaacttttttttcacttgtactattttctctaattatcctccatggggcattatttttcaacctcctcagaagggggcgggataattggagaatgtgggattaatggagattagaggataattagagaaaaaacggtaattcacagatatttttcgaatccaattttccgcggctaagggatatttttaaaaatgcaataaaattattatacacactttttggaaagaatacaaatccatcaaaaaaaattacattaattatgagccttgtcctagtagtttttgagaaatgaacccccggataagaagtccggaaaaattctgaaatcttgtccataactccggattctgactccggatttaaaaagtaattaatcacaaattatttctcatcaataatcaatgtccattacgcagaccattttgtccatgctgttggccaagttgaagcattcggctgaagcatttcttggccatacggtcgccgacgctgtgctcactgtgccaacgcatttcggccattcacaacaccaatcagtaaaagattcagccaaaatcgccggcctcaatgtgttgcgtttgttgagtgcgccaacgtcggcttccattgaatacggtagggattgagtacggtttcagcataaattagtgccaaaaaatcatgcatagatttgtttttgcatattgagcggcttggtattttacatgctgtttttctcggcttataggcttataccatcaccgcataaatttaccattccatcactccactagcattttaatgagacaattaaattttgaatttgttttcttttcacagcatttaacaactattgggaaaatgttaatgtgcttatcttcgacttgggtgcgtccaatgttggcgtgacaattgtcaactgcgaagatggtatcattcgagtgaagtcatgtgtcggtgacactcgggttgggggcgatgacttcaccaatcgaatggtaattatgccggattatggcatgctttattaaatttggcatttacggtcgatcatttcgttgcggaattcatgcgtcagcacgggtacatgctcagctggagccctgaagcgctttttcgtgttcgtgccgcctgtgagaatgccaagtgcactctctctttgtacacagaagacaggtgaggggggttatttttttgggaaaagcgcgccgtaaaaaaggggtgtgaaaatataaaaatagtcatgtcaatgcgggattgcggactggaaaaaatcgcgcgcgggatcccgtcccgctcaagtctaggattccagcccctattttttggattccattttataattactattattactctccgtttcagcattgaattggactctctcctcatctcaagcaggctgagggagatgaagcacttcgttcaaaacagttagacaaaatttggcaatgtgcatcttgaaaaaataaatttttttgaaattttcaatttgactaaaatacagctgaaaatattgctaaataaaaaacaggcgatattgtaaaattgcaaattttgatgacaaaagtatttttgtgcaaaaaatttgtgtctctcttctcactctctgaaacgaaacacatcaacaaaatattatactttaaaatttaaaataaatttattaacaacaagaaaagcgtgatacataatagggcacctatttaaaaaaagatacataaataaatttttttttataaattaccaaaaaatactaattgatacaagaaaaaaacataacaattaaaacttacaaatataattatacctcctatataaaataatactaattttttcatatataatatacaaatcaagtattgctacaattaaaaattataaataacatggttaaagaggaaaaatattattttattcaatgttttatgttatacgaggccaacatgatcggcaaaggcatgtgaaaaaccccattgttttgtggtacaacgcgaatatcttttaatttctaaagtttaaaagtttaagtaagcataattggaataataaacataaaataaataaaaaaaacaatgcgaaaaacaaatgcttatgtttttgcattataaaacgcaaattaaacattaaaaatcttttaatcacgacatgcataaaaaatgaaaaaaacaaagaaaaatagctaaatcacattcatttaggtaagaaattaaaaagcaaataaaagttttatttaagatgaataaggtaaaagccaataatcatgtaattttaaaagaaattaattaataatttttaaataaatcaaagatcgtgaatttatttccaaaacaatggtaagaatgggggtctaatttgtaagtgaaaaattttgaaggatattggtgggaaaattaaataaataaattgatttaaatcaactagtgaacatatgtgtgtagccgagtggttaacactttggtcgtttattatttgtcacttgggttcaattccccattggtatagttagttttttatttttctttgaattattttagttgaaatttaattaataagattgaaattatttttatttatttttaaaacagccatagagccataaactaaccaatgattggacatgttttggacaaaatctactaacaaatttcattaaaatttcaaaattttacccggcggcgcctatcggcaccgccgtccccccccccccaatgtttcccaaaagattttggcaaagatgcgcctcaaaaaaacgatttaatcaaaaaaagttttgccaataagttaaaacacaaaaaaattctataagaatattttggaattaaaaaaatagacaattttaacgaaaattattgctctataaaaaattttctaggaattttagaactcaggaaattaccagtttttgcgggtgcctcaaaaatattgttaccggcttatttttaaaacaaatcaattccagaaattaaattttaaattttttgtcattaataaaagcaatatttaatcatttatatagaaataatttttttaaattgttaaaaatatatcactaaaaaatagtaaatcaaaattttagaaaaaatcaatatttttttgaaaaaaattttttcccgttcccagcgggattcccgttaaaattgacgggatttttacgggaacgggaaaaaggcgggaatcctgttcgggaatcccgccccgttcattttcgttttcccgttcccgttccggaataatttttttactgctctttaattaaaaccttaatggctaggataaaaaataaattgtcaaaatatctttgaaacttttcattcggctaatacgaattgctattcctttcatcaagaaagcatatagaaagaaaattccaaaattatacgacaatttacataataaaaattaaataaatacaataagaataataacaaagacaataatataccaaaaaatagctagataacatattcaatcatgcaagtaattcataattatatgaatagataataaaagattaattgaaaaatcaaaatatcaataaaaagtacgataaggataaatgaatggacgtgtgcactcattaatggttgcgtttcttttcatcgatttgtcagtttattattatacttttaataattttaataggaaacaatttggtaaaagtcacatacattttacgtcacaccgtcacttgaaaaatgttctagaatttttggcattgaagcttaacaaaaattcattttttatgattaattattgtttttccgcttttttgtatgtattttttgcatttctcaaaacgccaaaaatgtatctaagttcgtcaatttgagcagaaattaaaaagttggaaaaattaaaatatctaattttattaaaggtagatttttgagctgaattaatttcgaatgcgccaatttcagttgttaatcatgttaaaaaaatttattagtaaaaaatgtcccaatccaaatccaatttgccaggtttcggctttttgtcagattatattaaaagtgtttttaaccaggttgaaaaatcataccctcacaatcgttatgttgaataatacccagtttactagattatgcagtaccacgatggcaataaattattgaaaaattaaaaagataaaaatgaataataaatacatttataaaagcgtttaaaatataaaaataaattatttcctgaattttttttgcaaaaaagaaaaattaattagcaaaaaataaagcaattctcttatccaaaattatataaagttatcaatggaaaatgaaattataagatatgtagtacaaagcagtttaactctatatattcaggaaaaatttgttttttagaaaaaggcttgtaaaataccgaaaatccttaaaaatattagaaacaaataaaaaaatgaaatttaggagccataatgggactctttaaataatcggagaaagattgtatttgtggaaaagctttttgtcatcgaggcaaaattttcttaatgaattgaataatttttattaaatgattctcacagtcgataatatcgaaattcaaaattttcatgggatttgtatttatggaatccataataaaaatttaattaaatgttaataaaactttaaaaaattttaaaaatagtgcattaaaatgatctttaaaaaattaataaaaaaagtgcataaaaacaatgttcttggacagttttttaaagcattaaaacaaatttaaataaaaattaatggtataatacttaaagaataataatcaatttttttttaatttaaaaagctctttttggtgaatttaccgtaatattttagaaaaaaaagcaaaaaattagaagcaaaataaataatactgtaaatgatagataattcaagataaaaatcataaattaagaacgtattgaattatccaattgctgttgggacatcgaaactcgtcttgaatcgctggaagaactggaatttaaaatcaatcctttctaaattatacatgaaagttattcaattttattcattatctaaataattaaattgcgtagttttgatgctcacccatttcatttagtcttgcccattgaaaacacaaggtatccttgccaggagaaatttgaaataaaattacttgaagcaaaaaagaaagaatcaattaaaacatattttaaaataaagaatatattttcacacgagcaaaaaatttcttcttttgtttcttagctctagtcaatacaacattttaaaacataaaaaacaacaaatgcaatttaaaattttaaagaaaataataataataataataaaatttatttcttctatgttcataattcttaaaacgatttaaatgcagtttaaaaaatctcttaatgttaattatttatattttggtaaatcgtacaaattacgaaaattgaacacggaaagtatctatttgtaaaatgtcgatttcatataattgagtttgagtccaaactgctgtgaaacagagtgtgtggctatttattgtttttcaaattgagcgccagtcaactgagagccaagaaactatgctaatagcaaaactatgctgtaatgaaaaagaattaaaaaatgaacttttttttttaaaatttaataaaaataattataaaacttagattcaaaagaagggaagtgaagcgatacataaataaaaaaatatcacattttgtagaaaataaattcgagtgcacatagttaacagagatcggacatgtcaagaagaaaaaattaaatttttaaatttttaaacgataaatggaactgaatttattataaaaattattattgaaatgtaaaatgaaaattaaataaataagaaattttaattaaaatctcaaaataaacaaaaaaataaatgtctagcatttgtcgtcagcataaatataaaatttatcttgttatttatttattatcgaactaaccccaagtgaaaaatatttttaattttatatactataccaaaatataatatcgagaaaattagagtaaaaaaataacaagcattttgaaatcaaatttttttattgagttcaagcgatatgtaactacaataatttatagacactttagcttaaaatgtaatcttggaattaagatgccaaaattcgacgtactgtggtatttataaaaatttctgcgtgaattcaataggttgaataaattaaaaaagaatttttataaagttaaattaaatttgccttaaaggaattatgaggccccctttttaattaaagtgccattgacataaaaagcaattgaaacgaaatagattgccaaaaaaattaatttataaatttttagtaaaaattttgttttcgacaagttaacctaagaaattaaacattaatcaataaaatttaaaaaaaatacaagaaatatgaataggataaaaatataaatgatttcgacaaataaatttcacatgacaaataaaaagaatcagactttttaattaaattttgttacaaacaaataaaaaagcttgtcggatttaataatatttgtgaaaagttaaaaaatctaatcattaaagaaataatgcaaaaatatgaataattaaaaatgattaattaaaagtaatcataaggaataaaaaataaataatttcaactaaggaggtatttaataccgngttataaaatgattgaaaataaa

SEQ ID NO: 132 - DNA, 1188 bp, Heterodera glycines
  unsure (1)..(1188): unsure at all n locations
atgcagaattcttttctctatcgatatgcaactcccccctggggtttaacgtatagaaaaaaagttagacggagacatgtaaatgttgttttttanataattaaaatgaagagatagtacgccaaagtgagagaaattacaaagaaaaagaaaaacgacgagatagtactaggcttttctctgcacagtggggcgtacccatagtgtatttacaatcccttctccatcttttcactttttgctcaccttctctttcttaaaaaaacatcaagaaatcgacaaaaaaattcgttctctgtgtacaaaacgcatacgtctctttatttcaattaatttgcttataagcaaagtttcctaaaatctgataactgaattgtcgttgctccgcatttgacaaaaaagaagaaaatgactctccagtggaccgtggttgcgttcattctttacgcagaaatagccacaattattgtgcttcttttgccatgggttcggccgacaatgtatttattgaaaatgttcaaaatacaaattcagtttaattttaggtggaaaaaagtgtttaacagtcgcgttgtgcacaaactcaaacagttttccaatgtttacgcctacgctttcatttttgtgctcattcttttgttcgttggtaagtttactccttttggctcaagtacagtttatgtgtccaatcttttttacatatttcagatgccacccgtgaggtgcgtaagtacagccacgtggacacgactagagagatggtgggacgagtggccgaggcggacgccgtcgttcacatgcgtctcttcaggtgactgattcattctcactttggcacggcagcaaatgttttccttttagagctcagcgaaacctttatttgagtggtttttctctgcttatggcactgtttgtgacggctttattaatttgaccactaataaactttcattatcaggattatcagtcgcatcgtcactttgctcgcccgttgtgcccacctcgaattggctgctgaggcggcgatgaaacaggcggaaggggcgggcaaagcggcgcaaactctgctcggaaaagtaaaattgaaacaaaaatggacggataatgacgaaaatttcgactggtttaggagggcgatgtgaatagtctgtccggcgaagaagcgaaaaaattgcgaaacgaagtgaa

SEQ ID NO: 133 - DNA, 1505 bp, Heterodera glycines
agagggaaagtacattcatttcttttgggatgaccgttttaaattaccaggcttcgcacaatggtaacaaaaagagtgatgaagacgaacgatcgcacaaagaaacaatccttttgactgtgtgcaccgcgtgcttccagctgaccctagtaatccaatggattgtattctttatccgatggaccgttatttaatatggtcaattttatttgtttcggatgaaaaaaaatatataattaattatttgtgagttctatataatgacaaatattgtaaaatggagaatagacgctaacagaataggagatcaatatgagatggatgtaacattagaggtcaaaataggaaaggaatgatagcatagctcttttacgtggcaatgctttagatttctttcttttcctcctctaccgactgttgcaccaaatagccgcgtttttctcgatcgtgttcagccacagtttgactagccgtcactaaatgaagcacattgatcgctgacttagcaagggcgaccgggcagacaacgcaggccaacagaggcacaaaatgaattcctaaaagcccagggccagcccaaaaatggttgacaaatagcaatccgtagaataactcgttgccaaagcacatccaaaacaaacatgtcctgaaggaaatggataacaaacgaacgtaatctaccggtcaactgacttcgatgtataataaacgttcaaaatgggattcttcgaccctttgtgcgtctcttttccggttagatcagtggcgtggagatgcatccaatgtgcggcgatgtctctgaattgaataaattaataattatcgaataggctaataacagccatggtcatataattagcacctcaaattttttattttgttggagatcctaaaacatatccaaaggtgtaaacggctttttaaaaaagggtaatgctaaaagaaatgaccctgattgtattgaaaatattaaaattgtaaaaacgaacaaaaaagcaacaaattgaaagaagagcatttttgttgggtagtaatggcaaagggtcatcagaacaccaagaaaagtgaggcgatcagtgagttggtccaacatagcaccaaagcgagaaccggaaaaggacgatcgaataaaaccacaaactagtgtattattaactggtccctaaagaatggggtggtctgggtcaatggcaactcgtacaaaaaaatttataagaattttcaactaaaacttagaattttttatataaaaaaaatctaacaagggaaccacccgaactgtaagtcggaaaatgcatatgtattatataccattcgatagagcagggtcgacttctattgtgaatttttaatattacgcccccataggaagaaattaaaaagttatggggcctcaaaaatcgaaattttggcttgtattttcccttcacatttggtggtcaagtggcgcgaactgctgtcaggttctggtggttcgagtccgcgtgggtttaacaaattttttt

SEQ ID NO: 134 - DNA, 4905 bp, Heterodera glycines
tggacgtataatcgactcgtgccctctaatggtaccgtctcttttctcactttggttaaatttccgggccaaatatccgtcaaaagcatctaaaagtgcactagcgaagtatagcagtgcggcgctccatggcttttcctcgtaagacatcgcaaaaagagcgccaaaagcgagcaaaatacgcacataaccgagcaggtttgggtagaacaaaaaaacattctcatcactcggacggacgggcggaggacaaccaacgctgacgggcacaaagtcatagggcggaagacgtacagtctcattgtcgacagaaccctcacgcaaacccaaaggcgcacagcgtttgattccgacgctaaaacaaacgcaaaacaattccaataccccaagaaagaacgcacctttcagccattattgttgttttacgccaattattcttaagggggtttctcaacccatatttatgagtaaacaatgaatatgatatttcgaagcaatgtaaacttgtgcggtgcgaatacctattataaaatataatttagtgaaatgtgcttggtctcaatatttttctctgaaaaaccggtcattagaatttttaatagcgagagattatttaaatctttagtaggctaataaccattattaggtatttcgattaatggtcaaccaaagaccaacaaccgattttcctggataatttgagcataaataataagtcataaataaaaaacaacgagctttttgttggtggccaaaaaatcagaaccgtcgcgatgtctctttaaaatttggttcatttcatcgccatgtctcgagggaaatattcgccccgctcgtccctcttcgcaaaagcgttgatcatcaactgttccttcaacagcaccatcatctcatcacgctttcgagccaaacaaagcgcagtggagaaaaaatcggaggcttgcacaaattttttcctgatgaaaaaatgaggtaacatacaggtgtcctctcaacggagcacaaaaacaaaagacccataaaaatattaaattaaaaaaaattgtgcaaaaaatgccttggggcccgaaatttactcaaattaacaattgagaaaaatgcttaatgaccaagcacagcattttaactcattggcatttatttcataaatcgactggggatggttaggcactttgactttattggttatttgaatcaacttgggtcggtcgtctgactcgactcctaatgttttagatcaaaatgttgattattttttgctagaattttgccaagttttgatcggtttgatatttaacaaaaacccacaaaaataacaattttaggttagaaccgttatgtattatttactaaaataaaatgtttttgtaatttacttttctccgcatattttgcccattattctgtacggctcccaataattcgggtccgcctcaattgcttttcgcattgcattttccatactctgcacgacttgtgataaatccaagcggtctgacatatccacgaggctaaagaaattaaacattcatgaaatagagaaaaatccgagtggggagggggtcaaagacatatttcgtaataaattttcaggaaaacataaataaaaagggaaaaaattcactaattgtaaacgaatttcatgggattttcttgagaaaccgaggggagggggcagggacggtcccaggaattcggctgggggagggtaaagccgactcgcgcaaaaaaaggaaacaatttttcatttccctaccctttatgttaactggctgtacatgaataaattttaaataaaatgccgattcttaggaaattaccccaagagataaatagcgtaggcgcaattgggcatcttctcaagcgtttttttgcacgcttcgagcacgatttgattgttgtgcaaaagcattgcgaacttaaatattctttaatttgttaatatattaaaaaataccttagagagaaatataaacgcaaaaatcggaacattttccgaatccgtcaaaatttgttgtagcataaacatctgattttgaatgtcaagaaaagtttgctgacgaatggcaattgaaaggctggcattgatttcgtaataactataaaagaagaaatgcatttgaatcaaaagaatttcattcctttgcgaacgaatcccctatttttgtaggacaccaattgtaagtgaaaagcaaaacgcaccgaatgaatggattcttctgatcaagttttttagcacgttgaaaaatgactaaggaattctcatgttgatcataatgaataagttgaacaccaaaagtgaccgaaaatatgcggaaagtgatttagagagattaggtttttcaaaatttaccagtgggtcgacatttttagggtttattcgaagtccctcctcaaccaattggtggcagcgttgtttagctgtctcatcaattttgtaattctcctcattgctcaacgattcgctctcgaccaaatcagtcaaagtcacctaaaaaactgaatgtataaacatcgataaacaacaaaaaatcaaaatggacaaataggcgaggctccatttattaatagatatattttttttatttataatttttctcaaaaataattatttcatttcagaagggaaaatcctttacggacctgtaaagttatgtgtgcaacatggatatccttgtgcgccaatttctgcgcttcgtctgcaagacgacgaaatacaaaaaaaatttaaagtcgagttcaccaagtttgtcccaaaaatgctcaaatttttgcatcgtttccattgcttgttgtttcagcgtttgatagaacaagaaacgcgccgccaaaagcactgccaatatacggtccacaatttcatgagtttcgtcattcacaattgcaaaagccaaagaagcaatttcactgtgaaaagtgaaaggaggtgttttttgaatacaaatgcttacaataataactcactcgtattctcctcgtttgagcgtcaacaaagcatcgtccaaagcactaatccatcgagttttatcctcatttaaatcgttcgtcaatttgttcattctcgccaacaacgggtcgttggtcacagtactaatcatccattcacagaccatcatttgtggaattttcatgggtttcccaatcttatccttaaaataagcagaagaatattagtggaaactctgtccgtcacctgaatgatttcattgagcaatgggctgatggtggcctcagcgacacggtcaagctcaacatggtaagtgttccggctttctttgcttacattttccatgaaggtcaagtcaagatagtctgaaattccaattaaatgaggaagttttattggaaatgcaaacaaaagtcgcccaattcacactgaccattaattgccttatcattttgtcccaatttgaagtgcgttctcgcgcgacgtctcatcgctttttcgtagttcggtttaatttgaagtgccaaattgcaatggtccaaacatttttcagtgtttccctatgcggagaattaatgatcgtcgcgttttgatccatttaaaagtgcaagtcaaccaaccaactcgtcgaagcaggcagctaaacggcataggttaagaagctcaaacgattcaataaaaaaatttgatttaattaggcggtaatactggagaatctgagctccataaaaatcattgtttggctagtaaatcagattatttatgttttgtacgattgttctatgatcatctcaatgtttatgtcgtatcattgtttggctaataaagattgctactcttgcaaatctgacataacatataacagaatattttttgtggagcacagattctccagtattatcgattgggctaattgcagcgccccaaaaaaataaaaaatttgatacattaagccttttaacccaccattgttgttctcgcacaaagacataagttctccgattttcgcttcatccacttggtcgctaaattccttgccgacttttcgcagttcgtcaatggcatcgccaaacaaacgaattgcctccttaaagtctttgcgccgatatgcttcaacaccctgggctttcttcttttcagccttttggagaatggacaccgatttctgctcacaatcgtttcggttccgacaacggtaaaactaaaaattataaaataagaaaacagaaggaaaaagaaaacacacccaataaataagcgcactgcctaaacccaaggcagtggcaatggccaatgttcggctattgagcgaccacccgcgagagtgaggaacagaattagcgctcatcacttacaattagccattaataaaaacaaaacggattgtcaataaattaaggaaataaattgaattagtctcgacaaaaattcacaccagtccaaaaaatctgtgtatttatttaaatcagtgaaaattgatgacaaatctgttaacagagtctaatctgcgtctgtattgtttttaagctgacgtcgcttttgcctttctttcgcttgtctgtccgccaaatttccgcctttgtaatgcgaagaagtccgatcaatggcaaaagcactgtccacgaaaaaggcagaaaatcgctcatcgctttgcacttgggcggcgtcgggcgatggtgctttttcattgtcaggtgggtttagctaaatgagatcaaaggcgtagccaggaccttcgtttcgggggggggggggaggcccaactcaaaaagtcggttcttaggggtgtattttcgtgttttttttaattgaattgattgcattagacgcgttcaattgtaaatgatctgttttttttatttcataaactcgtttgttatttttacaaaaaaattaatataatatttttaaaaaaataatttttttttcaaaaaattctgatttcggggggggggggg

SEQ ID NO: 135 - DNA, 2300 bp, Heterodera glycines
cccccagctacgcccttgaatgagatcggttacaaatgcaaatgcattagccatttctgcaaatttctcattcccgcccatctttcccacctcgtcccctctccgccgtttccgtcgcttcgcctcttcctgtttccgttcctgcttcagctgcttcttccgctccaaatacagctggaacttggtcttgcgcttcggtctctgtatgtccaccgcctcctcctcgctgtcttcgtctgtaatttctctgtcttcgccgtcgctttcgttccttgtcctctctttctcatccgccttttctttctccacattttcatgctgttcgtcgtccttctcttcatctttgctttgctgtgccttcgaatttcccaaaaggccttcacgcgcagcggccaataacatatcgcgctttgcattccgctgattctgtttgtccttttcctcctcttcgctgtcggagccaatgaaagcgcttaaccccaaaaattttcggaattgatgatactatttatcaacggtacggtacttaaactcctccaatttggcctcctcgtcgaatgctcgcttgaatgctcttctcctctccgggtcgtccgtctcccaactgatttttgggttacttgcggtgagtgtgtgcattccaacttttcgtggccggtaccattcagcgctgaactgatccgacaaaatttgttcccgaattcgttcagtctaaaggagtatattaattattcactgtatattcatcccacctcaaattccattccttcggggataaatcgaatgtcgaatctcagcccactggattcgtacttaagggagataaattcgtatattgaaaatgaaagaaataaaataatcacttacttccacgccatcacaagcttcgtatatggcagtcgccgtgtcgacagagtcacacacacaaacggcgtaataataacgcaatttgtccaactcatgcgcacggattgcttttttcgtttgcctatttgctttttttgtaaatgaattataatgcaattctatgcttactcttccaatttgtcctcttcctccctctcatttgcttttctattgaatcgcttcactttcaacatcggtccgtttcgcttttctctctctatgcttttcgctccaaaatccgacaaataaacagaaaccgagtgaattttcgcttcgttcggttttagtgagttgaataactgaatccaatttatttgtaaaaaccagtgcaatttctttgtttattgaatcaacattttttgtgccaaccagcattaaatccgcagcccgcacattgccccagtccaaattgcagattgccaacttagatgatgcccattccacgcgtcgcacttctttgtccaattctccccaattgtcttcctcctccccctctttgttttcgcccgttttttggtcaaacatttcatccgatgattcgtcgtcacttgacgaagagatgttcccctgtcctcgagccaaatcgaattgaatttgctgcactttgtcttccgggagaacatttggatcgcattcgatgtccgactcactgtcagttgtttcacaactcgatgaactcttaagttgcatttctccacttacagacggcggtgccgtccttaaatgagggggtcataaaataatgattttatgacaagttcaacttctcatcgtgatataactcgtaaatgtgtgacaaatgcgcatctctgttcgttttggtcgtaggccttccgcgcctgtccatcaattggaaagcgtcctctcgaaaatctttgtcaaccagtagtttcttgaaacgatcatcgatttgaactttgtgctccttcttgcgcatctcgcggagcattggggctttcgccaaatgcataaaacgactatcatgttcgacgtcaatttgcttcttttttgctgttcgttccttcatgttgcgtttcattttagtaacagagtaaaggtcaattgtaagtaggcgcaaagatttcacaagtaaaatatttagcataacacaacaaatttaaaatacgtgttcatgactccagatttataaaatgtaggtcgtggcttattgagcctcgcatggagcatgcacgcagagcttttagcatttggtaaatcgctcaaaattaaaaaatatggcgaaaaaaaaattttaatcatagatatctatcaaaacatttgtgagatcgacaatcaatggaaataagcaaaaataaagcaaatcagagtaaattatatggacggttgtgcttcagtgcactgcaacagatatggcagtcacgttccccgggggt

SEQ ID NO: 136 - DNA, 2269 bp, Heterodera glycines
  unsure (1)..(2269): unsure at all n locations
ggggataaatcgaatgtcgaatctcagcccactggattcgtactnaaggnagataaattcgtatattgaaaatgaaagaaataaaataatcacttacttccacgccatcacaagcttcgtatatggcagtcgccgtgtcgacagagtcacacacacaaacggcgtaataataacgcaatttgtccaactcatgcgcacggattgcttttttcgtttgcctatttgctttttttgtaaatgaattataatgcaattctatgcttactcttccaatttgtcctcttcctccctctcatttgcttttctattgaatcgcttcactttcaacatcggtccgtttcgcttttctctctctatgctttccgctccaaaatccgacaaataaacagaaaccgagtgaattttcgcttcgttcggttttagtgagttgaataactgaatccaatttatttgtaaaaaccagtgcaatttctttgtttattgaatcaacattttttgtgccaaccagcattaaatccgcagcccgcacattgccccagtccaaattgcagattgccaacttagatgatgcccattccacgcgtcgcacttctttgtccaattctccccaattgtcttcctcctccccctctttgttttcgcccgttttttggtcaaacatttcatccgatgattcgtcgtcacttgacgaagagatgttcccctgtcctcgagccaaatcgaattgaatttgctgcactttgtcttccgggagaacatttggatcgcattcgatgtccgactcactgtcagttgtttcacaactcgatgaactcttaagttgcatttctccacttacagacggcggtgccgtccttaaatgaggggaagtcataaaataatgattttatgacaagttataccaacttctcatcgtgatataactcgtaaatgtgtgacaaatgcgcatctctgttcgttttggtcgtaggccttccgcgcctgtccatcaattggaaagcgtcctctcgaaaatctttgtcaaccagtagtttcttgaaacgatcatcgatttgaactttttgctccttcttgcgcatctctctgaacattggggctttcgccaaatccataaaacgactatcatcttcaacgtcaatttgctttgttcgttcattcattttgcgtttcattttagtaacagactaaaggtcaattgtaagtaggcgcaaagatttcaaagtaaaatatttagcataaaacaacaaatttaaaatacattttcatgacaccagatttataaaatttagtcgtggcttcttaaacctcgcatggaacatgtacacggacaaaaatcggtctgataaaattatcgcttttcttgtgcccgtttctttaaatatcggagtgcagacttcctttcttttttataaaacttaaaaacgaaaaggtaaattagaaaaataaataaaagaggacatcttttgtttcgcaaaaaattgtcctaatatttaaaataaaattttaaatccttaaaacaatttccagagaccggggtagccgatcaggaatttcacgtacatttcgaccaattactaaatccagacataaattagaacaaaaagtccaaaattcaggaatgtctacaaggattttgtatttttgatatgaaaatagtttaaatgatcttttagaaacattttaaagtctttgaaaacaaaatatatattattagcgctaaaatatgtatatgtattggaccttaacaattgactctcgctttttcccccattccttgcgcaaagtctcctctttttgatgtctccgaaacgaagacatatacgaacgaatagtgggagtatcagcattaacaaaaaaacaaatgcttttctgatttccaacaccaacatccgccgtttcatactgactagtagaaaagttggttccctaaaatggcaatggtgtaaatccaaatgttgtagatttagtgatgcttgagcccagtgtggttaactgggcggcaggccaactgggcggtatgggacacagattaggacccgctacaattagctaccgaaaaatactgagcgtgtataaaaaaaacatataataagttctgttaagtggctgatttttgtgagaccagaagcgcttaaaaaataggaaaaccttgttacgttgaagaaagcttggacttataacagtttgcccccatacaaaaattttttttcttttatgggaaaaaaaggggttccaggggtttccggggcctgctgatcatgaatataaa

SEQ ID NO: 137 - DNA, 5064 bp, Heterodera glycines
ccgtcaagatgtcccggtccgatgttagccctatattcactcacaaggggggggcgttccgaagaaccggcatttcccgaaaaatagaatttcagtaacccagaaaacctcggaaaatcattacctcgtgatcacttgtataaacccgaccaattgaagcaagaaaactaaacggttcctaaaataaattttgaattgtataaacgggcttaatcaaaagataactttgtgtttgtcatcgatttgaaccttgtgctccttcttgcgcatctctctgaacattggatttttcgccaaatccataaaacgactatcatcttcaacgtcaatttgcttcttttttgctgttcgttccttcatcttcgtttttctaatatagtaatacaaaatcaaaagtttttgtaaacaaaaatgtgaaagtaaagtaataaataaaaagcctaactttaaaggctacattactcacaattaccgggactcaacccaccagcatttcaatcactgggactcaacccaccagcatttcaatcactgggactcaatccaccaacattccaatcaacgggactcaaccctccagcatttcaattttttgaaattttgacctaaaaacggcaaaattttttattttttgttgcaaaattccgtaaaaagaaagatgagttttcagggcggcactgcgtgtatgccggattccagagatcactacataaaaatagagcaccattcctaacctttcattttgatgattaaaataattattcatttatttagaagcgatttactagcaaatttgcgcaaatgaatggccaaattattaattcggacgaattaaagattgtttgtaagttaatgcatttaaatttatgggtaatatttactatgctttgtctcccctaccgcctttttttggaagaaaacattcttaagtcgtgagaatatgtacatggaggatttccagggtctctgatcatgaatctgacattcctcttgtccactttcaaacccggacccaaattgaccttttttgatgctgtagtggttttttacaaatttagcttgtttaatctattaggaacaaaagtaaaaattttaaaattatgaattttcaactttttgttcgggttcgaatctagggttagaaattggtcgaaatgtgtttaaattcgtgatcacgaccctcaatacccttaaaacaagattttacgaattttagaaaaaaaattttctttcaaaaaaggggatgggcaccagccttactattaccacggttttgactcaattcttatgggtgtatttttcgcattttttgtgaaaatttaaaaaaaaaagacgaaaatatgctctaaaagccttaatatggcaaaatatgcatttattcttgaaacccccgacaaatgcttttatatgcactcaaaacttttaccaataaactgaatttatttttttgttgtttaattcttaattttctattgtattattagtcacacataaggcgcttcatactttgattgcatattattcggacgtcgcagtaccaactggaacaacagttaacagggacggatgtgggctggtaaatttagctaaattttgtttacaattgaatgaaaattaagaaaacttacgaaaaatcaaatttgatgtaaaatcatagatttaaagatgtcaatgacaaatctgataaggattattcttgttcagcaccctctctctatacctgggatggcacggattacgaaaaaaatttggacaattctgatttcctgattttgatatggttgaaaatttttttttcaaaatttgtacaaattctgttaaaaatttgcactggtattttcaaaaaataccaagcggtgcctattgacagcgcaaacaaaaaaaaagattaatgaagaaatcagattaattttgtcgagcaaataaagaaatgtgattttaaacgttttggggtcggaatttcggcattttttcctttttatgggaccactgttacatcattttcaaattaagtcattaaacacgcatacctattataataataatcgtaattacctaattcagacaaaacggcgattcttgtgcccgtcggtcaagaccaaagaacagatgatcttcgagatagatttccgaatttcggcgacaattggcgaaaaaattatgtttggtaaaaaacatgacggttcaaccgatgatcttcgcgaggcaacgagggtaagaaaaaatgtttttcaatggatcaaggggatatttgattttgtttttttcattcgaaaaaacacgaatcctgtttaccgtctgaataattattttttagatgatcttagacatggtaaacagcggaatgttttacgacgaattgggcctgcgcgaatttactgtaaaaatcttacttctctatgtcttaaaacaattcctttttgaggttgccccaccaggaccggcactgaaaaacaaattggacaaatttgtggaccggaaattgaatgaatgtgtggcacgagtggagaaattagtgaataacaaaaaggttaaattgagtctaataaaacattaaattgtggatggtgcaaatgatttcaggacgaagtgaaagacctggccgagcatttggaggcaagcgacggttggcacttgaacgaggaacagatccatcaattcttcaaacgcagaaacgcaaatgcgtccccatgaagaagcaaaagaaatttatttcacataaacattacaaaaacaaaaaatttgtactttcttaacccttcccctgctgaaaaataaaaatttaaaacaaaatttatttgctttttaatttaaaattggcttatacagcctaattgtcatggtccatactgattcgtgatcagcgaattcaaaccctaaaatatgttgtaaaaattttgattttcaaaaaaggaagggcttcccaacatggcaaaatttttcattttttaaaaccgttcaaattcctgctttttatccccgtcgcttaaatttctgaaaaataaaaccggtgaaaatttttttggctcgaatagcaaaaaagctcggattcgcgcctggaaatttccttttctagctaggggcctggacaagtgtacgacataacaaaaaagtgtaaaaatgattgtttctttaatttaattcttcgctgcttccattcaacgcctcctgaacacatcggccgcctcgtcaagttggaaggcgaacatgttcattcggaacagctgttgttgctccaccgattaagtcatttgtcttaaatatcaatttgagtattaatgatttttcggagacagattcagaaaacaatgacttaaagggagagtgatgtcggaaaagcatgaggacactccatcgacgggccctactcgccggcggaggaacagggcaaattgccagcacttttcaactgaaaaataaatacatcggtagatcggcactaacatttaaaacaaaattaaattccaaggcatcaattgtttttgtccattgaaattgccatttttatgttgtatatgtatataaattacggattttgatgcgttaaattacatgacaaaaaaagaaacacaaaaggaagtaattggacagccctctctctcccacacacattcgttttgctttttgccattcatttgcccgccgtcgcttcggccctccgtttgcattggatgaagaacagttcgtgagggccgagatttggtgcacggatggtacaaccaagaatggcgtcgagccaaacttgaaaaagtagaattccatggcgcaacaaattttttgtaagcaggcacccgccatccccagaacgtacaaaaccatcaccgtgcgccctccctacccatatatttaaaaacaatttcgtcaatgaaatttgaatcttgtgatggctatgatttattttttgcgaacccctcctattgcaggttaaagtgtaagtaataattttttgaaaaatcttagtaattgaccataaaaattctcaaaaaatttctttaaaaaaattttttttggggggggggggggaacgtagtgcacacccttacgtttatctaattattgaaaagtatttgtaaagcgatcaaactgtctatttgtaagcccaattctggtttatacgaaaaatggccactcatacgcaccaacaatgcgttgtttgctgtccgtccgcacgcgtacaatttgcatccgtcgacggagtgatcgcttgccgcccttcccgtcggtggacaaaatttgctccagctcgggccacatgcaaatcagtgagccggacagcacaaaataagtgcgcatgcgacgtccaatctcacagaaagtgcctttcacctccgttgaacatttgccgtaaaagaaacggtggtggcacatttgctcccatgctgaaaagtgccaacatccatttttaaatgtcattgtgggtcggaaattctaatatggaaagcgagtgtcattttaagactcatgaaaactgaaaatgttcgaccccaaattttaagacccatcaaaaatagtgcttctccccatcattcgcctttttccttgccctgttctcaccgttaaactgctccttccacaacttttctgcatgtgccaagttttgcactgcggtgaaccgctgtgccaactcgtccatcgtttcgtagcgcggacttcggccggtgttcggcttgttgatgcagtacatgcgcgacatgcccaagccggccgggaggtggtgatcactgcaattgaaaaggagaactaaaccggcgggactggaatgcattgaccggcaattcatttccaaaacccggaattaaaaaaaaccatgaattcctgtcccgatctcggcaaagtagcagattgttgcataattcatttcgtcaaaaattccccgcctcctcacccgttggcgttgtcaatgcccagcccgaagatgaacgcaatgctgtgctttacgcatccgttcaacccgacattggacgtgtagaagtcgtcgccccgtttgcggtgctttttacgcagttcgcacacctcgtcccaggagatgccgcgcatcacctccattttgtcatttccaccaca

SEQ ID NO: 138 - DNA, 2716 bp, Heterodera glycines
caccccgcagatactggcctcactcaaattttccaagaaatgttgttaaatctttcaaaaaatccacaaatttttaatgaaaatctgctaaaaatggctcaaaatcacaaaatttggtcattttttggacaaaatctattaacaaaccgcatttaaaaccgcaaaaatttttccggcggcgcctatcggcaccgccggaccccctgtaccccaaaaatttttttgcaaaaaccgcgccacataaaaaacgggtgtgaaaagcaaaaaaaaaaaaaggtcgtcgcccggggggaggtgcccccccccaagccaaaatcctgggaccgtccctgaaacccggaattaaaaaaaaacccatgaattcctgtcccgatcttggcaaagtagcagatagttgcataattcgtttcgtcaaaaattccccgccccctcacccgttggcgttgtcaatgcccagcccgaagatgaacgcaatgctgtgctttacgcattcgttcagcccgatattggacgtgtagaagccgtcgccccgtttgaggtgctttttgcgtagttcgcacacctcgtcccaggagatgccgcgcatcaccaccattttgtgcatttccaccacaaagtcaccacttttgccaacaccgcgaaactgacggtactctttcttgtgcacccgatcattgtccattccgatatctatggcacaaaataatgttggcatttttttggaaaaaaacttcaaaaactcacccaaaatgcccatgtcgaaagtgccgtccactttggccactttgatcagctccgcgcaaatgtcgctgaagtactggaacagtttgttctgcgcgtagaccggcaggccgagcaagcggttcaggaatttgggaattgtcactgtgtcgcgctcgaaggcgaaaccgcgcccgcccggctgctgctgcaacatgccgacgccttccaggtaggtgcgcatgtcctcttcggtgatgttttcgagcattttctcttcagaatttttggatctgattcaatttcggttcaacaaaatgcaatttattgaaaggataaaactcactccgctctcgggttccttcatcacattttgttgctttcgatagatgtcgaaaatgtaattgttgcgtcgctcaacgtcctgccatctcttaaacatatttatcttccaaaatcaattcaaatggatggaatggcaaatgtccgggccgcaaatgtccgatttggctgggaccgcaaatgtccgggacgcaaatgtctggacaccaaccaaaggattaaaggagaaaataatggaaatttaacaaatggaaaaaatgtgaggatcagttgtcctttaatgccgaacaaaaagcccatgtttatcattttcggtctcaaaaaaactgggagaaaattgcagtccggtgacatttgtgcagtttgcacacaccttctccaacatgtcgtccaggttcaggctcagctcgcaactgatcacaatgctgtgcggcagccgggcgagtcgttccacctcctcgaggcttatttggtcaattttgttgtatatgtgtaggcaggggatgtacacccggttgccctggatcacgtcgatcagttcgtcaatgctgaaacatggagaatttctctttttgggatgtcaacaccaaaccgccatttaaattttatggaagtaaaaggtgtttttaaaatttacaaaaacaaacaaagaataaaaactaatagaatgatggtaacataaacatcactaaatacctttgaataaatccttaatggcctcaaaacaattcatttaataggacaaataaaagcttggcattttggttttaaatattttgtatgaaaaattttgtattcgtgcagcaccgtttggatcagtttctcgtggcaatgtgtcaacggcactgtatgagtgaatttcagtccgcccccatttttctttttgaaataaatgtttggcggccgtttgttgagccgaattccgaccgcttcgagttccttttccaacagcgttttctgaaaaatgacaataaaatgacataaaattggaagggcgggggggggtggcaaaaaataaatcaaaattccttggattttctttttcttaaacgccaccaggaaatttaaagaaaaagtgtaaaagaaaaaaattgcacaaatgtaaagaattaaaaaaataatggggaatgtaaaggagaaaatttacaaattttctaaaaattgacaataaatttacaaaattttacagagaattttttttttgaaaaagacaacccatgggtattcggaccgggtcggttgggccccgtcgattgggccccatagagcagtcactacatggacaagggaggggagggggagtcagaataaaaaaagttatattgtcaaatgttattgtttgcgtgtttcattgcatatttgtaaatatatttggcttcatatttgttttataattttttatattttcccatttcttgattgcctaactaaaataacattaattcagcttattatttaatatattaatatcacgatggaaaataattgaagtgccgaaggcgaacattatggaatttttgattggtgtttctcgaaattaccagatggatgcttagaattttatgaataaatttttgggatgttaaattatttttgacagtatggaatggaaaatgtgacagacccttgtggcccaatcggaggggcccaatcg

SEQ ID NO: 139 - DNA, 1276 bp, Heterodera glycines
gaaaatttttaaaaaatttttcagccaaataagaaaattttttcgaattccccccccccaaacgaaaatttaaaaattttatagacaattttcgtaacaaatagcactcaaattttccgtaaaacggccaaaattgggtccttttttagtgaaaaagtggagtttttacccagtagcgggaaaaagttttttttaagcagccgccgccgacgaccaaacaatagaaaagtctacaagtggaaaattgcagttatttgcagatcgtaaacaacttttatcaattttattcagcgaaaaaaaattacggataaatttgaaaaaaaaaggtcttcggaccggacccctctctttccccccccccgaaaatttttcctggctacgggcttgttgaatgacatatgcaaattggtacaaaaaagccaagtgtttacttggatctcccccttggtagcgtccaacatcatcagaatgaggtcggcagtcttcgccacggagatcacttgtcctcctcggcctgaaaagaaatgccaaaattgttttttaaaaatggttctcaactgctgacctttgccctgcgctgccccctcaatgatacccggcaaatcgagcagttggatgttcgctccttcgtactggcgaaagcgtttgtggacaaattgcagcaaaataaacgcctacctcaatcacaccaggaatgcctaaaataacaggaaaaatgaaacatttcacattgaattagcccaaaatgaaattacatgtcaaagtggtgaattcgtacgaggcagcaacactctgaaaacaaaaagaagtcaaaaactataataccggaattttacacaacaatttggaagcgaaaattaaaatttgttaaaagcatgatttgtaaaaccaaaaaatatattttctgcaaaagcgttcacaaaaaacattgcctctgttgttgtgacggttcaaaggaacgttgactttccaaaggatgggaaattctgctgctgttgtgccgctttgtccgcctcgtccatggctcggcagtcggccaactgttcgcggactcggcctagccaagcggggcccaaacggcggagaagggccagtcggtgcccatgcaacgcatggccaacgagcagaagacagatggaggcgtaaaacctgaccgaggacggcggacctgacaaaacgcaattgaacagtgtcaaatttacgggagaatggctaaaaacccaatcgttcgggctaatttatttggaagagtcatccccctcctcccaactggaaa

SEQ ID NO: 140 - DNA, 1543 bp, Heterodera glycines
atggtgtaaaatgtgtttctttaagtggcagtgcacggcgattcatccagcacccagtcattcgtttcatccgtctgttcggctctcttcgtttcttccgttcctccgtccgtcttttcagcttcgttcggttcgtccgtgcctccgtccgtcttttcacacctaaaggtttgaattcggctttgcggttcggaattagttgaaaaaggagtccagattcatactcagcgtctcaaaattcagcaagatgttataagaacttttagaaaatttttcgggaccaaaaagaaacttgattgccttcaataaactttttcaaattagctaggtaacgaaaaaatgattaccggctacgctggcaccttcgagagcggcacttccaccgggaacgggttgttcagttcgagcctgcagatttacacatacattaaaaacttttttttaagagaaagtacagttcagggatgggagccgatcaataacacttcaaaaaaaatttaaaaattctaaaagcactttctatggtggttttcgggcaagttagacacgaattgacacactttttgatcaatctcataccccggatcagaatttgaacaaaaagtcgaaaatttaaattctagaatttcgcatttttcatctaaaaacgacttaaaaatagtttttatcgcaggaaatgatggccctaagtttgttttcctgtatttaagccgtatttggacgaaaaaaagatcttcgacttttggttcaaattcgggtccggggtccgaaattgatcgaagctgtcagattcgatttagcgtgcctgaaaccattgctgaattgggtcccagtagaagaaactatggcgtaaccatggggacgtgggcagagggctaaagtgagtgggtacagctcaccctgtcctcccaaaaattgtaatgcatggaaataccaattaagtagaaaatgaaaaaaaatcaaaaaacctctgggacgttcccccgtcctacatcaaagttctcgctcattaaaaaatctatctaaaatgataatatgtatgtatttggcaagtttcacaataacaaaaaatatacatacataataatctattatactaattgggtgtgtcattccgtgtttttttgccttttttgagcggaaaaacagattatttattggcacgaaagattttgcaatttctctctccttcccttttctttctttgttattgctcacatgcacactcgattaagacaccaaacaacaaaaagagtttgttattgacacaccgtgcattttcaaaagcaaaaacaatttttcttatgaaataactttgattggttattcttctaagcgaaagcttttattttctttccaaacagaaaattttccttttcctttattctgtatttgctctaaaaatgtaaatcaaatgtttaatccaattctctggtaaatttttcattttttgtatttgtgtttccatattttccatataatccatatatttccatatttcactttttcgtccatattttttccatatttcgccatgtttgaa

SEQ ID NO: 141 - DNA, 1416 bp, Heterodera glycines
tttccatataatccatatttccatatttcgctatgttgaaacttctaggacaacttttttttgtccatattttccatataatccatatttccatatttcgccatgtttgaaacttctaggacaacttttttttgtccatattttccatataatccatatttttccatatttcactttttcgtccatatttgttccatattcgcaatttttagggaaacaaaatttatccaaatatttttagcaatataatggtgcgcaaaaaacaaaagctaataactgacgattgtgctccaagcacttcaaatgatcagcgcacgaatgacgggttcaaagctcccggtcaaaaaagcggtcaattgattgaaacggttcaaagctccgtacaaaagcggtctgaaacaatacataattcgattgaattacaaagcaaagaaaaaagtacagaaagacgttgtttgaaaaggaaacgattgcaaatggaagaagttatagatttggatgatttgcctgatgaatttttctctcctagcatatcaaatgaaaaaattaaggaatacgatagaaatcgcaaaatatcccgctttcaaatgaatgaagaacagagaaaattagagagagagttgaatttaacagttgtgcaatctagacgatttttttatatctcagtgcttaactattgcctttttgtatgataactggtagatattgggagtgaaaaaaagtttgtttgtgactatttacaataaaaatttatgcagcatttctaaaaaggatgtaaaaattatttcttgcgtaatattttttacattatgttgttgaagaatttgagtctgcttctgatgcaattggaaaatttttcagcttttctcgaaaagttttttcccagaaaacggatgggtcaaataaaaaactaaacatctcacatgaccaatttaaattcccttacattttgggtttactttattatgctggcccataaaaaatggagtttttccggtgccaaatttttgtgaattttctttcggcccgtcataagcggattgtttgggggcaaatgaaaacaaattttgtgttattcgaatgcgctagccgagctctacattttcaaatgtatcaacaaagggtctatctccactctctggcgagttatgtccagccaaagcagagtgggccataaacacgaattttttaatctttggtatttcctctattttgagcctgctctacatttatgtattgtgccaatatgcctattgcaactgaaatttattcaactttcccgacaaattgttgagataattattctagacgatttttttatatctcaaagcttaactattgcctttttgtatgataactggtagatattgggagaaaagaaaagtttttttgtgactatttacaataaaaatttat

SEQ ID NO: 142 - DNA, 17934 bp, Heterodera glycines
ggaaattcgcccccgatttcgtctgcctgtactgctcgaagtccgtctgcgccaaacctatctcctccttgagattccgtcgaattcgtttgtaacttggcacgatcattgaggagactgggagccatcgaactatctcccaaatattttttctcgtgtctctgaaccgaatgcgggtttgccgaatttcccgcttcttcctgtgttgccgaaggcacttctgccgctttttcgaaaactgccgatttctccgtcgtcgttgcgctgccgtatttctcgtccgagtcgtgagggccattccctcgagaattgtcgttccgaatttgtcgatttgccttttcgtcaggctgtacagctttaacttctcgtcctcgcttttcgatattttttcgcttggcttcctttttctcgttctccgttgctgccgagggtgcgttccgatccctcattttgctctgagtctcggttgctcgctgttcttcgagtcgttcatgtactgcttcgtcagctcggtcgtccgtttcgcccgtttttggccgcgcttctttcagcggccaaattttcttgatcggtcgtctccgagttcgtccgttggccattctgatcatggcatttctgttatgttcgctcgctccttttgtctcgactatccgtccgatgggccactttcgctgtttagggtccatttccccaattggctcctctcgagacgtaataacttcgttcgcacccgaccgatcgggaccaagctctgcaggtgagttgtggcggtctcggctaacaatccctcgcgaattgtttttccgactctttcgttttcgcttccaatttcgacgtacttctccgatttgttgtcgtttatttgttcgagtttggtggatatttccgcatggcatggttgttaggattgatgccgcgggagttgccccgctgctcgcttgtgtgccttcgccgcacaaaacttgtccaaacacggtgtcaatcacatgcgcgccactctcaattttccgaaatccgatcacgtaatcccagaactttcgaatgccgatcattatttgaggttgcgttgtctgtgtgatggttcgcgggtcgctatcgggtgttgctcccgactcgatgagttctgttctgattggcgtacagatctgaggtacttcggacacctcaatgctctcccatttgccgtcggtccgtttgagtcgtaggcgataagttgctgaccgaatccgctgcttctttcctccgaacacttgaactgtaagcggccgcttgtcgatgggttgcggtccgagttgttgaattagctccgtatctgcgccgtcgacatggcttcccgggtcaagcaacaaagttgtttggcactcgtcttcgccttcctctgcagctgcgatcactctgcatatcatttgctgggccgggagtcggcttccgaaagtggtgaaagcccgttgttccccggcgttcgtctcgattccgtctcgaacgttctgctcgtctcgcacttcagtgaagtgagttggtcgatccatcccactgatcagcgtcgcatggttctttgcccttcgttcgtgctcagtgaaggatcgggattggccacccgatatgctcttccagcacagaagccaatgatggtcgtcttttcggaatgcgttgcaccggtttactcgttggcattgtttaaataagtgatcggagctcatacagcgcaagcatcgtttctgctcaatgagtctcttcctccgtgcctgtgctgtcggataggcttggcatttgcttggtcgatgtccacttcttaggcatagtgaacagttccatatctccgttgtggcaattggtccgtttgatgcgacacggggccaattcccgcctgagctctcgttctcgttggcatgtgtgatcgatcgtctggcgaaacgggcgttcgtcccgtaccgctcctcgcttcgtgttccgttggattgtgcacgggttggttggctgtcccgtaccataaatgctctttgaaacggttcccgacctgcttgaacatccagtcccgtctgatcacgttctgttttgtgatcagtgcgtacttccgggtctttcattgctgccaatgctgactctgctgaccgcatgcaccgtacttgcgccgccaccgctctcctgaactcgcgcactgaccatttcgatcccatcatgctttctctgatccgcaattccgtgagcactcgcaccggcaattttgcctccagcaatgggccaaatgagtcgtcgtccacgttcgctccgagctgctcgagttggcaaacgcatcgctcaaattcgtcgatcatcgttgtcaagctgttcacattgtcctttgccggtgccaaatgaagaagccgggcccgaattgcccgctgtaaatcgtccgtgtcgccgaatcgttctttcaaaagttgcacgaccaccgggtagttgccgtcggagggagggtagacttcgacagcccgccgggctggtgatccctcctttaagcagcgcagaagatgcaattgtttttcaaacccgggaatgggtttgtcgtccacagctcgcttgaaataggcccaaaatgtcgtccaatcctcgggctttccggaaaaagtcggcggttgcagccgaacagtctcgaatgttgtcattcccgtgatttcgtccctcccgtgcttccgatcatgttctccctcgtctcgagcatgccgtcgaatcgggtatgtctgacgctcccgatagtcgtcgttcacgtgagcctgctgcttttcgatttttggttgcatcagtgccggccgatgggctgttgctgggggaaacgcccccatctcgtctcgatttcgattgatccattctcgcgctgggttcgtcactctcatgctggcgacggatggtactttggcacgccgctgaaaaatcccgtccaaattcgacatgacgggtgtcgcgactcgtcccattggtcttcggttgtgttgcagtacaccttgtccgtcgttttgccatcgtttggccgccacttggaaggatctctcccattcttccatgttccgattttccagtggaggtgggtcgtcccccaccggatggctgttgttggtcccgaatgacccgctcaatcgggaccgcgcgattgcttcttcttcatcctcgagtgccagtcgcatcgtccttaagtctccgatgtgctcgtccgcaatttgaagcagttcagctggtgttggatggtttcgcaactgcaactctttcgttgccgccggcagtggcgctgtcagtatgtcgtagaagaagtcctggtgacctgcgggttctgctcccgctgctgccattccaatctcgaaatgtccttggaagatttgagttgcctccttgagtcctctctccatggccaaaagtcgcgctgcttggtagcctgcctccccttcggtaaggtcttggtcgatcacttctcgagcctccgcaattcgagcgacgagagtcccggatgctctctcgattctgtcccgcgctgtccgtaccggtatggatacactccgcaaattgcgtgatgggaagggtagcatcccttgctgatttgtcgccaagcctgtcgccatgttgcttcctctcgttgcttcgtttactctggcaactttttgttgctcttcgttcgttgaagcgacgggaccatccccgtcctgcacattttcgtcgtgctgtgcgccattgcgatggccctcatttgctgggtccatgttgctttcgctcccgtcctcgaattcgagtcgttgcatttttcgtttccgtctgttctgttcgtcgaccgaaatgtttcgctggaccccctgctaacggcaccagtttgtcgccaatcttttatttgcgccgcgcgcttgggggttggggtgggccaagctgaggcgggattggttcccgctcctcttcaccgctctcgtccctttcgctttctgctcactccgttcgcttgttgtaaagggaagcgcacccttttttgccgttctttttgatgggtctgatgctgctgaccgatccgatcagcgccaaagggggacgagaatgggaggggggaggggtgacaaatttggattggtgcttgagagaactgtgcagcaaatcgctgcttgcttaacggcaccaccgacaaggttggaggaagggcttgtcggacccctttgactcgacgaccacgggtttcgactcccgttccctgcggcggacactccggctggtgggagtccgcttcgatcgacgcgcgcttctccggctggtgggagttacgctgacgaacggccctgtcctttcgtcggacgatttggcaccgctcggctcttccttccttcactgccctgcttggacttgacgacgacgggagttctccccgtctcttccgctgctcctactggtgggagactgaactgctcgaatttggcgctacttcgggtcactcccgaattttttcccagtggctgatgggagggggatttgggatccgggagggttgagggaaaagacgtaggcgaatgtgatggagtgaggagggtctttttccctccttaccgtgtcccccgaaaacgaattcgagacttcgattccgacacaaaatttattaaagaagcgatcgacgaattaaaaatgcgtaaaatggtgaaaaaattgatcgaaaagtccagcaaaacgaataaaagaatggttgggggtgaaggaagcgaagagagcgaccccttgggcagggccgcttaaatagacattcgacaaaatgggcggagtgacagacggcccgataatgcgatgagaaaaaatgggacaaaaaatgggcagaaattgtgatgtgaaaagtgtgaacaaagaaatggcgcataaaaataaaatgtaaattggcagatgtgaaaagttaaagaaattgaaaagaaagaactttgtgcaaaattgttttgcacaaagcttgggccggagattagccagccgatgagaaatgaatttgtaaagaagtgaaaaatgggacaaaaaataggtgaaatgataatggctggtacgattaaatggagaggaacgtgatcaaaatcagcgatttaggaattgatgaatcgggaatccgcccgaacgtctcgtcgcctttttgctctttttcttccggtatttcttcgtctttgacggtccggcccatgtgctcgtgcttggtcccgagaaaacggactccccgtaacggtcctcctcgtctgtgtcaagttctttcccgattcgctgcccgtccgcgccctggttgaacgcgagcactcgcgcacgccgtggcgggttggcacccgccttctcgtcgccaatgagaaaattggcgacattgccgccccgcgaccgattttcttccctggcctcctcagaagacgccagggagacgccatcatcctcctcctcctcggcaatggccaatcgaccgagcggcgatccgggcattccctcccgggcacacagctgctcctccgccttctttgccgtctcctctttctctttcgccactcgctcgtcctcttctttcgctttggccaaaatctcggccattttctcttccgatgcctttttcgcctcttccgttctcctctgccatcgtttttcgtcctcttccgcttggactttggctcgacgctcttcaaaaacattctgcgcgtgccattccaattcgtcccactcggccatcggtcgccgagtggtaatcccgaccaccgccgccggagggcacttcgtcccctcctttcgtgccgctggagggctcttctccccctccctttcctgggcgtcgcttttcgcctcctcagtctcttttttccctttttcttcccttctctcacctcctccgctctttttctcttgctcttcctcctggcgatttggcaccaccaccacttgcgatcgcatgcttggctctcgacgggtgtccttcggttgttgctggtactgctccatgtccgacaggtgagctccgtgcatcatgatgtcagacatcgctgggaatttggtcgccaatgctcggcggtcatccggtgccaatcgtcgcagcgctctctcgtacgaatcgatcatttgtttctgccggtgccggagcgcgcgggcgtgtggctcccccgcgcgtcgctcggctttgtactgctccagccggttgttgttttcgctgatggcgttgccgagttcgtcggtctggcggaggcggcgctggtaacgtgaaaaaccattgttattcgattttcggcaatttggcattatttcgtcgattggctgaaaattgagggaacgatttgaaggaagaggacgaggcggtttcccgccgttggcacagtgaaaatggtggataattggggagtttggctgggaagggcaccatccctcgggaaggggcggggatttgctgatggactggcaatcattcccgccgtctcgctcccagcgttggctgctgacgggggcgccgtcgtccttctctttctgcggccatccaacttcgctctcgagagaccattcgtcggtctctgtcgccgtttcgagctgccacgggtcaaccaacgccccgtcccgtccatattcgtcctcagctgccacttcttccattcggcagaattgcaggtgctcaagagccacccaatctgcgtgttcctcgagaaatctccacgggaaatggccccggcgctgccgagcccggctccttctcgacgtcccaacagttcctcccgggacgaaaatgcaggcccaatcgggatgttggagctccctcatgcgatgttggctgaaatagcgctgaactgtccatccgggactgaccacttgttgacgagctgggagatgccccaggacgaacggcacaggcatcatttgaccgcttctctcgtgcaccatccgccacccgctctgctctcggcttctcagaaagcgctccaccgccgcgcgttcgaatgggtcttccgcccaattgtcatatcccaattctgccacctcgtctgccaccgttcggaagtcgcttctcgggtccaatggctttggctgtcccaggcctcggcgttttggcccactctgtgcagcagcgggattctcatccccgccttgctcgttctgctctgccgtgccgaatccgccgttctcaaactcactcattggggaaattggggtttgagctctgaactgatgaggagggagggtcccaattttggccaaatgttttgctttgacggatgagtcgggtttgtccccgatggcagaaatgaagaaaagtgattttgctcgcccgtggggagtaagttttggttgaaggggcgggccaaatcccccgcctttcccttcattttggcccagcgctgattggctgcacgtgcatttgtccattcgctgcgctgtgccttggcccaattgcagtaaacacaaaacgatgagaggcgttggcggggttgggacaaaaggcatcacccgccttctccgtctgatagggcatcggagaattgtgaatagggcgatggccccggcagatgtgaacagaagaaaggggtaaacatcccccgtggcccttcttttgtttgatgggcacaaatttttgtccaaatcggagttgttgatgaatggaaaggccgtcttttgttgttggccggtcgtttttggaccaacaatttttgaataaattagtgaagtaaaaaaatgtgaaaattttggcgaaaatgttggccgaagtgaggaaatggtggggtgaattgacgaaatgtccgaatttgtgatgagacgggaattaaaacccgttccgactgcttctccttttccgatcagtgccacaaatgcgagagctgccagtgatcggtagagccgaaagtgggggttgaatttgatgaagacgaaaagcgcggccaaggcgatgattcccgaggccacggcgataagcagccattgtcccgtcgagagcaatcgaagaagtggaaaggggtcaaatccccaatttggcattgtcagggtgaacgtgctgcccggctcgatgtgaccgctcgctgagtctcgctggctaaagccgaattgctgctgtttagggatgaaagcaagccccccttttaagtttaaattttgttgtccccgccgggcatttcacttggcactcagtgaaaatttccgatcgatcgaaggggatggactcagtcgtcgtagtgccattccccccgcagtgtaagccaaacattgtgccatctgcgcatttgattttggcgagcgcagtgccgtaatccgtccggcacattgcttcgaaagttgcgccggaaatgcaccggtaacatccgctgagctggggcgagccgacccagcacttcgtgttgctgtattcgctgaccagctccagctcgttgagttggatttgaacctgcactggggtgtattggaactccgcttgaactgttggccctttgttgtgaacgtgcagccgtccaacgtcgagagggaggcggtgttccgggttgttcagcacccgctcaatctcgaggttgcggcaatggcagtgaacagttccgttctcgtgattcggcgcgcatttttggcatgacccgatcgccaattggcatttgtcgaagcctcgcgctgcttcttcgtccgagcagtgcaaatccgaagaaatgggttttcccatcgccatggctcgtccgtccgagatgaagtatgccgagaggattggcattggcgggagtgaggtgggtatgaccgcgatggtcatgttcccccacttttccggcacccccgggtgaagtataagccgttgagtctcgattttgccattgtttgtctcgatttcgatccatgcgctgagctgtaggtcccattcgatgcagctgaactcctcgaaaaccgtggtcgaggtggggacagccgcccaccggtagaacaggcacgaagctgatggaagcccacaggaattgtgccagaagcttgtgctgctcatgcacattgaatggccaggccggtgattgagttcgttgagttcggggaccatcactcgactgttcattgtgctgcagttgttgtcgcggcacgacccagctgatgggcaccttttcactgccacagtcgagattgtgtatgatcggagccaactctccgttttggggacacaaaccattgtgatcgaggccaacctgagtcgaaccgtccccaagagctcgtcctgctgcgttctgatcacaaacgaattgacctgatcggctggcagtaaggtgatgattgtggcggcagttccggcacattgaagtcctttggccgttcgggcacagtcctccgatcggacagtgaccgagagcggctttgaggcgaatgtggtgccaattaggagaagaagcgggaggagccccgccgcgaccgttcctcggactgtcaattggttccgttccggttgtctccatgcgtgcgcggctgctcgggcccgtcgtgacaattgaagctgttgctgtagctctcgaactctcgtgcgcgcttttctcgctcctctcttcagcttaatctcgacttgtgctgctgttggcggcgaaatttgtcttccggtcgcccaattgaagagacgaatggggtactttgctccccatgcaattgctttgccaagagctgctgctcccgaccaaaatcgtccgagaattgggcatatgcatcccattatggcgagaaggaatgccatcccgatcccgaccatcgtcatcgtccaccgggggaagcagcgtggattagcgaattgctcccagcaaattgcgcattggatcagatcacattctgattttgcggggcaccgcctcgttgtgttgaaaggggcattgttcccccaccagcatttgccatggcaatgatagccatgtatcagctcttccgccggcaattcgtagttcacatccgtcgacttgggcatggtcgcccaacatccgtcggcgcagcaaatctcgagtttatttaattcccgcccactcataattatgacccctcgttttgcacattccatggtacatggcatttttgggccttcttgaaatggcaggttcgggtccattcccgatgatcgaattgacggctggcagccgaacgttccgacaatgctgatgagcatgatcagtagtgccattcctgttttgggcttaattacgcctcgctttcgtggaacatgacgctccggggaccaaatctcccggtttctccgagtcctggccgacttcctttgttcagctccaggtactgcttgaacttctcggacgtcttttccgtcgtgtacttcctccacgggcttgttgggagtttgttcgagttcattttggtgctgttcgaccgctggtgcttcgggaaattcgcccccgatttcgcctgcccgaactgcttgaggtccgtctgcgccaaacctatctcctccttcagatctcgtcgaattcggctgaaacttggtaggaaccttgaggagacttggggccatcgaactatctcccaaatattttttctcatgtctctgagccgaatgcaggtgtgccaaagttcccgcttttccttgtgctgccgacggcacttctgctgctttttcaaaaactgccgacttctgcggcgccatttcgccgccattttttccgtccgaatcgttggggccctcttctcgagaactgtcttcccggatttctcgatttgcccttccgtcgggctgtacggctccaacttcttgtcctcgtttttcgtcactttcttcgctttcatctccttcgtcttttgttgctgccgagggtgcatcccgatccctcatttccctccgagtctcggctgcccgtgcgtcatctcggtgtcgttcttgtactgcttgatctgcttggtcgtccatttcggccatttttgggggtgcttcttccaatgggcaaattttgttgattggccgtccccagatccttccattggccattttgatcatcacacttcggatgtgctcgttcgaccctttgatctcgacaatccgtccgatgggccataaattccttggatggaatttgtcctcgattagcacaacgtcgccgatctgcggtgtgccgtgagcattcactcgtcgcgctgggtgtgcccagcctgctttatctctcaacaccaacaaatactctcgatgccatcgtttccaaaaatgctcaagccgctgctgggagtctcgccactgacgcgccaactgaagatgagggggctccctctgaacggcttgaatttgaggctcgggcggtggttcgatcgccaatcgtgtgttttcctgaattaaatcgatcggccgaagcgggagtggatcacccgcggtgctgttgacgtaagtgaggggtcgagaattgattgtcgcctcaatctcggctaaaattgttgaaagtgcgtcgtaattgagtactgtgccggagagggtcttttgcaatgccctcttgaccaattggacggctcgttcgaacactccccctgcccatggcgtatgctgaggggtgaagcgccattggatgccttttgagtcggcgaagctgatcgggtcggcatttgtgatcccgaaatccgcgagagtcttgcccacaattgtgaatgtcggggcattgtcgctgatgatgcgggagggtgccccgcgccttgcgatgaagcggcggaggaccatgatgaagctttgagccgtcaaatcgcgagtcgcctcgatgtaaatggcacgagtcgtcaggcaggtgatcagcaacacccatgattttctccgctgtccgttctcgtccgaaattgctgtggggccaaggtaatcgagccctactgattcgaatggcagtcgtcgttgcactcgatcggctggcagcggcggcattggcggaagggaatatgctcccatttgcattcgtcggcacgttcggcactgtccgatcactttgcgcacttgttgtcgggcgctgggggaccaccaccccctcaaaaactcagccaaggttccgtccactcccgaatggtggaggcgctcgtgaatcccgtcgatgataagtgctcctgcccgtgactttctcggcagaatgatcgggctgctcagccctggctcgtcacactgtccgatacgactgatcagtctctgaatccctcggtgatccggctcggttttcacggatcccgtcattgacccctgcccttgaacggcacgaattagagcccaggtagcttctcggagttcacaggcccgcagcgatgccaaatgcttcccttcgattttgatcattcgctggtttgggtccatttccccaattcgctccgcttcgggcgtaataacttcgttcgtacccgaccgatcgggctcaaatttcgcaggcacattgtggaggccttgacctacaatccttctggactcgatttctaaatttcctttcgatcctcgagttactgccttttcagtctcgatgatcggcgggcctccaatttcgcttccccgccttttcttgatccgcttttttacgattccgatgaagcgttgcatccatgctgtggcgcgctgcactctggaccatttgctgcacctcgtaagcaacgaactcgggaattgttcactctcgaggcctgtggatgcttcatttcggacaatgaatgctgattgtccttcttcctgccccgccggagagggtagtccctcttgatcaggctgaaactccaattcgcttggccattccgttctcggcccgcgcaaccattgaggaccattccaccactgatcattgtgttgtaagagggtgggcacttcccctcgagttgccaaatccgctgggttttcgttggttcgaatgtagtgaaacgtcgttgctgtcgcttttctgatctcgaagagtcgattggccacgaattgtggttgcgctgaagccgttctgacccagtggagagcgatcattgagtcgctccaaatgtgttgccccgcgattggatggtggagttgcttttcgatgaatgctgccagccggacccccaacagaatgcccatcagctccattcttggtattgtgaacgtggtagccgctttcttcggcttgaggcgtgatttggccatgatgaggcgggagttgcacccgctttctcctcccgttcgtatgtaagctgctgctgcatatgcgatttccgatgcatccgtgaacacatgcagttgaagcgggtgacccctgcccgccgttacgcctcgaggaatcacattactttccccctcccaacttgccaaaatgtgctcccattctcgagcttcctcccgggacaaaggagtgtcccattcgtggttgtcgtcccacagcttttggaagaacagcttcgccttgagggtcgccgggcagaccaagccgagcgggtcgaacaggctggcgacgctgctcagcaccgttctgcgtgtggtgctgatcggagtgccgggttcgctcccggggtacttcattcgtattttgtccgtctccgcattccattcgagtcccaagactttggccgtcgtcttgccgaggaattcggcgtccgaaaagctgctgttgagtgtctcgtcattgctcaagaattcccgaaggttcatccgcgcgtccgcaaacattcgtttcgcttctcgtcctttaatggctgcttcttccgcagtgtccgccgggatgagcacattatccacgtatgtgtcccgaatgagttcctccgcgaagttggagtcgtatttgcgcaggtggtgtcgtacaacggcggcgagacaaaaggggcttggcgtgagtccaaatgcgaggcgtcgaaatcggtatgtcaccaaattgtccgttgtcactggccgaaatgggtcgcgcacccacaaaaatttgcacacatctctgtcgtcctcctcaatcccgaccatgagaaatgctttctcgacatcggcgatcacaggcactcggcatgctcggaaccgaatgagcataccggccaaatccggcaaccaaactgggcctctgagtaggcagtcgttgagggaaggtgcccctcgtgtgtgtgcgctcgcatcgtagacgacccgcagctttttgggcgtgatcactgcttggtgagggatgaagtgttcgcgtttaccggctccgatcgtcgtttcctcgattattgcggcattgagctgatcagtgatcactgtggtgtactgcttgagcacctcgggagtcctttgcagccgttgaagcattgtcgttagccgtcgataggccatgctgaaattgttaggtaaagcggggtggcactcccgccatggcagtcgaagggagtagcgcccgtcgttgagttggcgcactgatcgctcgaattggatcactgcttgtgcatccgcgtcgtctgtcgggtcgtctctgatcccgattgcttccaatgaccaaaattgctcaactgctctgatcggcggcatttgatcacgttcatcttctccgcatggcaaggtcatgaacacggacgaagcgggagttgccccgctgctcacttggaaccgttcgccgcacaaaattggcccaaacaccgtgtcgacaatgtacgtgccgctttccgttttccgaaagccggtcacgaaatcccagaattttcgaattccgatcagcagctgtggttgtgttgtttgtgtgactgttctcaggtcgctttcgggtactgctcccgactcgatgagctctgttctgatcggtgtgcagatcagaggcacttccgccacctcaatgctctcccatccgccatcgatccgcttgagtcgcaggcgataagttgcggatcggatccgctgctttttccccccaaaaacttgcactgtcagcggccgcctttcggtcggcttcggtcccagatgttgaattagctcagtctctgcacagtcgagatggcttcccggatcgaacagcaatgttgttaggcattcgtcatcgccctcttctgctgctgcggtcactttgcgtatcatttgttgggccgggactcggctcccgaaggcggtgaaagcccgttgttccccggcattcatctcggccacttctcgattgacctgctcttctcgtgctgcagtgaagcgggtgggttgattaatcccactgatcagcatcgcgtggttgttctcctttcgttcgggttctccgacgggccgggattggtttcccggttggttcttccagcacataagccaatgatgatcgtcgcttcggcacgtgtcacatcgaaccggtcgttggcactgttcaaatgagtgatcagagcccaggcagcgcagacatctcttctgctcaatcaatcgcttcctccgtgcctgaggcgtcgagtaggcgcggcactcactcggccgatgtccgcttttcagacaaagcgaacaattccccctcccgcagcttggaggaggcccatttggcgtgaagcggggtccattcccgcctttgtgtccgttctcgttgccgcgtgccactgttcgtccggtgatacgggcattcatcccgtactgctcttcttttcgtgttccgttgggctgcgcacgcgtttgttggttgtcccgtaccataaatgctctttgaaatggctcccgacctgctttgcctcctcgtcccgtctgatcacgctcggttcggtgatcagtgcgtacttccgggtctttcattgctgctaatgctgactcagctgatcgcatgcaccgcacttgcgctgccaccgctctcctgaactcgcgcactgaccatttcgatcccatcatgctttctctgatccgcaattccgtgagcactcgcactggcaacttggcttccagcaatggcccaaatgagtcgtcgtccacgttcgctccgagctgctcgagttggcaaacgcatcgctcaaactcgtcgatcatcgtcgtcaagctgttcacattgtcctttgccggtgccaaatgaagaagccgggcccgaattgcccgctgtaaatcgtccgtgtcgccgaatcgttctttcaaaagttgcacgaccaccgggtagttgccgtcggagggagggtagacttcgacagcccgccgggctggtgatccctcctttaagcagcgcagaagatgcaattgtttttcaaacccgggaatgggtttgtcgtccacagctcgcttgaaataggcccaaaatgtcgtccaatcctcgggctttccggaaaaagtcggcggttgcagccgaacagtctcgaatgttgtcattcccgtgatttcgtccctcccgtgcttccgatcatgttctccctcgtctcgagcatgccgtcgaatcgggtatgtctgacgctcccgatagtcgtcgttcacgtgagcctgatgcttttcgatttttggttgcatcagtgccggccgatgggctgttgctgggggaaacgcccccatctcgtctcgatttcgattgatccattctcgcgctgggttcgtcactctcatgctggcgacggatggtactttggcacgccgctgaaaaatcccgtccaaattcgacatgacgggtgtcgcgactcgtcccattggtcttcggttgtgttgcggtacaccttgtccgtcgttttgccatcgtttggccgccacttggaaggatctctcccattcttccatgttccgattttccagtggaggtgggtcgtcccccaccggatggctgttgttggtcccgaatgacccgctcaatcgagaccgcgcgattgcttcttcttcatcctcgagtgcctgtcgcatcgtccttaagtctccgatgtgctcgtccgcaatttgaagcagttcagctggtgttggatggtttcgcaactgcaactctttcgttgctgccggcagtggcgctgtcagtaagtcgtagaagaagtcctggtgacctgcgggttctgctcccgctgctgccattccaatctcgaaatgtccttggaagatttgagttgcctccttgagtcctctctccatggccaaaagtcgcgctgcttggtagcctgcctccccttcggtaaggtcttggtcgatcacttctcgagcctccgcaattcgagcggcgagagtcccggatgctctctcgattctgtcccgcgctgtccgtaccgggatggatacactccgcaaattgcgtgatgggaagggtagcatcccttgctgatttgtcgccacgcctgtcgccatgttgcttcctctcgttgcttcgtttactctggcaattttttgttgctcttcgttcgttgaagcgacgggaccatccccgtcctgcacattttcgtcgtgctgtgcgccgttgcgatggccctcattcgctgggtccatgttgctttcgctcccgtcctcgaattcgagtcgttgcatttttcgtttccgcctgttccgttcgtcgaccgagatgtttcgctggagccccctgctaacggcaccagtttgccgttagcttctcgaattcgtgctcgttggtcgctcgtagaccgattggtcgctcgtagaccgattgttggtggctgcagttgccccctgctaacggcaccagtttgccgttagcttctcgaatttgaagtctctggtctttgcctgaccgatcgatttgtcgttgcagatgcccctgctaacggcaccagtttgccgttagcttctcttcgttgtgctgttggtcctcggcgaccaaaactctcgactgatgctttgccgacgtttgcagaaagcccctgctaacggcaccagtttgtcgccaatctttttatttccgggcgggctttggccaaatgcggcttggcccagctgaggcgggattggttcccgctcctcttcaccgctctcgtccctttttcctctgctcactccgctcgctgtgccgtaaagggaatggcgccctttttgccgttcgttttgatgggtctgatgctgctgaccgatccgatcagcgccaaagggggacgagaatgggaggggggaggggtgacaaagttgactggtgctttatggaatgtgcagcgattttgctggttgcttaacgg

SEQ ID NO: 143 - DNA, 5054 bp, Heterodera glycines
  unsure (1)..(5054): unsure at all n locations
aaaataattaaatttaaagtatcctatcctttattaagaaaataattaaattnaaagnatcctgtcaacttttaaaaaataattaaataattaaagtatcctgtcaactattaagaaataattaaattaataaagtatcctgtcaactattaagaaataattaaagtatactttattaatttaatttaaagtatcctgtcaactattaataatttaatttaaagtatcctgtcaactattaagaaaataattaaatttaaaagtagcctgtcaactattaaaaaataattaaagtagcctgtcaactattaaaaaataattaaatttaaagtatcctatcaactattaagaaaataattaaatttaaagtatcctatcaactattaaaaaataattaaatttaaagtatcctatcaactattaagaaaataattaaatttaatagtagcctgtcaactattaaaaaataattaaagtagcctgtcaactattaaaaaataattaaattatttaaagtatcctgtcaactattaagaaataattaaattattaaagtatcctgtcaactttaataatttaatttaaagtagcctgtcaactattaagaaataattaaatttaaagtatcctgtcaaatattaagaaaataatttaatttaaagtatcctgtcaactattaagaaaataatttaatttaaagtatcctgtcaactattaagaaaataattaaatttaaagtatcctatcaactattaagaaataattaaatttaaagtatcctgtcaactattaagaaataattaaatttaaagtatcctgtcaactttaataatttaatttaaagtagcctgtcaactattaagaaataatttaatttaaagtagcctgtcaactattaagaaataattaaatttaaagtatcctgtcaactattaagaaaataattaaatttaaagtatactgtcaactattaagaaaataatttaatttaaagtatactgtcaactattaagaaaataattaaatttaaagtatcctgtcaactattaagaaaataatttaatttaaagtagcctgtcaactataataatttaatttaaagtagcctgtcaactattaagaaataattaaatttaaagtgtcctgtcaactattaagaaaataattaaatttaaagtatcctatcaactattaaaaaataattaaagtatcctatcaactattaaaaaataattaaagtatcctatcaactattaagaaaataattaaatttaaagtaacctgtcaactattaagaaaataattaaatttaaaagtagcctgtcaactattaaaaaataattaaagtagcctgtcaactattaaaaaataattaaatttaaagtatcctatcaactattaagaaaataattaaatttaaagtatcctatcaactattaagaaaataattaaattattaaagtatcctatcaactattaagaaaataattaaatttaaaagtagcctgtcaactattaaaaaataattaaattatttaaagtatcctgtcaactattaagaaataattaaattatttaaagtatcctgtcaactattaagaaataattaaattattaaagtatcctgtcaactttaataatttaatttaaagtagcctgtcaactattaagaaataattaaatttaaagtatcctgtcaactttaataatttaatttaaagtagcctgtcaactattaagaaataatttaatttaaagtagcctgtcaactattaagaaataattaaatttaaagtatcctgtcaactattaagaaaataattaaatttaaagtatcctgtcaactattaagaaaataatttaatttaaagtagcctgtcaactataataatttaatttaaagtagcctgtcaactattaagaaataattaaatttaaagtatcctgtcaactataataatttaatttaaagtaacctatcaactattaagaaataatttaatttaaagtaacctgtcaactattaagaaataattaaatttaaagtatcctgtcaactattaaaaataatttaatttaaagtagcctgtcaactattaagaaataattaaatttaaagtatcctgtcaactattaaaaataatttaatttaaagtagcctgtcaactattaataatttaattaaaataaaattcagataaattttttataaaatctaaaaaactgtaataaaactattacacttaaatttttagtaaaaaaggtaacctttactaaaaaaaaaatattgcttttttaaaaaaaaactaaaaaaaaaaacaaaaggaaaaaaaagaaagtagtaatttttcctttttactaattttcatttaaagaaaaagaataattaatcctttacaaattaataaacccatattattaaagaaagaaaaaactaaaccccccctagaaactccaaaaaaaaaaagaaatatttaccttatggaaaaagaacaagtagaccttacaggggaaaccttctctaacatcaggggaaataagccttacctgccttttatctcataacatgattaacgtagcctcgctagaatttaatctaaaaaacttttgtaaaaaaagcatttaacaacgtcgcaagcattgtagttttaataggttctaccactatccctttttgaaccttgaaactacgttaatgtccataaaaaaaaaaatccacaaaaaaaaaaagtagtgcaaccttgcttaaaagaggaattacattgctataatttaattttttaccgttgattgataaaaactctcctcatcagaactattatttaaatagttcaagtttctaaaaaaaactgaaaatttttagaaacaataacattttcccttccgggaaaaagttttctctcgtaaaaggctgatcactaggagcttccagaaactctattctataaattaattataaaatatattccaaatctcctatatttcacttatgtgaaaggacctcgggtcttaatctacacgaagcccgtagcgtaccatggcatgccttaacggtgacttaattaaaccatttaatcagccgcacccacctccgtactctaaactaataaaaaaaaaaataaaaattaataaaaaaataaaaattaataaaaataaaataaaaaattaataaaaataaaaataaagaaaaaaaataatattcagttttttacacctttttaaacaatgctttttataggtactattttaccaactaatacaagaaattcttattagaaaataaaaccccgaataataattaacaaaagcttgaaaaccttctaaaaattctacgtcgaactttttttcaaattatttaaacaacaagaaactagggccagtcatagttaccaaacccaatccctagctacccaaacataccgagagaagtccatcagggccttgtaccatataggacgttatctaatcactactccgacttttttttaaaattaaaaaaaagatcttaccaaaaatgttcttcttaaacaaaaatacaaatttttgatctgagaaaaaatcttcatttaaaaaattaccaattttttcaaataaaaaattcaccttttttttgtaaaaaaaagattactaaaattattaaaaaaaattcttaaataccttctttttggaaaaaagaaattttaaaatttaaaataaaagaaaaaaatttacttttttttacaaaaaataaaatttaactattaaaaatttattcattaaataaaaaaaaatatataaggaaaaaaaaataaaatttaactgtaatattaaaaatttattcattaaataaaaaaaaatatataaggaaaaaaaaaaaaaatattttttttttacccctaaaaattatattaaaaaatagaaaaataagaaaaacttaaaaaaaaaaatgaaaaaagtcactttatatatagatttctggcgcagcgtttttatgtacacaaaaaaaaataaaatttcactgtaatattaaaaatttattcattaaataaaaaaaaatatataaggaaaaaaaaaaaaaatattttttttttacacctaaaaattatattaaaaaatagaaaaataagaaaaacttaaaaaaaaaaatgaaaaaagtcactttatatatagatttctggcgcagcgtttttatgtacacaaaaaaaaaaataaaatttaactgtaatattaaaaatttattcattaaataaaaaaaaatatataagggaaaaaaaaaaaaatattttttttttacacctaaaaattatattaaaaaatagaaaaataagaaaaacttaaaaaaaaaaatgaaaaaagtcactttatatatagatttctggcgcagcgtttttatgtacacaaaaaaaaaataaaaaaaaaataaaatttaactataatattaaaaatttattcattaaataaaaaaaaatatataagaaaaaaaaaaataaaatttaactgtaatattaaaaatttattcattaaataaaaaaaaatatataaggaaaaaaaaaaaaaatattttttttttacacctaaaaattatattaaaaaatagaaaaataagaaaaacctaaaaaaaaaatgaaaaaaaaataaaaaaagtaaaaaaaaaataataaaaaaaataaaactaaaaatataaaaggatacctatattttttttaaaaatagatgttataagtggtcttttaaatattatagagccgctgagaacagtttttcatcaaattaccaaattttgcgattttgggccattttctaagaaaaaataggaattttgggggcgcggcggtgccgatagtcgccgccggggaaaaaaattggaaattttgatcatttataaacagtttttcactgaaaattagccaatttataggtaaaattttgaaaaattttatgggaatttaatccaattcttaggggtgtaaaagtcgcatttcgcgcaaaaaagcgaaatgcgaaaagcgaaatgcgaaacgccaaaaaatgcgaataatgcgaaatgcgaaaagcgaaacctcggcccatccctg

SEQ ID NO: 144 - DNA, 1202 bp, Heterodera glycines
aaaaaaaaaaaaaaaaaaaaataaattttttctttaatttttaaaatttttttcctttaaaaaaaaaaaaaaattttaaaaaaaaaaaaaaaaaaatttttctttttattttaaaaatttttcctttaaaaaaaaaaaaaaaataaggaaaaaaaaaaaaaatttttttttttttccccttaaatttttttttaaaaattgaaaaattagaaaaactttaaaaaaaaaaagaaaaaaggccctttttattttgatttttggggccgggttttttagttcccaaaaaaaaaaaaaaaaattttaccgttattttaaaaattttttcctttaattaaaaaaaattttttagggaaaaaaaaaaaaatttttttttttttccccttaaaattttttttaaaaatagaaaaataagaaaaacttaaaaaaaaaaatgaaaaaagtccctttttatatagatttttggcgcagcgtttttatgttcccaaaaaaaaaataaaaaaaaaaataaaatttaactataattttaaaaattttttcctttaataaaaaaaattttttagaaaaaaaaaaataaaattttactgtaatattaaaaatttattccttaaataaaaaaaaatatataagggaaaaaaaaaaaaatattttttttttacccctaaaaattatattaaaaaatagaaaaataagaaaaacttaaaaaaaaaaatgaaaaaagtccctttatatatagatttttggcgcagcgtttttatgtacccaaaaaaaaaataaaaaaaaaataaaatttaactataatattaaaaatttattcattaaataaaaaaaaatatataagaaaaaaaaaataaaatttaactgtaatattaaaaatttattcattaaataaaaaaaaatatataaggaaaaaaaaaaaaaatattttttttttacacctaaaaattatattaaaaaatagaaaaataagaaaaacttaaaaaaaaaaatgaaaaaagtcactttatatatagatttctggcgcagcgtttttatgtacacaaaaaaaaaaaaaaaataaaatttaactataatattaaaaatttattcattaaataaaaaaaatatataagaaaaaaaaaaagaaaatttaactgtaatattaaaaatttattcattaaataaaggaaaaatatataagggaaaaaaaaaaaaatatttttttt

SEQ ID NO: 145 - DNA, 2131 bp, Heterodera glycines
ggtaaataaggtgctgagtacgaatatgatgtctattttaagtttcataatttttggaatattttaaaaattctttattttttggcaattttttggccctcgggattttggcctaatatttgaaaattcataacaaatcgaagggttgatcaattttacaggaataaagccttaaaaatagagaaaaatcaggagaattttatgggatttatttgggttttctaacatcaatatgaaaaaagttattccagaaattctggaaattttagatttttcagaaaaaaattcctaattcccttctgaaaagtgattctggaaatgtttaatactacaaaaatccgcaattttttgctctattatataaattttatttggcatggttatttgggccgctgatcacgaatacgtgatcagatttcaattatgacatcgttaagccctcagaatccccgtgtgagtggggattctgaggcatcatttgaggggggaggaggggggggggggaaagttcgaatccgggcggtgtaacattatttttctctgcatttttacgttgcttctcctattcactttttgtacctgttttttactgttgtacctcttctgatcacttttggaccgcttttaatcacttttgcacctcttctaatcacttgtacctcttctaaggcgcgaagcgcccgtctatgccaacaaaatttaaaaaacgggctcgaactgcccgtctatgccaacaaaatttaaaaaacgggctcgaagtgcccgtcaatgccaacaaaatttaaaaaacgggcgcgaagcgcccgtctgaacacaacaaaatttgaaaaacggacaagaagcgcccgtccgagctcaacaaattaaaaacgggcgcgaagcgctcgcccaatcacaaaaaatttatagacgggcgcaaagcgcccgtccaagcacagtagagtttaaaaactggcgcgaggcgcccgttcgaggaggcatcattttgggggaggcggcgaagttcatccgggcggtgtacattattttctttgcatttattcgttatttacaatgttttatttgtttaaaatatattttttttattaatataaataaattttctattttttcttgaaaatgttttaaattaaaatttttcacatttttgttcgttttgtttaaaaatatagtaacgaactgaaagtcatccatcaatgctcaaaaatgataatttaaaccatttttaaattaatattgaacatttttcttttaaaatttcttgaaaatcttttttttataaatttaactttttcatttttgttacgttgttgtaaaccccaaataggctttctgagttcaaattagactcatttacctaagtttttttacaattttagctgggtgtcgtgcaacgacatttgatggaaatttccattttttgaccgtcttcaactcggcctcaaattggcaacgatttcgcccctttttgatgttttagtggaaaaaaattttgatggcaaaagcaaatgtcgatgcggtggagcagaattcgcaaggacaaatttgaatgtggtacttttttaatattttttaaatcactaaaattccattttcaccaaaatagtcaaaatttatccatttttttattaaaaaatgtgtttggttcacattagtttcttttgataatacgaattttttaaacccataaatataaacttggtacaatttaatcaataaaaaagtcacaaattatttattttgccaaatttacgtttttttgctctatcgactttattttagcaaaaattttatttttgtgttccattattttatttggttactttcacaatttcagttggtgtgcaacgattttttgatggacattttccctctttttgaccgtcttcaactgggcctcaaattggcactgatttcgcaccatttcgatgttttagtgggcattttggtaaaattgaagtttttttttgagtttttatctatttttcgctaattgtgttttaaggagtttatatgcacaaaaaaattttcagtttaaaagatggctccgaaaatttaaaatctttccaacttcataattttttgatttacaaacatgcattattagcgaaacccagtgttcttggtattt

SEQ ID NO: 146 - DNA, 10069 bp, Heterodera glycines
tgctcagcgcatcaaataacccctaaaatatgttttttttttggatttttattctttttttttcgtgggaccaataatcttcacaattgccgacattttcccctttaccatactcaattcggcctcaatttagcactgatttcatcatttcaatttgcagatggacaaacatttcgatcgcaaaagcttagcttttttcaaattccggtaaatttttttttcgatttttttgcaaagcttattggtcttgggtttttggttgcgtaaatcttttttatttggtgactttttcgttacgctttgtaaactgtgtctacaaggacgaaaagatacaaaaataaaagtgtttttggggttcgggaccaaaggggtgagcatacgatttttgagtgaaaaagttttttcacccaaaatcttcaaaaaatatgtctttaaggccattttttaacgctgatcacggatacgtgatcagttttcactttagatatcgttaaggcctcagaatccctgtgtgattggggattctgagacatcattttgaggggggggggcggggatggggggagttcggatccgggcggtgtacattattttctatctattttttttgttattcaatgtatttattaatttgaagattttttgtaaattatttgaatttattttttttaaattaaagaatagcattatttttttctgaatttgtaaaaaaattaatttcattttaaataaaataaatattattaattttcaacgttgtttttttattaataaaaagagtattttaaattataagatttttaaattaaatgcattcgatttttaatatttaataaaaaaatttccttatttatttgattttaaacatgttgacctctttcacattgttgtacctcttctaatcacccttgtacctcttctgatcactgttgtagctcttctaaacaccgttttacctttctgatttcggttgcataagcgcattgatgctgtaagtttttacttttttcaattgatttcaaaatgttatttgccctaaaaattttgattgagcttttaatagaattttaaaattatggcaaacgcgaatttttcaaattttggcaagctgagttctttagggtttgaaaaatcaatgatcagtagggatggcgtttttgtttattgatttttccttttttaaccttttttaaaaagcgttggcaccactaaaaaagttgtttcgtgcctctttttttgagcctattctacttaattgaaaatggtttttattttactaattaataataattacattttttaataaatttaattttttttgaaaaacaagaaatttctttagacttatttgtaagcaaaagttgaacaattcatttaaaaacaaattatactaaggaatttctaaaaattattctgtttaataattaataaaatttgctcattttctctacacactctctttattgacgcatctctcatgttaagcgcacggtgtgctattgattaattcattattttttgcactcgtcttaggaaaaaaatacaattacttagagtttattttcaaaattctctttgctaagtttagcacagatatacgaataaataaattttcctatttaaaaaacaagaattgtattatttttttagaagatttattatcttagttttccatttctcaccttttttacaatattcatttaaaagcagattttttatattattattattattataacatttttaacctcaagccaaactttattttctctaaaaattttaaggctctacaatttttaatttctttttctcattagatataagacaaattctatgggtgcgctaacaaatggcattaaaattgcttctccgtccaaatcgcccagcattcaactcggctcaaattggcactgttttcgtcccgtttcaattcgctggtggacaaacatttcgatggcaaaaaagtgaattgttttttagggtttttgttgtggcatttctgtttctataaagcaattttttaatggaaattttaatgtttttgaatttttaatagaaaaattttggtactaaaaaatttgtttaacccttattgcttccctttccgctaaatattaattttcgcaatttcagtggtgtgcagcgatgtttggatgggcattttcccttaattttgaccatcttcaactcggcctcaaattgtcactgatttcgccccatttcgatgttttagtggacaaacacttcaatggcaaaagtggattcatgccgtaagttttgagtttataagcacaaaaattttctcagttccaaaaatggcctgaaaattaaaaaattttcgaaatacgtaatttttttgattttttttgttagtgtcaggttttttttaagtgtttaattgttatgtattttttgggggcttaatgaattttaagctgggccttacatttatattttcccttatattcatttcttattgttagtttggcaatttcatggcagaaaattttttttttttttttttttggaaattttgtaggtttttggttttaaatataaaaattttggttttctgtaacattcactaagattttaggccaaaaaatttttgtccaacacctattgcttcttttccgctatattattaattttcataattttagttggtttgcagcgatgtttggatggacattttccctctttttgaccgtcttcaactcggcctcaaattggcacttctttcgcatcgtttcgaacttttggtggacaaacattgcgatggcaactcgaaattcggcaagtttttgttttttgagtttttttgtaaaagtcaatagtcttttagggttttcattgtttttttatgtttgtgtgcccaaaaaccgggaccgcctatttcaaaatgactttaaagtaatttttttttgctaaaatgaccagttttttaggctttcttcttttttctgagctttttcaatttataaaattttaagtgctttttccagcaatttcgcaacgacctttggatggacatcccctttttgcccagctccgcctcacattggcactgctttcaccccgtttcgattcacaggtggacaacaattagatggcaaaacgaattccggcaagtttttagagtttttaatgttgcttaaggattttgtgcccaaaatcagggctccatttcaaaacggccaagaaaataaatttttttttagaaatttggctttttgcttttaattaaatggtttttattttttagttttttattaatgaaaatttttatttgcaaaaaatttcgagcttttggtggacaaacattgcgatggcaaaaagagtgaatagtttttagggtttttattgttttatggcttttgtgcctaaatggggcctccaattttaaaggattttgcctaaaacctctgaaaataaaaaatttcgtgtgcccgtttttaagatttttgctttttgtgttataattttataagatttttctcaactttttagtaactgtgcaacaatgtttggatggacgacatcttcccttttttgaccgtcctcaactcggccccaaattggcactgatttcgccccgtttcgatgtgatggtgcacaaattcaatttaaaacaaattgaatgccgtaagtttcaaccatttaacacttgtgtaaagaatttttttttataatatgaacaatgaaaatttctgctttatctttttttctttttaatttgttacaaaattaaacaaaattaattaattctttaaaatttgttgatttcaagggcacaataatgatttttttgaaatgaaattttcaaagtgcaaaattgaactaaaaatagacaatgccctgattttgactaacactttaccagtatatcatatatataagacaaagcagacatttttcattgctcttttaagacattcgaaaaatttttagagttcaatttattttaaattataccttgctatatatagaaatagtttttctatcccaaatctgaggatggaataggtaatactgtatagcgaggtacgctataagttctttgatagaataataagaacaattaaactgccaattgaaaatatagaaattttgcaaatttttggaatgtttagttgttctgtcctttaacacctttttgattcacatttctttgtggttcgctgactggcccttcggggcatgtgtcgcaccagtggttcgctgactggcccttctgggcatgtgtcgcaccatttgcggttcgctgactggcccttcgggcatgtgtcgcaccatttgcggttcgctgactggcccttctgggcatgtgtcgcaccattcgcggttcgctgactggcccttctgggcatatgtcgcaccatttgcggttcgctgactggcccttctgggcatgtgtcgcaccatttgctgttcgctgactggcccttcgggcatgtgtcgcaccatttgcggttcgctgactggcccttcgggcatgtgtcgcaccatttgcggttcgctgactggcccttcgggcatgtgtcgcaccatttgcggttcgctgactggcccttctgagcatgtgtcgcaccaaagcggttcgctgactggctctttagggcatatgtcgcaccattgcggttcgctgactggcccttcagggcatgcgtcgcaccatttgcgattcactgactggcccttcgggcatctgtcacatttgtggtaaacgttgcctgcccttcatgggactgtggtcaacatgtcctgcccatcacgggattgttttcaacttgtcctaccccttcttgggattgtagcacgatgaactttcctttgaacattgtgggccaccacggtttacaatgatgatttccttattgttaccggccaacatccggtgcgaagctggtcccgcactttgccatgaccagtggactggtgagaagtaacataggatattggagttaaccaaaacttatcaagttaaagcttgatgataataaggacttatcctttggaatcgtgattaaaggacctgctctttcgtgagatttgtggttcgcattgtatatcgatgagttcattgatcaataatgataactctgcactcaatgcccttagggcagatgggatatgtgagccctggctgattgattgcagcggcttcactgtggcgataaggaatatacaccatttttatttcacactatttcaatgtatttgataaatatttgatttacgtgtggcttatcggtagtaattcctaaatattttgccacatgcacacatcatctcctcatttttgttttcagatgacgaacaaacaaaaagctaagagaaagaagaatcaagagcggtaccagcggcaggcagagcaatctgtcagcccaggtagctcacccgtcccagacggaagtgcagatgagaatggggtgacatcacacccgggcatcaaaacgcccaatattggtgctttgaaattaagcaccccggcttcttccatcggaagtaaaagaaggggcagacccccaaaagccggagcggagtcaattgtgacttcgcaacacagtgtgtcatcagttggcacacaaattgtatcggccactcaaaatgaagagtcatcgcctcgcaacaaaaaggggaagatcaacgattttgatcgacccatgtctgctcttgaggcaattgcttcgacgccggtttccacacaaaggaaccgtggagggcgaccatccaaaaaaagaggcggtcatgctggctcaggcaggagcaaagctaatgattccataagcgagagctcgttaatggatcatagctctgaagctatcacaaatgtggttgttttgccaactgtgactgataaaataaacttcagcacagtgcaaatcaatttcgcaaccacgcgaaattttgcctgtaaaatttggaagtgggcagcaattggcctttacgaacgtgatggcgaaacagcgcttgccccaaggtctggtccaagattcattgaaacgtgctggaatgatctgacccagtttctcaatgacggctttgctgccacatatttggcatacttggcaagcatatcacaacgaaaagtggtcgttgttgacccaatggtatgggaaaatggcttggaccgtgtcatgcaatataaaaatatgacatttgggtatgacccaaatgttcaggcagaagtcattcttttgccagtacatttccctggacattggactctaattatccatgatgttcagtgcggtacacattttgccgattctttgcctaccccttatggcaggttggattggcaactgacggaaaaaattggaaagatcatttctgacattttgccgtcaacagtgttgaccgggatttttaatgccgtaaatcttacggtacaacacgatggtaacagctgcgggtacttcgtgtgcctatatgctgaatcatggctcatgaacaatcgcacgtttgttctgccagatttgtccatcaattatgaaaagcggcgcatattgtggcacattaacgagctgtataactctgataatgttccatatcatccaagggaaggggtacctactccgtgcccaattgtctatcgacatgcggatgaggctccatcgacatccaaggccgctgagccagttgaagttgatgatcatgatgatataatgatcatcgaaccacagacgagtggacaagcagttgatgccattccaacacaagcccaagtggcaggtgaaaaccaagctgacacgcttggattggtgtcggaaacttgcgtcccgcaagagccaattgcgcagactgacgattcaatatttgtcagaccaaagacgcctccaaggcgttcatcgcgcattgggagacggcaatcagcttcgattagccgttctccttcacccgcgccgagacgtcggtcatcgacaaatgccgctgagcaagtcacagcatttactcggcgttgctaccttgtccacaagggttggtgctgtgctgcagcagcggcaaagcattatccagaatactcagattctggtaagcttggtgacaagaagtgttctcactgtggagcattacatttcccacacgaggacagcagcatttgctgtcgtcagggaagggttgttttgccaaagctcaaccctcacccaaaagagcttgaagagctaattgtggaggaaaaacaatcccgtaaaggaaaagaatttgtacgacaaatgtcgcggtacaataatttgctccaatttgcaagtgtttcggctggccataagccaagtcctgcaggcggaccgatggcagtaattctcaacggagaattccatcgccgcattagcagcatgcaggcgggtacaacacagatacctggcttcggtcagttgtacattctggatccagttgaagccatggagcagcgacgaaaaaatcccacctttacgggagagaaaatcacaaacgaggaagagtttgtgcagggtcatcagcttaatgaagagacccttgaaattttggaacaaatgatccaagaaaatcacccggctgcatctgcttacaagcaggctcgtgagcagctacaagagttgttaagacaacaaaggactgaagagctgcggttcttcagaatgactttgttggacgagcgctctgccccgggtggtatgaaagacccgaagttgcatccccaccagatcatcaccccctcaacgggtgaagggatgttcgcgattcatgcggatcccactggtgcccctgcacctaaagggatatgggtcgaaaacaagcaagggcagttaaatgaaattgccccgttcagtgcatggactgatagcttgacctatccattaattaagcctaagggcgacgatggatataaaattcgcattccatatgccaaacctgcacaaagaaggcggaaaagcgacatgtctgctgatatgtttgccactgaagcaatgtccgatgatgacatgtgcgagactgagtcaattgcagagtcagatgccggatctgaagcatcgatacaatcagtgaccagtcgttatgacaactcgaaaaaatttgtctccctgcgagattactgcaagtattatctcgccataagggatgaaaatttggagtggcaataccaccacattctttcatgtggaggtggtcttggacagcgctgggtcctagaccaagcgtccaaaattgactggcaaattgccacttttttgcgccgtccagagatggacctgcgcgtaagtactccaaaaaatttgctgcagtacttggtaaaccaatacaataagcagcaagttcggcaaaaccccaatgctcgacaaaagactgtcgatgacattggcagcgttgttcgcctttctgaaaagaatgttaattctcttcagtattggaaaaaaatgtatgaagactgcaacaccatttttgcgcgttgccacgacgcaaaaaaggcgcggctcttcatcacattcacgaacaaccgtgagtggcccgagttcaaggagaacatttacaaaaacggtcaaatgttcactgaccgttttgacatgtggatgcgtgtatggtgcagcaaaattgctgttttccaccaggagctctatgaaaagagtttcttcggaacaatccttggctcaggcgagtcaatggagttccaagggcgtggtggcccacacgcacacattgtagcccagactgacctggacgcagtcccagaagtcatccaggaatacatatgggctcatattccacctttgccagacaaagatgatgactccccaattgcacaaatgcatcgcgaagtacgagattatatgcatatgcaactgcacagatgcagtgatagttggtgcggtccacgtgaccccaactttgggcggtgtaaaaaaggcttcccagccccgtactcgaaatgtacgattctgcacccggacaggcccgcgttgtattaccggcctagcccaaccgatggtggtgccaaaattgaggtgaacggcttaatatacgacaactcacaggtcgtgccgtacaacccatacattttgctgcgttaccgagtgcactacaatgtgttattcgcttatggtaacaaagcgaacatcaaatatgcactcaaataccctttcaaagggcctggacattgttatgtcgagtgcaaagaggagtccggcagcaaaatcggtatcgatgagccggctcaatatgccaaaatgaacttccgtggtgctacggaagcttttgcagttgtgcattcaatgcaatttgcaaaactctcacatcacgttgttcagttgtccattcatttgccaaaccagcagcccgttgtatacagggccttccaactggtgagcaaagctgaggaaattcagcgaggcgagctcccagagacgccatgctctgcctattggaagcaatggcaaaacgaatggcagcatgttccttcgctcaaggacatgctttttgaaaaagtcccagagcaatttagatgggcaaaagatcgatgggtcccatataaaaggaagcctaccaagaggcccccaatcggtcgtgttgtacctgtcgctccaaaggacattgaaagatttgcactttatgtgctgatgcgtcactttcctggtgatcccgaccacttaaaactggtcaatgggcagcagtacagcaccttccaggaggctgctttacagcatggtcttcttgaagatgaccaaatttggcacaaaacgctcggcgaggcagccttgcatcgctggccggatcagatgagatggctcttcgtgagcatcctcgtttttgggcagccaagcaattccctggaactgtggtacaagtacaaagaccaaatgtacaatccgcagggcattatcagtgcggctatacgccaagcacgggagcaggaagcgctagccgacattgattggcgattgcacttctttaactcaagctgcatgcactgtggcctcccagatccaccaaattcaaaagccaaaaatatcaatttggcaattgaagaatatttctatggtgatgatggaatgaatatgccgcctggccagccaaaacaaaggccacaaca

SEQ ID NO: 147 - DNA, 5808 bp, Heterodera glycines
  unsure (1)..(5808): unsure at all n locations
ttcgcgctgatcaggggaaacattcgctatgtgtcgacaacacagtcagcccgatcgcttctcgaaatttggcgctatgggaacggctacaacaccgaacatgtttctgccgaaggaacgatgaaggagaagggactgtacatgctcaaggcatggtgnatgacacaagtcaacgatttcccgggtgatcgagaattggggatcgagaagaaaagggcggagagcgaagagaagggaagagggaaaacggaagggaaaaacgtgagaacgggagaaccagaccgacaacccagtcaccgccccattccatcgccatttcgtcacaccggccgtgcttttcatcgttcgaatcgtacgccgactcatcacccgtatgcgaatcccgtcgaccgacaccagccccagccttttcggatgccgaatcagcaaggcccgagccgccgacagttccagcgctgaggacatcgcttgtcggagggcgaggatgtcgtaattaataatgacctcattttatttttgattttatgatatttttggcattttgttttaatgtttgtgatttcgtttttgttttcttttttgttggcagactttaatttggaattgcctgacataaaataataaggctttattctgtgtgctttaattgtgtgcaagtgctgaactgttcgacgtgctgctgagtaaaattaaattatttgtacgttgcgctcctgcaaaaaggtgtggtcgacgcgatttttatacggggaattgtagaagtaggaaattctacaaagtcttcaactactgcggcgacaaaaaagtaaaaagtgaaaagaaattcaccaacgatttgtcagctcggtaaagtaattccgtctacaaagctgattcgacaaaaagggtaaagtaattcccatcgacatttcatcttctacagaacggaaattttgtgaaattcatcagttttcttctcaccgaattcgacaagtgaaattttgtggaaaagggcgaagtaatgcctaatcttcggtcgcctccgcttactcgtcaaagagcactcaacctcggcattcgtctaaataacaacgcaaaccagcagggggggcaacaaattgtagaaccacagcacctagcagaccgacgtttggaaaacgaggctcgccataattctgtctcttcagttgcttcatcacttttggacccaactgaaattcgccgacgcctgctcatgtctggaattggagaaaatgctgctggagttgagaacggaccgcgagatgagcaacaattcgacgcactgctgaaccagcatggtaacgacttgtttcaaaatgaaaatcggggagaaaattttgagagggacgtttttcaaccggtggtcagagaaccgccgttgcaattttcggaaaattttgaaaatggtccgaggcaatatgagttagttggggtacggcctgttgtgacttcgacaccccatgcggtgcaaccacaaaggcgaccaaactctgaacccttaaacccgggcttagttcgtccccaagcgatgtttctgaatagttttcaacaaaatatcgccgcaaatccaaacggcaatcaacggcaaagagccgaacagcgtttcattgatgaagacgaacgacaagcggctctggttagacaccgccaagcaaatttgacccattatgtgaacaacgaccgcgattttaacgcgtttcatcctattgctggtgctcaacacgtttggcgcgcacaaattcagcatgtttcatacccaaacaacccgcaaatcggcgaggttaaccctcaacaaattccacgacaaaatcaaggatttgtagggaatcaacaaatttttcgtcccgttgcggtacgaaatgattttcaccctgaaaattatggcgacaatttcaacttcggacatcccgaacagcaaaattttggtcagcaaagaactgaacaaattcaaatcgcaaatttggaatatgttttgactttggaccgtctgccagagctaaaaggaaatgaaggagcggataaagtgaaaatttttttcaaaaaattttcaaacgcaacggaagaatggcccgagcataaaagggttaaggcattagaaacgaaagtctcaggccgtgcagaacgtgcttttaatgcagcaataagctctggaccacatcgcttcgattcaattcgacgtgcaatgcagaatcagttggaagagacggattgccgtgagatgggagcatttgatgagctgatgagcggcgtaaagcgtcgttcgaatgaaaatttggacgcattggcggatagaatccaaagcctcgtctcccgtgcctatccgggattgacacaaaatttatgcgacgattatgccattaaacatttcgtcagagctctagcaaatcctgagctatctctaactttggaaatgtcgcggaaatcgggaatgtccttcgatgaattcgtggcactagcagctcgtgccgaatcgattcagcgggcgaccagagtgtcatccaatgaaaacaaatactcggataatcggaaccgaggcttttatttttcgaataatttttcaagaccgcaaagttctgagtttcaaggaaactcacaacaacctcgaggaaggattgtttgctacaattgcaatgagccgggtcatctttctcgggattgtaatcagcagatcaaagggcagcgagtcaacagcaacgaaaatgagcgaattcgcaatcaatttgcgacgggttcgaattctgtagcgattcgtaacaacgaagagtcgccaagaaacaatcaaagaaattttcaacccaaatcacagaattttctcaaacaaaactgcatcgttatgcaggaggaccaaccacctgatgcattttgctgtggtgtgcaactgacatcggagttttcgaattttttggagaatgagttgcatgaggaaaatcagagtgaagagtccaaagaaaaggaccatgtaggaaaaattttggtgatcagagtggagacgaacaatgttagaacggatgcaatgttggatggaggggctcaaatttctttgattggagcagaatttctctacaaattgataaaggagcacggcctggacctgagaaaatccggtttttctcgtacgaaggcacgaattgctgacgtaaacggacaacaactgaaatgttttggaatggttacaataccaatttcaagaaaaggacgcgagaaaacgccaatttgtttccatataactacggcgcaatttggctacaatttgctgtttggcacgaactcaatgacgaaattgggctttcttctatacgactcggtgaacaaagaaatgattgaatttgaggaagggcagcaaaatgatgggaattcagctcgaattattttttctacaaaaatcgaacctcgaacgaccaaattaattgaaattggagtagacaaagaatggaatggtaaagatgtgatcatcttaccttcaaacatggaaagcggtgttaaagttgagccaacagttggaaaagttgaagatggcagagtgattgcacaaatcacaaattattcgaccctttcgcaacgcataaatgaaaaaacttatattggcatgattgaaaaggtggacgagatttttgacaccgaaaattcgattttgtcagctgaaatttcatcaacaatggcttacggcaaaaacgaaagtgggaaactcggacgcgctgatcttcacatcggagaaattttggggcatcataagaccgaactgttggaacttataagccaacacaccgaaattttcgctacttctgaacaggaattaagccaaactgacttaatccgtcacaagatcgaaacgggaaaggcgcttccaattaaatcgcaaattcgcccagtcccatatgcctaccgagaaaaggtatcggcaatgattcaagactacttaagccgcggaataattcgctcatcaaattcgccatgggcttccccgattgtgatcgtgccgaaaaaagacggaacgctgagattttgtgtcgattacagaaaacttaactctgtaacagtgaaagatgcatttccactgcccaacatcgacaacacacttttagccttgggcggaaagaaagttttttcgaccttggacttcatttcgggatattggcagattaaaatggatcgtaattcgattgagaagacggctttttcgacggagtttggtcttcacgaatttttggttctccctttcggcctttgcaatgcagtggcaacatttcagcggtttatgacccgactttttgcggaatgtcttaacaaattcgtctttatctacatagacgacgtcttaatcgcatctgaatcatgggacaaacacatcgaacatctgaaagaagtttttaaacggatagaaaatgccggactgaaattgaatgtaagcaaatgccattttgcttcaaacgaacttccgtttctgggccatattctctcccgtgaaggattgaaaatggacatggcaaaagtaaaacctgtcctggatttgcccattccgtccaccaaaaaacaacttcaatctcttctcggttttctcgcatattaccgcaaattcatctacgggtttggcggaattgctgctccactttattcacttttaaaaaaagacataaatttcaagatcggcgacttagaaaagaaagcgattaatacgttaaaaagcaaaatcgtcagtgatgttatgcttcattttccaaacttcgaagcagcgaaaaatgacacaacgagaaaatttattctcttaaccgacgcaagtaaaattggtattgccgcaatactttgtcaacccaatgaaaaaggcaacattcggcctatttactttgcatcacgacaatgtaaaaactatgaaagcagatactgcccaacagaattggaggctttggctgtgcgattcggtaccaagaaattcagccaatttatcaccatgatgcccacaaaaatttttacggaccatcgagcattgataccaatgttcaaaagcaaaaaggaaacgggaaacagccgtgtggacaaatggctgatggaaatgaatgcgaaattcattttggaagttgaataccatgccggaaagaaaaatgtgatcgcagatgtactctcacgctctctcgccttaaaatgtttggattcgccaagtgaagccgaaaaagtcatcatcggacaggttcgccgatttgaaaatggtcaaagacctcaagaaatcttatcgcaccaggaatgggtgaagaaaacgaaagagagtgagctcggatttctatatgatttcctgacaacaaaagtactcccaatagaaccgaaaagtcggcaaaaactggcatcttcacttcacaattcacaattataaatgaacttctttataaatgtggaaaagacgctgaacttcgccttttcgttccgtcttcttttcgacaaaagttgataagagaacgacattcgggtgtttgttctggacatatgagcggaaagaaaatctttcttcagttggcagagaagtatttttggccgaatatgtatttcgactgtgttaaatctgcatttccatgccgaatttgtgcgcatacaagaaacccgaggtcaaatgagcctcctctgaaaattgtagctacggcagaaccgctcgaattggtctgcctcgacattttatcgattgggcccgcgcactcgtgcaaaatatattttggtggctggaaaccacttctcaaaaaatttgggtggcaaccgcccattccaataaaaagggcttaccccatcccccaaaagctcgttaagaaactttaccttaattttggg

SEQ ID NO: 148 - DNA, 7430 bp, Heterodera glycines
  unsure (1)..(7430): unsure at all n locations
ggaaatttctggcttcagctagcgtctaggttggtcccaatcagataaactcggaattcaaaaccgttgaaagtacccattgagaggatggttagagtgccggacggagtcccggacataagcacgcttccgaaaggcaaaaacccgtataaaaatcagcttaatgcgcttctgtgcattgtctgtctgatttacaacgaaaaacttgaaaatgagacggattataacctgcttaaaggcaaggaccatcctcaaaatatcagcaaaaatacttctttccagggagatagaatggattctcaaaaaagtccgaaagtaaacggaaaaaatttgatgggaacggaaattaaggattttttgggaaaattcgcggaattgtggcacaattgaggacaattgtttttcaagggaccgaggaggtaatggagacggacaacatcgactttgccttgacctgggatatgcagtgcggcggactcggaccggagcatcgaaattgtgtccaattgacaaccgctgatttggacccagttttggagagggccggattcggactcaaggtggccgaaagcagactgaagccacaaaatgcaaaattcgggcttaaggtcgtcggaactccgttgaaggctttgttggccacttttctgttaaaaaccaacgccatttcttcatctgcagccggcagaaagttggcacaatcagtgattggagcaccagtcgggtttgaactgatcactttcatcggaagccgcgaaaccaaatcaaaagtggccgaattccggtggaagaagatttggaggccatcctcgagaaatggaccgaatgctgtgcagttacacggacgaaattggcaaaatgtggatttggcgccatcaatgtgccaattccgcgctcaattgaagacctcccagaaggagaaggaaaaccgtggaccgaactgctcggaaaagccggatttgtgctggagaaagtgaaggccacgtcggtgctgcgcaaacaccaattcgttacgtcgccacgcataattattggagactcaagcgcaaagcaattggaggacttgtggccgacttctcagtttattcgcgccacccaaggaagtgttggagatgtaatgcctccgccgttcatccgcgatcaacaaattgaacacgacatgctgatcgaccgaatgaaggaccatttcgcgctgatcaggggaaacattcgctatgtgtcgacaacaccgtcaggccgatcgcttctcgaaatttggcgctatgggaacggctacaacaccgaacatgtttctgccgaaggaacgatgaaggagaagggactgtacatgctcaaggcatggttgatgacacaagtcaacgatttcccgggtgatcgagaattggggatcgagaagaaaagggcggagagcgaagagaagggaagagggaaaacggaagggaaaaacgtgagaacgggagaaccggaccgaaaacccagtcaccgccccattccatcgccatttcgtcacaccggccgtgcttttcatcgttcgaatcgtacgccgactcatcacccgtatgcgaatcccgtcgaccgacaccagccccagccttttcggatgccgaatcagcaaggcccgagccgccgacagttccagcgctgaggacatcgcttgtcggagggcgaggatgtcgtaattaataatgacctaattttatttttgattttatgatatttttggcattttgttttaatgtttgtgatttcgtttttgttttctttttggtcctcagactttaatttggaattgcctgatataaaaataataagactttattctgtgtgctgaactgttcgacgtgctgctgagtaaaattgaattatttgtacggtgcactcactcagggacattgcctggtggcatcggttaccagaggtcgtcaccattaatgatgtttgtcagatgggcgtcgtgcggacgacggaatgggccgagcacatcagaccgtttttttacgatttttggaaattggaaagtatcccgccgattccgccgttcatcaacgacagagcaccattttgccgccgtgtccgggttgaaaaaagaggcgaattgctaggattttttaatcagcaattttatttttcgaatttcaacgaagcgtatgaattcgtcatccacggaagaacctaccgatgtgttgagcagtattactgtgctcagaaagcgttgtatttgaaacgtttcgacgcggcggatgcgattatgctggggacaaataaatatggcaaaagaataagcgcatttgaaatgaagaaatgcgcaaacatgaacgggtaggacgaagtgactgtccaagaatggactgagctcaaaattggcattatggaagaagcacttaaagccaagttttcggtgcccgatcttaaagatgtgctgttgagcactggatcggccataatttgcgaattatcacccgaccagttttggggggtgggctgtagaccgggactcatttatgacaaatggctaacagcagacatacaacagtggaacggttcgaacacacttggacgattgttgatgcagctcagagatgatttgaaggagccaacaccaaaaggtacaacacaggctgttcagccaaatgatggatggtcaaaaaatagggaagaaaattttcaaaatattcctgttgaggaaaacgtatttgacttaaaaagtttcaaaaatctcgaaattacgatcgcagacgaagcaaaaaaggggtccaaaaaattcaacaaatgccaactcgatcagtgaactattgatgagccacgcagacgaagtggcagaggcagaggaaacgacaaatgagaaatttgcattgtctgaaaggattaaccagtggctcaaatatgcaggcataaattgccaagtcctagtttttggttcctcattatgccaattggcacgacacggttcggacttggaccttttcatctacaaattcgaccaaacatcaattcgtcttgctgacgaattgggaaaggttcgaaaaattttaaggcaaagatatccacgaacagagatggaattgagagcgagaggaaacaccccggtattaaaaatcaaactggaattccacgttgatttgacaattggacgatccgaaaaattgaatggtgtctacaattctgtgtggctggccacgttggtccgaattaatgacctgttcaggtccgtctgcttattggttaaataatgggcaacggatattaatcaaccggaatttggttcgttcaatagcctgtccttggttattatggttcaaagttacttcgctgaacaaaagctgttgccaagcctgtttaggctttatcctgatatttacaaagaagacaaaatcgtcaaattctacgacgcagaattccatcaagaattagatgcaaaagcaaagtgtccgcaatctactccatcgttaattgaggtgttaaccgattttttcctttggttggatgatattgactttgtcagagtgaaattgtcagcaaaaagcggcaaaatggataggacagaaggcaatggattgcagtccgtgataatcgaagagccgtttgatgcaaaatcgaactgcagcagaagcttaacagataaggatttccaaaattttaagggtctgttaagacgcacgaatacgtatctcagagcaaaggactggtatacagtgaaacacctgtttaggctaaaaccgacaaatgatgtagcatggtcaatgaccgacgaatcagaagacgattcgttcgacaaaagtttttccaaaaaatcgctgaaattttttcaaaataaaaaaaaacttttcgggaagggggagggggaaactaatgtacccaaaataaatagttagttatacattgatactactaaaaaaatgccataaaacaacacatcagaaataatatttttccatttttttttgtcatttttaaaataagtgccgttaaaatgcattgagggaatttaaaattaaaaaacaaatataaataacaaaaaatataaaatatatttccttaattaaataaattaaatagtaatcattaaaattatttaaaaatatattttacctgtccccgcacaaaaatgtggcatttcttctgcactttcgtcccaccatcatttgcaccatcgtcatcatcagcaaaaggtgccgaaaaagcaatgtcaccggttggcgttggcgccgtgccatcgttgttgttgtactgctcgaaattgatggcacaacgccggccatagaccaacagaatgccatcggcgccaatttcgagccgagtgcccatcaacggttgcccaattggcaccaaattatgcgggtatttacttgaaaaaacaaaaatttgtgtttcaaattgcttataaatgaaatttagggccctaaaatcgcaaaagatccctcaaaaatattgcctaataaatgatgaaattatagtaaatccgcagtttatgaaaatatttttgttgaagaaatatgaaactcggattccgttatgatcttggtgttgtaatcttaaaaagaaaatccgaaaaagatcattaaaaattaaattttaaaatacataatttaattaatttttccgcgtatttcatttatgtaaaatgaaaattagagttggttgggaccaagaattctgctggcttggtgaataccagctcgaaaagtaaaaccatatttttctttcggtacaaaaaaaagttgagaaaatttcaagaaaaatattttttcaaatttataagcgatttcaaaatttttcctaaaatctctgaaaaaaatcaattttttctttgaaattttctttcttgttaaaaatttgaaagaaacgataatagggggagagaacgaagagctcccgagtgtattagatgttgaaattgccaatttgcacactttttgtcggcaagttcaaagcgatgaacggatgcccagcagctgacttcggtcaatccgtacacattgaacaccgccatcggacacgacttggtcatgtgatttttgaccaaattcagcgggaaattgtcgccgccgatcagcagcgtttggatgggcgaatttggaccaaaaatgtgccgtaaaatgtccgtggaaaggcattggagcaccgcgggagtcaactgtttgttgcaaaattgtgtggaggattaaatgcaaatttttaatttttcgtctaataattatggcccaaaaaaaaaaacctaaaaatctcaattttcaaaaattatttttaatgttttttttgaaaaattaattaaatttttaaaaaatttaactgttcataaaaacaaaaacataataaaattgtaaaaaaaaacattgtctcttttgtaaattttttacaaaaaattaaaaattttatttttaaattttcctggagggcgatggcggagcagttcatttcccgccgaatttttttataatttccagactaagaaattttcaaaaaaaatctttgaaatttttacaggaaattttcaagtaaaaaatttgaaaaatttttctatgatttttcaatactgtttttctaaaaaaatttccaaaaaatcgctgaaaatggtttaatttttttctttgaacttttcttataaaaattttaatatttttttgaaaaaatacacaaattatataataaaaaaacaaaaaaaagaggggaaaattggaaaaataaatcgctgtaaaaattcgttttaaaaaaatgataaaatccatgtgaacggtccgcaaaagtcgcactacgttacagggttggtatcacccaaagtcggcttccaaggacgggtatgccgatttggaaggacatagagggggaaatacatgaaatccaaggacatttaaaatttttattatatgcaatgaaaaatgattaatatttattcaaatggcttgtatttttcaccggaatggattttttccaacattttttttgttttcactgatcattttcctaattcgcgacgacttttctgctttaaaaacgctttttttgcggcgtgttttttcaaaaaattttgtgggacagaggggaggggggggggggtgtccggcggtgccgacaggcgaatttgttaacagattttcaccaaaaactgcctaatttttgtgattttaagcctaaatttgcatttttttgacataatgccataatttaatccaaatattgttgaaaattacaaaaatttatcaattttctttgattttttttaaacttttcctaatactcatttccaaggacgtccttggcatccaaggacggataccatccctggcctattataatgaaaagaacaatatatgtgggtggtagatgcactaattagcgtaaattattaatgctctaattgccttctttaattggccaaatcaaagcatccatcatttgccttgatgagcccagcggtttttttttcaatttttcaaattaatggaataaataaaccaaggatgttttgtttgatttcaagtacattaaattagggatttggcgatttcaacaaatttttggcaaataaagaattgcctgcataacataaaacagaaatatttacctgagctattttttgcattgacgcttttattctcttctgaaacttaacgaaattttttgaaattttgtagactgattgagaacattgagaacacttagggctatcgaatgattatgcggatattttccaccgtttgcgttgtaaatgtgccccgacaattttcaacgattgcctaatgttacgtgttgtctctttccatgccggtgccgacgatttcttcatcgaatttcagcccgatgacagtgccatggcatcggatggacaagcggtggcaaaatggctgttcactctccgtccggacaatgtgccaaaggtgttcaaatgccggattgacgaggatggtggcaatttggcgacgaagctattcaatcggtgcttattattaattatatgcgcgttaggactagtcagcttgggataactcagtttatggaaaatatgctttacgacaatttagaaaaattataaaaatagaaaaaacaattaaataaataaaataaaaatattttttaatttcagtaaacaatatacattaaatttaacagttgttttcgggtgctatgataacttgaacacacacacacacaactcatacaatggcttaggtttaagctttagattagtcctaggcttaggcctaggcttaagcttagcctttattttataaaaatttttattgtacgattgagttatcatcgtctttttaagctttttccaatgcttcttctcctcccgcccctttctatttcccagatncaaattttcaaaagcctcatttgacacgcaaaaaaaaaagctaattttttttaccnaatttattcaaacacgtttaaatgtttaatgtcatatttttgatttcattccattt

SEQ ID NO: 149 - DNA, 1527 bp, Heterodera glycines
  unsure (1)..(1527): unsure at all n locations
aatattataatctattctatcccagacggggaataggcccctaacaatgaataataagcggataaagggataaccactagaccacacatcttcccaaaaatatgctttatatgccaaaatatatgtgttattttaaatgaaaacctacaattatatcttatatatgacaaaccctagagaatactataaaaaaatgcaaaatatgaaaatatggtaatttctgtataaggatcgaacacaatgtaaaaataaggaaagtctaaaagaatagccactaggctatttgcacaattgtcaacattacttttgaagaatttattaatatatttttaaaattttttccttttaactccaattttctttactaatttttcactcagacccccattcttaccagtgtttgtttttcccgtttgccctaccgggaccgggacctgagcttttcaaaatcgggaccggtaccgggacctcggatgaccgggaattcccggcccggtcccgcttcactctagtattgcgctaaaaaaccgccgcacactcgactacggctacgggctatggaagaagtccgcgcgtgatccgcagtcaaccgctgtggcgctcgtcagactttttcctccgccctccgtctcgccccactacttgctccgtcttcgcatgctcccttttatttcttttggtactgaattgtccattttcactgggacttagttgccccagtgcctggatggcatcggttcgaatttataccttgttttttagatttagctgatcaagagctttcgtatgatatcaaatttgtctgaatttgaccattttaagggtcagtggcccccccttttcactcaatttttcgagttttaaaccggttcaacaaccgattttttggcatttccgcaactggagacgtattttttcgtgcagagctcgtcgagacaaatcgattggtatatcatttttgccgttttttacggtggtttactattgtacacccttattttgctatctgtgtgacattattcctaataaggcaaattgtgctaattgccacaaaatgaaccgacggtaatgaattttttaaaagtcacttattcttgtttgcctaatttattttcattatttcagttggatttgcaacgacgtttggatggacattttcccctgttttgaccatactcaactcggcctcaaattggcattgctttcgccacgtttcaatgcgttggtggacaaacatttcgatggcaaaagcgaattgacaatttggagacgaatcgagattaacaagcgcattggaacaaaaccgaaactgtctgtacggatggatgacaaatttgtgccatttccattgcccgaccgtccgttgcccagcaaaatccgatttaaattccttatgattgagtaatttaaaatcagagatatggcaataaaagcatttattcaattttcacagttacatcgatcactccgtcatcgcttttcttcgttcaaccaccaaattttcgacaaaagaggcacccagntgcg

SEQ ID NO: 150 - DNA, 4855 bp, Heterodera glycines
atttttgcatcaaacattcgccacttggactttctctatggttatcatttggacaatttgcgtcgtcgcacttcgcccacaattctcactgatctcaaccaattgagttcaatcgattccgttcaattgttgcccgaggcaattggtgatgattttgatgggccaaatgcaactgctggccaagcattgtccaaatggttgcactctccgagaaaagatggccaacccaagcgattccgtttcaatgatattaatgaacaagtgggcgtccatttgatcaacaatttcaagcaggtggcccacattttcggcaaatcactgatttttggaattatttaggaatttatgcgtgccacttcttcagtcagttacgaaattcatttttctgttcgcgtgccgtcaatgccaatgatgccgtttgaattggtgaacgaacgaacgcaagaaaagctgctgatgctgactaaaggaaacgaaaatggctttgacgattggttaatgaagcgatgcaaaattattgggaagaccgtggcatttcagcaacagaagaaagatgaaaattggaacaatgtgttcttttggttttttagtggaaccaattgcatcgggtgagcaattaaaaaaagcatttgattttgattaaataattaaaattgcgcttaatttaggccattgtctccgccaccggcagacagaagaagaagacgaagcggaaaaaagcagcagcgaaaaagggccgtcttctgctgacaatgattgagtgacggacaaaagaacaaaaaagggctgggaatttaagtcactaaaaatcttcaaaaagtcgactaaaaaagtcataaaaaatcgcaaaaaagtcataaaaaacccaaaaaagtcacggaaaatgaaaataagtcctgaaaaattaggcaaaagttaaaatcccatttttaataatttatagaataacattttgatcatatttttaggcacttaattttataaataggtacctaaaataggcataaaaaagagattcttccaacaattgagaaaaaatttatccaggttttttattgatcgaaattttatttttcggaattttctttgtatttttcgtcattttcttcgctaaaattcaaattttgcctcaaaaagtcaaaaaaaatcacaaaaaaagtcgcaaaaactcaaaaaaatcataaaaacaaaaacaagtgtaaaaagtcacaaaaaatgcatgtaagaggcttcagacaaagtttagaacactttttaagtcattttaaggccatttagagtcaacaaaaaaaagtcatttgacttaaattcccagccctaatgatcagccacagaagaaatggattaattaagaagaatgaccgatcgatcataattcatcagtgttaaaatgtattttatgaagaaaaaaaagcctggaagaagctttccaacttattatgccgaaaaatttttgcaaactaaaagggaccccatttgtttttaataaacttatagtttttcgtagggttacacacgggctcgggtacccgaccgggtcgggtacccgcacgtccggttttttaatacccgagcccggtacccgggcccggttttttgaaaatccaatacccggtacccgacccggtaggtccgggtaccaaaaatacactggtaagaatgggagtttgattgaaaattagtgaaaaaaattgttgttaaaggtaaaaattaaaaaaataatatacatattatataaaagtgccaccaccaactgtaaaaatggcctagtggatgatcttctttcttttctgttacttttccttggttcaattcctccacgggcattaaaatatttttaattttttttttggtatactcatgggtgtcatatcgacaaaatataattcctcatatatttataactaacatatattttatcattttttaaagaaaatccgttaacaaattgagcctagtaatcccaaaaatcaacctttttttgtggacaaatctgttaacaaatcccattaaaaattacaaaaaattttccaaaaatttttttggaaaaagcgtgccgaaaaaagtgatgtgaaatacaaaaaaggtctaccgggcggtggtaccccctccaagaaaacatgagaccgctcctgacctttggaaatattttctttagtttatattttagtaaaggcattttggtaaaattattattttgaaaaaaataaaaattgaaaattttttaatacccggttttaccgggtacccgacccaggcccggtttaaaaattgataccggacccggtacccggcttttcaacacccggtaatacccggccccggtttttgcccaaatacccgggcccgtgtaaccctagtttttcgggggtgtgctgtgacgaagtgtcaaaagttttaaacaaattatttggaggcaaaaaatttacccattcaatacattgcacttttattattcattgtatttttatatattttataatttaagcatattacactattatactcggatcagttaaatttgaatttaaaaaatttctttgagataaatataaagagtgaagtgataaaaatatggagttagtcgtttttgtgggaaagttgacatagccgcaaatgtcgggacacaatgatccaacctttttctccaacaattcaaaaagtatcaaaatttgtgctgtttgagacccaaaaaaccaaagatttttatcgagtcgtcagactcgagaccgactctcgggcataattaattaaaataatacaatcagacatgacacgagcataaaatttgatcacagtattcccgcgttgcaccataggggctttattcccgtctcccagttaagttcttaaccgcggttaagataagtaaccacggttaagaaattaaaccgcgattctcgtcttcccttttttaaccatggttaacgcttaaccacggtttatttaaccgcggttaagaggccgcttaaccgcggttaacgccacttaaccacgtattctcattttttggtattctcgttttcacatacttaaccgcggtttaatgtttcccttgtaattttaaccacaagtcgtagcagggttaagcccttggttaagagaaaaattaaataatattcgaataaaaatagtctaaaaaaatttttaaaaccgtcaaaactatcaaaagaagttagtaacattattatcttttatataaccggcatttataattttttttttttttgcatcagcgtcaattaaattctttttgacttctttcaagtaaaaaacattttttacgaccgtcaacttccacacaatcgtcctaaaaattttcaaaaaatatgccccctaaaattgaaaatgtttcaaaaaattttccccgaatattaattctttctttaaaaaaatttattttattttatttttttattctttccgtgagaactttaatttgaaaacgaatttttcgtctaaaatagaaagaaaaaataattaataaaaaaatttatttaccgatttttgatacctattatatgctgtgtaattatcttatatatttggtaaattttaattaatcaaaattaattctcacgaattttagaataaaaatttattttttatatttatttatttaataaatttaatgcttaaccgtggtttatttaaccatggttagcttaacaacggttaaagacgagaatacatattttggttaaaaataaaccgcggttaaataaaccacggtagcaaaaacaataaattaatgaattttaaatgtgtctgtaattgatttaattttgcctagaattactgtatcagttcaagttttactgtactgatttatatttgtaaaattatggaaaatcacatttattggaaaatcggccaatgcattcctggcacaaaattgtttcaataaatagcacaaacaatgagcacggtaatgaaatgttgttgatgttgtggttgataagactttggctagggaaggttttttaggaaaatttaaattaaaattaattttaaaaataaaaacgatacctttttggcatcaaatgcaaaactcgagctcaagtgtttggccattttttagagtaaaaaatcacttgaaaaaggatgaagtggaaaatggagagcattattaattattttttgtttttggaaaaacaaaatttaaaatattctctaaaaaaattaaattttattttttcaactaaattaaattataaaaataatttaaaataattttactaatgaattgacaaaatgaatgaattaattaattaatgaattaatttattataaatgaaaatttattataaatgcataaattatagaaaataaatatcggataataaatatttaatttgttatttcataagagtggattattgaattctccaaaaaagcgaagttacttttgtttcgtttctctgcatttttgaacgtctcttcgatactttatttgtttggtttagcttttaatcattactgatgatcactagagcctggattttgagtagagaccggacaagagagtcggtcggtcggtttcggttaaaaaaccgaaaaaaaaaccgaaaccgaaaaaaccaccgaaaaaaaccgaaaaacttaaaaatttgtcggtctgtcggtttcggtataaaaaccgaaaaaaaccgaaccgaaaaaaaccgaagaaaaattttcggtataccgtttcggtttttttgaatttttttatcttttcccaaaaaaaacaataaaccatttttatcaatagaaaaagcgaaagatcacctctgagtaaaattgtagagctattgaagctctatcaatggtgtataagttgggaaaataattgaaaaaggcagccaaaaaacgt

SEQ ID NO: 151 - DNA, 1110 bp, Heterodera glycines
aattttcggtttatttcggttttttttgaatttgttaatttattttttccaaaaatgcaagaaaccatttatattgaccgaaaaatgctctttaatatttatattgaatttttggtagatttaaagaaattttttgcttcttctaccaaggctaaattattagggccccgacttttagtgccgaaaaatctcaaaatagttaactaaaatagtgacgaaagtgccaaaatagtgaccaaatattgaaaaaagtgcgaaatagttacaaatagtgacataattttcagccaaaaatctcttaattgtccataaatttgcttttcaaaaccgctttttttgctgcgcaattttttcaaaaactaggaataagcgggttcacgccgtagaaattctttgaaaatttaatacgatttgttaacagagtttgtagaaaattgactattttgctattttgggtcaaatttttaaaagagatattaatgatgtggaggccatccggcggtgccgataggcgccgccgggaaaatttcacaaattttgaatgaactttgcgatgaaaatgagttcattttaaataaacaaattaattaatttatccaaaaatatttggcattttgtccaaaaattctcaaaaatttcccccagcggctcctatcggcataaccggatgctaaaaatcttaaattttctttaaaaattggctcaaaattgaaaaattggtcatttttggacaaaatctgttaacaaatcgcattaaaaagtcggtcggttttttcggttttttgattatttcggtcggtcggtttcggttaaaaaaccggaaaaaaccgaaaaactcaaaaatttcttggtcggttttttcggtcaaaaaccgaaaccgaaaaccgaaaaataccgaaaaaaacgaaaaaaaccgaccgatttctaattttgaggcatatgccttttttttgttgctaacttgctatggcctaatacgcatgaaaaacgagtttttaacttggtttgaagcttctagcttcaactttttggtgcctttttttgcatttttttgttattttggtgccttttttgccttttagtacctttttcatgcctttttcagcattt

SEQ ID NO: 152 - DNA, 1372 bp, Heterodera glycines
ttttaagtgcatgaaaaatttgaaaagttcctggttaatggacatagaacaaaaatgttttccaagtcctttcgtccttttcctttaggctgaagacaactgtacactagagaccggagatatatagtcggtgggatcccgagtcggtatcccgaatttattcgctggatcccgatcccgtccatactgtattgtgtactccctagaatagaatcgaattccgtaatatttaggtgtttggtaatccattccgccggctatacacccccagatttttgaaaattcgggaaaattaaaaatcctactgttacaaaatttttgagcaaacaaagagcttggactgggcttggaaacgaggatagggccaacatagagtccaggtttttttcaaaatttcgtaattttctatttttaaaaactttattcaaaggaatttcaaaaaaaaaattaaaatattttgggacgcagttggctgggacgcagttggcctgggacgcagttggcgggacgcagttggcctgggacgcagttggcgggacgcagttggcgggacgcagttggcgggacgcagttggcccgttccggaaacaaaccccggaatttatttatccggaaagctaaagaaatttcctgaatttctgctcaaatgctctggaattccggagccaaaaaattcaccgaagtccggcctaaaaagtctcagaaatgcattccaccaccgtttgttgggtgtttgctgttgatgtgccctgctgccattgggtgcaataaagacaacagataacatttccccaagcaagaatcaaccccccccccttaatgagagctcctccctcccctcccccaccagaataaaaaaaataatttaaattgtaagttttgaaaaaaaataattatagttttaatgaaattaaattagtgcactattaacaaactaaaaataatgaaaataattacggcgtaatcagagacatttttcttttgttcttaaatttattcttacttatttaaaaatattttgtattttttgtttggggtccaaaagatcttgtgcacctttaaaattttttggcaaatttgattcatttaaattccagtagacacttatttattttcaaaaaattataaattgaaatgtgcgaagtcgacgaacaatttaaagataaataattgttaggactgctaattttatgtaagaaaatttgcgaattatgtaaataaaatatgtgcaaggagccactgacaagcataggcttagaattatattttagtatttcaaaatttaattttgagatataatgaagagaaaaaattcgatttttatgaatacattgtcaaataaataaagcatatatctaaataaattagcagc

SEQ ID NO: 153 - DNA, 1881 bp, Heterodera glycines
ttgtgtcaggccagtggtgaatggcaatcccacttcgcgcgcgagatctgtaaattttgtgctcaagtatcatgactttagtttatgatacccatgtataaactagcttggcaacacttgccccccccccacttccctgccctctccaaattccccctggaaaattttgaaaaaatttagtgatttttaaaatttttttaaaaagtagaaaaatttttctgattttcttaaaattttctgcttttattttcttttaaaaattttctgttttttagattttctaaattataaatttttttaatgtataagtaacttaccaccgatgatctgatacaaaacagtgcggtccaaaaaaataccggcagccagcagatgcccaattgctacattaagccttctggccttaattaattttttttataattgtcagcaaaagaaaataatgacccaatttaaataatatataaaaattactgatgtggcgaagctcatcatttggggattttgttaaaagaaatctaatgaatttaaattgaaaaaaataaaaatgaatggaaatgctggtttctaatgttggatttaaattcatcggccattcgatggccgatcaaattgctttcgttggttaaagaaattttcccacattccttggccgtaacggaaggacatgttgataaaatctttcagtccatttgattgcttttgttacaataattataacgtcaatgaataatggacgcaaaaaagttaatttaatttactttgttaaaaaataaaaccaaaaaaaaaaaattaaatttaacgcaattcctgcgaccaggtcacataaactctaggtcattcacatttttaaaatttcactaacggcatctgtcggcactagcgatggatgagttgtggcaccagtgcaacttcttggaccagcgttctgatcacgtgcggcatcggcaaggcaccgtaacgggcggcaacacacgcattttgccaaagatgagaaaaggccccagaagcaattggcactcaaatagacctgttgcaatcacagatcggctgaaaatggaagaaacataatccaatgatcacatcacccaaaccgcgaggctccggcctacaccaactttcgaatttactcaaaaccccactaaattggggaataaagctaagaataagcgacagatgaatagaacgagcgcttttgtcgaattcatttgaaattataagccaattttttagaagcattttctgttttaatgcgttgttctcaacgccaacacaattaaaccaatgtttttaaaatttgttaagattattacaaaaagaacaaaatcttagaggaaacattagttcataatatgttttgcgtcgagaaaacgaatcagcttcgtcttgtagctaaaaacaaatatgaccaggaaaagggtgcttttccccactgagactggctttttccaaagtcgggaccgacccttgaaaaaagcagaaatcccggcctgcttccgtgcaactgtaacccttcattttagcataaaaacagaaatgtataatgtagacacaaaattgctcacgtgaaaataaatgtactgtcccaatttcttaccgttcgctgcaattgagtgatttttgttttgtggcaaatttccaagttcatttgttgcagtcacacctccttcgccaaagtgtgaacttaatattaaatacaattatgaaatattattttctaattaattttaaataatattttgaatattgggccgaattgtgcctgagccgttctctccattgatgaattgtaaatttccgtttgcactttcctctcacttcttttgcttttgtattcgtcggcatctccaccattggataattgcggagctgagcattcct

SEQ ID NO: 154 - DNA, 6412 bp, Heterodera glycines
cggtgccgcccacactgtgccaatggtttgccgccctcgtcaccgcttggaccccgtcagcgcgttgcgtgtggtggccagctcgtcggcatcgacgacatgtgcagggagggccaagcgcggacaattggccaagaaacaccgagtggattcggacagggatttcgatgggtaaactgcggcaaccaattgaatgtgagtgtgacgaggggagtggggggtcagaacagacataaatagatatggtctttttttactggatttgcaggggtgatgaatacccattagaaataatggcaatttgttttttgttttttttttttgcaaaaaatttatccaaatattacaacaaaacggaagacaaccaactcgtttgtgtatcgatcagtttttgactcagttcgtttatttgtattggttgaacctgatgacaaacgaggtcaaaccgatgaaatttttaaagattttggtttattcaactcaggatgctttttaggcgagtgttcacagtttttaatatacgcaggctttcataatttttttgaaaaaaaattttgttgatcaaaaatgagtccaaaagaatttagaaaatttttaattttctaaactcgaaaatttgtggttttaacttaacctattcccaaaacatttaaaatgacataaaaagccttattccgagattgaacaccaaaaaatctaaaattttcatcaatttgacctcgtttgtcgtcaggtttcaacccaaaaaaaatacggaccaatacaaaaacgggttggttgaaacttccccaacaaaataaatattaaaaaacaaatcaaattctgatctcaaaccacaaaaccgccgctgtcgtcctcgaactcttcttcactttcatcactagccacgcttgcttcactcacgctcaacagttcggcatcctcgtcattgtcatttgcgttaatttcgctcctttctgggtgcccaaaaagcctaaatttttttatagattttaaattttaatttatatatcaaaatatttgtcaacactgcttttgaacgtgtgcacttcatcctgcccccccccccacatcccccaaatttcaaaaaaatgtattaaaccctaagaaatgtcaagtttttcaaaattgtcagagacacaggctgtttaatatataaaatttttcaattttttccattcgaaccttccgtttaggccgagaaaggacaaaaaattattattattttttttttttgaggcttaggtggtattttctctcaccacctacgctcaagctaaaaaagaatcattttttcagacactgcaagacgctggctgattcacggacagcatggaaataattttagcagaaggaggtcctgctgctgctgcccgatcactactccattcggataaagtggtgagcaagttgatttttttgaaaaaaatatgagtgcgtgcggatctggggacctcccttcctccctctccggttaccccacatttgcgcgcctcaaacactagcacctgtgtccaaaatcgggttcaaatttaacattctttcaatcccaggaattagccttttttgtctctatgtttttttccagtgcaatttcaaaaaaaaaacccattctccaatcccagcccattttttaaaataaaacaacataagaacatactcctgaactcctgggcgaaacatggtgcggttcatcatgagtttgacggccatctaaaaaaaaaagtcaaaacatttttgccaatgctttccacccgtgtaccgacttttgcggcccgacatttgcggttatgtccaaaatcgggttcaaaattaagttttttcaatccctgatcgactaatcagctttaaataagttattgaaaatgattgtatccgatcatttgatcgttaatgaatttttgaaaaaataataaaatcaaacaacagaattaatgttcctaataaactagaagacagttttttcttaattttaatgctgtttaagctatcaggacttgaaaaaatgcaactttgaatccaattttggacataaccgcaaaagtcggggctcctttccaccacaccccaaccgaaaatttttcaaaaaaaaaaatcataccctgagcaactgtttgcgatgttttttcagttcttttttggcctttttcagtgctgtgttgatgtagccttgtcggagcagcgcgaaattttccggcgtttggcgcattcgcgtccatttggggctcgtctcggccagctgaataaaaaaaaatttttttttgcgttcaaaatttttttgttaaaagggagggatccggcggtagcacgagagacgaggtgctcctgcccacccccgccccctccctcctcgttcgtcgtagggggccggtttaaaagaggggggagtcgccggtgaagggggggggggggaagtagaaatttaacagattttcaccaaaaatggttattttttcaatttcgaaaaaatgcatgcatttttaaggaaagtttaagcaaaaaaattctatttcagtgataaaccgtctcggctattcgcttccagtcatccctgtcagagccatcgccgacgcatttcgaaaaaaaagtaattccgccgctttgccgcctatgcacatccggagttttgccttcaattgtcttcgtgtgtagctgggcgcttcggtgtagtgcaccgcgccctcatttccctcggcatctttgacaatggtaatctgtttaattataataattaatcctcaaaaaataaatccactttttttgaaaccccaatttatggcgccaatggcatgcccgggcggggccgagaccttcgataatttttcaaaaaatcgagtttaattttgaaaaaaattttcagacagtttatagttttggtaaactctcaaaaaaaacatttcttttccttcccatttaaaaaaaagaaaccttgataaatttgtcgatgcattccatcagcttccacaagaaccaaagatgaccaagctcatgcagggtggtgcgggctttggtaagtcgccccgttctttcgcctctttccatgctttcggcaagccttttttcgtaccggcgtctccgtcgttgtgctttttgttgtccagttaaagcggccatagttagtgataatttatttaaaaataacagaattgtgcagatctgaattcgcaagccaatatggcaagacgattaagcaacaaaacacaaaaacaaatgcttaaagatgcaaaaaacacttttttgtttgtttgtttttttttgcaatttacgacttgggtagaagcgtgacatcaatactcatttttgagtgtcagaacatatcgcatcaacagttttcgaatatgccattacagtaaccttgcgtttcaaaaaaaaagtttctgatgccattacagtaacctcgcgtttcaaaaaaaaagtttcaaattcttgcgcttaaatggcagccctcaatcggctacggttcgctgagcattaaaaaaaaaacgattgataattcaaatttgcacaaatttatctatcaacttcagaacacgcagccaatttgctgcatcttttcagaatacgtccgctgttgttcatttcctgacaagcaattcggttgaactgagcagttttggagggtaatgcgttaattgtgtcaaaggcaaaattttcgactgcttttcgtttacttacaaaaaaataaaacaccgaattgcctataagcattgcttttttttttctcaattgtgtgtctacataagggccgaaacacactgatttttaacccaaattatgatagtcttccggaagagatgtactgatgaggcccctcttccgtaggatttgtctaaaaaagctaactattttttaatagatagtgccattggccaccacgtgtacggtcgcggtcgtcattttcagaactgttcgcgcttatcaccgacgagttggacgaggcatggtcatttttgctggctgaacgacccacgtgctggcactacgcgcatgcattggatcaacgaccaacaaaaccatgtagtggcagtgaacaggattctgacggttttttctttttcttggggcgggggtctcttcggaaatgattcaccataatttactgggttaacatacgttttttatacaaaaaacataaaaaatttggtaaagtctatcataaaatttattatttagtcataaaagccatgctctttttccaaacaatttgaattcatattgtatattaggttttaatcgacgaccattttttcgccggcggcaaaaacttttaccttcgttttttacgtattttttataaacatatttgccatattaaagtttatgatgtcaattatgctttcagaattccgaaaaattttgtgtaaaaatcttttgttttcatcgtcgtttttgcgtcaggttgagcatcatctgttccgtcgtctacggtggcgcccgtccaaactgttgctgtctgttgttgaccgattcgctggtggcggtggacagtgccaacggcattcatctgactaccgttgtgagcaattccggaaacattcaacagcaatgtttttttgtttttttatgaaatttaccccttacaaattagggtaggggttttttttgactactagaagccgtttggtccgtatggaaaaaatctggaaatttgattcaaatttgtttgctcattctgctcaaaaagagcacagtttagggtcaaattttatttggttaaactttttgaagctggtggagaaaattttgcaaatttaacaaattttctattgcaaaaaattgacaaattccctcttttatgcactcctttctttcaaccctttacggagaacgttacatcatgtttttgagaccgtctctgtgcgtggtcttggaggaggggggggggggggagagcaagggaggatataaaaaatttgcaaaaatttttcagcgattttttgggaaaatttttaaaaaaattaaataatttcatcataaatcatccctcctgaatgacaagttggacttcaacacaccattagaattgtcacccccatttgctatagacaaatgtggtgaccaatttcatcgctggcggcgtcggcggctcatgcgccgtcatcaccggccatccgttcgacacggtcaaagttcgactgcagacaatgccaaagccggcgcccggacagccgccactgttcgccggcgcgatggactgtgtgcgccaaaccatggcacgggagggattttttgtgaggtttttttgaaattaaaaatttggtcttctaatccgcttccgtcacaaatggacagttcaaatatgagtttttctcactaaaatcctatccaacccttaactcatcgaccgttttatctgaacaatagtcgcaatttggttgaaaaagcacacttttcaaagagttgtgaggtttaaacaactgacgggttgtgaataaattcggttttggtgggatttcctgaaaaaaaaatctcagaaaattttggagatttgttttaatctcggattaattccgccgaatttcggtcgcatttgatcgccaagtaaattcatttgctgttcattcatcagtcatcctttggttggggaaatccacttgttttcttaagtggctgaagtgaccccaatttacggcactcacattcgttcattcattcaaatgatcttctctgcctgccgatttgttccccgctcaaaaaccagcagctctcacataacgccaaacttttcgttttgtctggggccatttttgttcttttttgaattgaaattcattttgaagtgccagacttcaatatttagattctttcagccttttcggcagaattcgaaggcaatttcccaaacattaaattttcaaacttgggaactcaaaatttccagaaattctaagtaattcccgcactttccaatacaatattcaaatccggggggggggggggtaaaattacttgctattagtgagaccttcggcgtaagctttaatcccatggaacattcaaatgaatttgattgaaactcccgaaaatgccaaccgctcttaattaaatgctaaaactcgagactcccgaaatttcgtcaaaatgccggcaaattctttcccgatcaaaaagccatatagctgcttcaacatattgctaattacatatgaaccaaccacaccgttctttgtactctgatcgcactcagagtacggcggcgggggcgggcggcgcgacataaagtgcccgccacccaccgacggcaccccaaattgcttcttctccagaggcggcggcgtcatttgttatgtgcctatgccccgctaatgggcgccgctggcgcctcattaggcgctggctgctctcactaatcagtgccggtcggtcggcgctatgaaaccatttgttctcagccggcggcgctctcccaccc

SEQ ID NO: 155 - DNA, 2491 bp, Heterodera glycines
cccccccccaccaaaagcagcagaataaatgcaaattttattatattatgggtttaatttgattgtttgtgctgcttcatgtacatatgacggcgggttattcgctcgcgcaaacccgcgtaaacattttgcttttcagccactaatttgattttttcaatttttaattgtgaaggcaggcatctcgactccgaatattaaacccatgtcattttcggcatggcatcaaatgcccaatatccggaccaactaaaatttgccgagactcggcatccatattcctggagcgttaggtgctatctcctgctagtggctttttctcaaaattttcaaaaaaaaaaacacgcaaaatcctcaattctttaaaatgactcattaaattgtttcacggttttcttcttttacatgccgagcagatcatcattattttattatttatgtaaatggttcaatttgattgtttgtgctgcttcatgtgcgcataagataataatatggcggcaggccctttatttgcttggacaaacccgcgtaaacatttgcttttcagccattaatttgatttttttttatgggaacgcaaacatcccgaccttctaaatatgtggcttgaatcccggatgttttcagcatttcacaaagtgatgctcaatcccaaatcaaattacctaatttaaaaaaaaacacccaaaaatcttcaattctttctttatattttcaaaaaatgccacattgactggctccttccaaaattagaaaaaagtgtaaattctctgattctgagaaccctagcaaaacttcttgtgaacaaagccgattctttggcggcgccaaatcaccattttttatggcctaaaaattgcaccacatccctttgataatcatgcaaataatcatattaatcggttttgttctctgatcagaatttgcgcagcaactctctgcggctgttgctgatcagtgatcataatggatcagcttcaattatgatcaacagaggaactgataagcaatgatcagaattgttgtaggataattctgttgatcaattttgtccccactagttaattattttttattttaaattggttaaaataattcattaatttcctaaaaccttgttactctgatcaaaagaattatttttttgatatctaagcacatttatcagctaaattaactgatcagaaaacattatttttcgatcagaagaattcgagaaattttttcaaatttctgagttttccattatttatttttttgcaaaattaattcataaaacattttttaagaaagtgctctgaaacgcatctacctatatcccggcctggtcccggttattaaacaaataactcagggatttaaaatcgaaaatcccgggaaatcccggccctgatcccgaaaaatggccacttcctccacaggcaatgtcaaatggtacgagtaccatatgacagcgatgagttgccgagccttgacgagttgccagaaatttaagatgaacgcaaacggttcaacgacattcacgaatttaaaaaaaatcggtgcttttgatcagtttacgcccccccccccctgtcgctacgctcttgcggagatccgaatttgactaccattttcgcccatgtcgaattgcgaattcaaacagcattttggaaaagtacgaggggataattttctgggaatttcagccctcatttgagcagccctaattggtgcatttaatgtgaaaagtgaaagaaataaaaaatatttttgacggaaagaatcatcaaaattaacgagtcaaaaaaataagcatcaaaaaatggaacagcagatcaatttgtccattcaataaatatttcacttccgcacagttcgacgccgcttctttttacctctttttggtggggacaataatggcctaaagaaatgccaaaatctattttttatctcgaaattttttttcttaattcaataaaagaatggtaatactattctgttttggcctcatttcattttctttgcccgaatttgaacaaaaaggcgaaaaaaaaacaaaaaaaaaattgtgaaattattaatcgcaattttaatttttgatttttttaaggatatgctcaacatcggtgtatttttattaaaatcaaaatttctaatttggtattgatttaacgtataggaaaaagatataccgtacgaagtaaatatattagagaccgagccggaccggatccggtaccggatttttctggatccggcaatccggtccggcgattttgggaaaaatctggattgaccggattaccggattatgagagaccggatccggaatccggtcatttttgaaaacgccaatccggtccggtccggcgaatttttgaccagatccggtcaggctcgatctctagcaaaaatcgttcacttttgttcattttcctttgaaaaaaactctggcataatgtcctttaactttaaatgatcaaaatttcaatttttctcccggcgg

SEQ ID NO: 156 - DNA, 3057 bp, Heterodera glycines
  unsure (1)..(3057): unsure at all n locations
caaaatctatttttatctcgaaattttttttctaattcaataaaagaatggtaatactattctgttttgggctcattcatnnttctttgcccgaatttgaacaaaaaggcgaaaaaaaaacaaaaaaaaanattgtgaaattattaatcgcaattttaatttttgatttttttaaggatatgctcaacatcggtgtatttttattaaaatcaaaatttctaaaattttaattattttaaatgtttatccaatttttgctcaccaaatgcaatttgcgccattcaaatgaatgctgacattgttcaaattgatcgaattttcgtccgtccattgtgccgtcattgtctcctcaatcttaagaaattttatcaaaaataaattttcagcaatttatttattttttttaaatttttcgcgggaagggggaacaaggagctgatccggaaaaaatgatactttttacattaactgcttttgattataatcaattttttaattactcaatccgaaggtgcttaaagcgaattctgctgggcagtgaatggacgggcccacggaaattccacaaatttgccatcaatgccaggggtgttattttacctggtaaacccggcatttgccgggtttttggggtccgtgccgggtttttgccgggtttttgaaattgccgggtttttgccgggttttggttttttgaccgggtttcctgttctatactcatttatttgaattttattaaacatttcaccaaaattaagagccaactatagctaacgttcattattagggttgtaaattatatggattaacatattttttctgcgcatatgctatgaagaaaggggcttaaaaatagcatttctgcgttaaaattttttgatttggtgaaggtttttagtccatataaatccatattttgggggttttctggaataaatccatatttcgccatttttgggtttttagtccatattttggccattttttggaaattttcacaagaaaaatgaaaaaaaaacgaaaaatacacccctaaagatcaactttttggaaatttttaaaaattacaccccacaaaacacgaaaaatttgagttttcgtcgtcattttggcattttcaataaatattttcgtcatttttttgcgaacatttctttttttttaatgagaattttttcgaaatttggcaaacttggaggtgtttttgatacaacgaacaacaataaaaaatatgcatttttaagttttaaaccccattttttggttgtttattgtactttttaggtttatttaagcaaatattaaatatgcacaccttttttgggatttttgggggtttacaacatatattttggcattttttatccatattttggtccatatttggccatttttggcctttttagtccatatttcgggcttttttagtccatatttaatgtccatatttcgcgttttttagtccatataatttacaaccctattcattattctattttaatcgatctctagtctctagcttagcagaatgtcgcaaaaatctatttctggttttatttctaaaattacatttgaacaatcatcttcaactcaaaatttcgatgaacaaatttcaagtgctgaggaagcaatttctgatttagccgtttctgtttcgagtgatgagttttgggtgaattttagcaaatgtacttttgtatattaaattgatttgttcactgagattgctgagttgaaacagacactgaaagagctcgagggcgactggttcaataggaaaaacgtggatgaaaaatggacggctattttcaaaaatcctaattttgtcctgctcaaatcactagtctctgcaattctatcaattttcccttccaatgccgtttgtgaatctgtcttttctgttctcaagaaaatcaaaacggacgagaggaatagtattggcatacctttgttgaattctcttatttcaatcaaattcaattcaaaaatttcgtgcctaaatgttcacaattattttctttcattggcaaacttgctcaaacaggtgaaaagtggtgataaatatattgtttaaatgtttttgacgttttttacagtgaacaattgacctaaaaaaaattgccgggtttttgccgggtatttcaactggtttgccgggtttttaggttttggcgatattgaaacggggcgaaagcaatgccaatttgagaccaagttgggcgccaaaaaatgggagaatgtccatcaacacgtcgttgcacacccaactgaatgaaatgcgaggaaaaatgattgagcgcttttatcttaatttatgttcaccaattggggcggtagaagaaatgaggcggcgattgtcggcggaggaaaacttgctttttttgtgacgggcggtgccattaaaaataataataattgcccaaatgaaattttgtatgaaaaaaaatactcgagaccgagatttccaaaattcgccggaccggtaccggatccattaaagaccggtacaattcccggtcccgtacaactctatttgaatcaaatcaaatgcctccatggacggtaaaaaaatttaaaaagcgccaaaaaaacattggcgtaaaaaacataatgccaataattatacagaatttcatcatttattttagagaccgagatttccaaattctccggaccggaccggactggtattttaaaaaatgaccggatcccggatccggtctctcataatccggtcaatccgataatccggattttcatattgccggatccggaaccggattccggattggtaaaatatttaaatttcgatgttaatttagggaaaaaacccgcaaaatgtcatcaattatatgtaaaatttggtgcaccagaaaatgtcgccatagaaaagacaatgcgccgaaaaaaaaataaaatcaagaaaaatttaaaaaaaaaatttttattttaaagttttttatttttgaaaacctatgtttaattgaaaaaaaaataatgttttttgcggcgcccttattacaaaaaaaactttgggaatggggccggcgatgccga

SEQ ID NO: 157 - DNA, 5559 bp, Heterodera glycines
ggctggaccccttcgcaaaattgtccgctgaccccccctcgaccccggggacgggacgaaatctcgccgccggaatctcgccggctgaaatctcgccgagacaaaatctcgccgccgaaatctcgccagctgaaatctcgccggccgaaatcttgccgcagaaatttcaaaaaaaaaaattcaaacagaaatttttcaaggaaaaaagtttagaaaattttttttataagaaaattccaaaaaaaaactatttgctaagtttttttcctattctttttttcgccatagaaattctttgaagtggtgacgatagcactcactcactggaaatggttaaaccaatttacgaatttagccaaaaaaaaaaaaattctgttaaaaatcatccccatccaaaaaattttataatatcttacaaagttttaccaaaaacccgaaagaaaagttctaattgtaatacagaaatccgtaattacgtccagccctgatcccctcagcaatgggactgcttgtcccccccccccccctcccctccctcgttccgcctgaaatttctaaaaaaaattttcgcagcgagcatttcaaattttgtttttgattgtcagatgacaaagaaactgcgcgccatggaagtctcttgggcattgggcgccgctttccatctgctgaacacgtaccatgacaacatgaagcgcgaacggcacggcaggcggcactcgcgcgaggagttggagcagcgcaggcgggcagtcgaggagcgcgaggcggccgcagacgcgcgcattgccgagttggcgaacagcaggaacttgctgaaatcagtgggtgggccttccgagttatgacaaatttcgttgggttttaaaaaaatctacggccaaaaatatttagaaaccaactttgtaattttctggtcataaattttttaaaacccaagaaattttttgaaattttttcccatttgataaaaatgtttcaaggctttgcctgcatggctgttgccaagacaaccgttaacgaaccggtacggcctcttcaatttgctcactgatcatgacgatgatgcatggaatggctttttcgatgcctatgtgcgccaatacgttggtgtccgtcgccggccataatttcttcgacgagaacaatgtgaccgtccaatggaggccaaatggacggcggattgagggcagttccgggtccggcacagtgctgtgcgctctgtgttcgctggcgaccggccgtttgtgcagagccgacacggcgataacggcgagagttgtttcggctccttggctggagagcgttgggggtttggagctgaaggcggcggctgcgcgaaatgcgcgggtgagacgcctggtgatgtcgcggactaatcaagtgaattggcacgcattgccagctgctgcgacggtcggagtggaaccagtgtttgtggagggcgttggggaattattggaaaatgtgctcgtttgatggggattctcatttgttgttttgcttatcgggcggcccgggattggtgggttttaagcacggcattgtttttgggatgggtcgcccggccagggctgcacttaccaagttcaataataatgtgagataaagggaactgaacattttctaaacaaaaaatgtaacatactcaatcacttttttaaacacaaggaaattttaatcactaattaattctggaaacaaatctttttgtgcagccctggttattagtgcatatatatcattcacccgatttttaaaaatttaaaacaatgatttaatttagttggttacggtctgcactatgtgtcgtactgtaccagctaatagcattgtgcactttgtagtaaaaaaattaatttcataaattttggaaggtgaacaactttttaatttcgggcttaatttaggtgattaattttaagtgtaagggtgaatgaatagatatgcctaacttacgttatcatattttttgttttgtttcaatttggataaaaaacacaaaatggcaagttaaagaaagacgtcaaaaaatatatcaaaaaaaaaaaaatcgttttccaccgtttgtgccatccaatttgtgccaattcgtccgcacttaaaatttaaaatacaaaagagtatattcacaataaaaataatatgacacatattttccttggggaagggggtcgcaaggcaaggaggggtcgcaaattctggtaattttgttaataaatcattaaaaattccaaaaattttaccggcatcgcctataagcaccgcctgccctcctgtttccaaaaaaattttcccccgcccggtctcgaatgtgtggttctcgtcctcccccagagggctgccctgaacgcacttgctgaaggaatggcatcagtttgctgttcctgttttggcccatgtgatgggctagcatcgggctcgcctcgaagaatgcggcacggactcgccagtcgtttttgtcattgagcaggatgatcatgtgcatcaacacatcagtgactgtgccaacaaaatgattgatataatataagcaaattgattaaaatttggggattattctataattaaagaacacaaaaaaaaggatttttcattaaaaaaatgtgtctctcacccaactaaaatttttttaaacaatttcaaacgtagaaatttatcaaaatcttttgtttatataagaagttcttaaaaatagtattgctatttttttttttgtaaattttatgaggaaaacctatttttacaaaaaaaaaattaaatcgctcaaaaattaatttaaaaaaatcggagagggggataatatgtttttgaacaacccaccgcccggactggcgtctggacttttgggtaatccggtccccggccgacccacctcctcaacataggcctggttgattttgctctcccccaacttgtagaagctgcacagcgtgtcgtacgcccgctgcccgtgccatccgattttgtgccttcgtccgcgctgtaaatcttaaaagaaatataaaattccattttttaaaatttttattggacaaaaaaaacgctatgcaccttcgtattctggccaacagttccgctttggccactaattggtcatttcgtgccgacatggcaaatgcctgtggacgggctcgtaagacgaaactgcaagaaaattgggaccattaaaattttactttaaaaaaatttaatggaattttaaggccacgcccatcatcctcttaaaaaacttgaaaacgcagaaaaatctgaagcttaatcaaattaattcatgggaaaattttattcattatatgtaaaaacccaaaattctttatagaatggtagattaaactgttcacaattaactaataattaaattaaatttcgttattgcctaattaaaacataaattaaaatattaaaaaataaatacctaaataaaattcggaaaataattaaaaattttagaaatttttaaaaatatttttattctttcagtgtcctaaataagcagtttttttgtcctacttcctgtgccgtgccgtagtcggttcgccacagttccgcaacacactccacggtggtgtccagttttgagcgcgtttcctccaaagtcacacacaaattgtggcgatggtccccagcagcagcggcggcaccggcaccagccaatggaagaacagcagcagaagttgaagcagagcaggacgacgaaaggtgcactgtaaaatgacaaaaatttaaaaacagacaggacaaacgtttttggcacaaaaaaacaaatcaatgacccaatttttacttctcccccttcccgcccctctcgcttctttctcaatcgttgatttgacagaattttattgtttttgcatactgtagatttggaaatgtcgagctgtttctcgtcaatttaaaaatgtacaatatttaaagtgatcattgaaaagagaattaatttatatattttttttaattttatcggtgaaattgtgattttttatcgccgtttgactgatgagaatcccccggctttcaccctaattacctaaaattgaatgaaaaggggtttttttttataaagtacaatggttttttggggagaaagtgcaaagaatagggaaaataaaataagattataccaattcgtaaattaaaaaaaaattttttttttattaattatggaaaatttcccataaaaatggattaagttttaaaaataaaccctttaatctcgccgccggaatctcgccggccgaaatctcgccgagacaaaatatcgccgccgaaatctcgccggccgaaatctcgccgagacaaaatatcgccgccgaaatctcgccggccgaaatctcgccgcagaaatttcaaacttagaaatttttcaaggaaaaaattcttagaaaaatttttttataagaaaatttaaataaaaaaatgttaaaaatttttcagcaattttttttttgaaattttatgaaaatttactgtttttttttgaaaaatcttcaaaaaaacttagcaaatagtttttttttggaattttcttataaaaaaaattttctaaaattttttccttgaaaaatttctgtttgaattttttttttttgaaatttctgcggcgagatttcggccggcgagatttcagctggcgagatttcggccggcgagattccggcggcgagatttcggcggcgagatttcggccggcgagatttcagctggcgagatttcggcggcgagattttgtctcggcgagatttcagccggcgagattccggtggcgagatttcggcggcgagatttcgtcccgtccccggggtcgagggggggtcagcggacaattttgcgaaggggtccagccatgcactttgacgacctttttttttttgctttttaaaatctctttttttttgcggcgcggttttctcaaaaaattttcgcgaacgcgggagccggcggtgccgataggcgccgccgggaaaatttttttaaatttaagtggattttgtaacagattttcatcgaaaattagcagctttttgcgatttttaaccaggcgacgactttttttcttctttaaaaaacgcttgcctggcccaaatattctttttgccatcttttccaaaagcattctaaaactttgttcgttttattccattgaatttttaatttgttttccaatttttctggctctaaagtaaattcttcgtcatttttatcatcatcagcattttgcaaatttattcctaattctaatcctgggtttataaaatcgatcggacggagggctctttcgccttccggttcaattgatacatgagtgattggtcggttattcatagcccactcgacttcagttataaatgtgcgcaactcatccaaatttaataccatttttcccagtgatgctttagacgcatctttacaaacttttactaatcgttctgccaaagaattagcccatggagctagagctggtataaatctccaaatatttttgatttaaactaaatatttttctaattcaatcttttcctttttcctcctccttgcttcctatgccaccctgcaactttt

SEQ ID NO: 158 - DNA, 976 bp, Heterodera glycines
aagcaagaccgaaaacagaaattatgcataaagcatgcataaatttatcggaatgggcaaataaatggcagatcagaatctcaattaaaaaaacttttgtacttcatttggggaataaaaaccccaaagaaatatataaaattggtggaaatataataaatgtcgtggatacaattagggattcgggcataaatattgataataaattgcaattttccaatcatgtcacacaaataataaagaatgcatatttacgtatgcgctctttatttcgggttattaaatcaaaatcttctaggatttggattagtcggcacgaaatgaccaattagtggccaaagcggaactgttggccagaatacgaaggtgcatagtgttttttttgtccaataaaaattttaaaaaatggaattttatatttcttttaagatttacagcgcggacgaaggcacaaaatcggatggcacgggcagcgggcgtacgacacgctgtgcagcttctacaagttggcggagagcaaaatcaaccaggcctatgttgaggaggtgggtcggccggggaccggattacccaaaagtccagacgccagtccgggcggtgggttgttcaaaaacatattatccccctctccgatttttttaaattaatttttgagcgatttaatttttttttgtaaaaataggttttcctcataaaatttacaaaaaaaaaaaaatagcaatactatttttaagaacttcttatataaacaaaagattttgataaatttctacgtttgaaattgtttaaaaaaattttagttgggtgagagacacaattttttaatgaaaaatccttttttttgtgttctttaattatagaataatccccaaattttaatcaatttgcttatattatatcaatcattttgttggcacagtcactgatgtgttgatgcacatgatcatcctgctcaatgacaaaaacgactggcgag

SEQ ID NO: 159 - DNA, 2150 bp, Heterodera glycines
ctggttcattgcgcaaaaattgagccaaatttgttctcccctttgttccggtcatcattcccaaaataaatgcccaaaatggagagatttttgggggaattcgggtgatcaacgttgccgatcaccagtcccaactttgtcgttgccgccactccatcgccccctttgtcacccgtcagcaccaacacaatttgagagacaaattgctggtggagtttcagtcggccttcatttaacattttaaaattcgattatttttctctctctcaccactgttcaccaaatcctgaagacggccctcgatcattgcacgaacgtcgacggaaacgagcgcacgcgtctcaccattgcccgtccaatggaaattgaccgcctcgcacagttccgccttcagacgcttcactgctctcgtcggtgcccaaacatcatgtccttggccggcgaaagaccgcttcaacgcttcacgggccttgaacgagatgcctgcgtccaatgtgatgagcagatcattcgccgcgctcagcctgttgtcctcgtgttggttattcgtcacgtcagaaagggctttgcgctgacgacatgacgaagccgaacgctcgaggcttgtcgaccggtcgcgctgggccttgagctgtttccgtagaaaggcattcgaccggcgctgtcgctgcagttcctcctcggtccaaacgtggcgccgtcgcagctcgtcaaacatgtggacttaaaaataataaaaatgaaatgaattaaaaaaactaaaattttgtttgaatttctctcaccatcatcgagaccaaaggcaccggcgcactttgaagtcgatggtgtcgccatgtggtcacagcgtgccgtggatgttgacggcattggttgaatttgttggtcttcatcggcaggcgttgaagggatttgcacatcggtgtccaccatctccacagacggcacgtccatttccagcggtgccatcggtgttggagttgatggtggtcgtccgtcgttgtcccgcgccggtgcctctgatgtcgacggctcttcttcggatggttgtggtgtttctgcatcggtgttcggctggggagcggctaaaaattggaaaatttgggaatttatgaaaaataaatggaaaaactcacttctcttggccaaataggcttgtctcgccttggccgtctgcgcttttctctcctctcgcctttttctcagttgttcagcacctcttttgccttgaagcttaagcaatgatttttttttagccataaatctttaaaaaattaagaattttcataaaaactgacaattaaaaattttctgggccgaaatttttactcaaaacactgaaagtttgttcataatttttttctctatcgatatgcaaaatttggtgtggatttaacaagtaggaaaaaagttaaacaggatgaagtgaatgttgatttttacataattaaaatgaagagatagtacgccaaagtgagagaaattacaaagaaaaagagaaacgacgagatagtactaggcttttctctgcacagtggggcgtacccatagtgccatagtggggaggtagggcataacgccaatacatttattcaaagcattagtcagtgcctttttgtgagttctccttttttatgttggcaattggtatacttttgtaagatcacttctagagattggaaatttcaaacctatcggtcccgctgcgtgattggaactcgttattttttttcgggacggcgacccgcgggattaatcccacaaatccctcattttccaaaaaatgttggattgcggactgggatcccgcgcggaatcacgtcccgcaccggtctctagtcgattccatggttacaataattcgcgtatccttaattaaggggtggtggcgtttaacccccgccgggagcatgacaggcacttttctcgcctgagaccagccagttaatttcaacaaatatgatacgaattgttttgtccttgctagagatcggaattttgaaagtactgggaccgggaccaggcggcccggttaaaagcccgggcccatgggcctctccggtctctagtccttacaatttttcgtcacgatatgcccgcattgatcaaaatcacgggtcattcttaagttgtgcatccgaagttcgcct

SEQ ID NO: 160 - DNA, 2457 bp, Heterodera glycines
  unsure (1)..(2457): unsure at all n locations
ttaattaccagtttgtattgttnntacgaagttcggtgcacnattcaatcagcacacanccattgtccctcttgctgctgctgttgttctgatgagtcatttgtcggccctcccgcattatttcttcgtgccaccgacgcaaaagtgagtgttttaatgactcattcattcattcagtcatcgttttcaaaccagcgacatttttggtcaaaatatatttttggatttttgccaaacgccgggggaaattccctcaaaatgaaagataaacattgatgaagaacacataattaagctgtttcaaaaaggttatttagaaggaaatttaattaataagaaaatgaaaacgaaaaataatttggccattttttaatttcattttataaattcaattttcaattttaaaatatgttctacatattattattatcgtcttatgctgattaccattcccccattcactaaattccttttatgggttggctttttctaaatttttttgtgctttttcgagactctcgactttttatttttatcccatttctcaccttttaatgaccttcatcttcttcaccgtttcacacattctctgctcaaattttaggcgtccttcccccccccctttttttcccctattcaaattctcccactttttcaccacttttttgtccaccacactgagagaataaatttatgcggggctataaaaacattttttactatcaaaaattatttttgtcagaaaaaagcgaaaaagaatccattcggatcaattgaaataatacgaaatgaaatgctggtcagagtcagctaaaatcatatccatccacccgttttagagatattatttttaaaatacccattttttcttaacttaattctaatgtttggggtgtttttttaattttgcattatttttggccatttttattttacaaattgccattattttccatttgctgacaaattattgccagatgtaccccttttttccgtttttgtcccccccccccccccaggggaggggaacaaaacaaacaaaagatgtgccgattctgtcacccgcaaatttcatccccgtttttgcatataaaacaacacaattaattcccatttgtgccagtcgagactctcggcattgaatgcatcgtccgatttgtcgggcgtcgtgaaaaaacgaaaatttccatttctttccgagaatggaattggtggttatgatcgatgcccctttttcacgaggatttatttccccattcttgtagtaaaaccctaaaatttggcattgtaatttcctcgtgactgtgaaattttagtgataaaaatttctcgactctgtgccaagagtctcgagcggaagtgccagcctaattaatccatctcaaattacccctttatcttttattagttattttctctcattttctaccacccaaatcaaatttggagcatctccgcctccatcattcaaccggtgattttctgatttgattggttaatgtgtagggggaaagctttgcggcgggatttgctccgttttatcccccgaagggattccctccccccgtccgatccgccgtttcctttgtccgccctgtcatcgtcgagattcaatctcgagaagaacacatttatttatgtgtgtgctgtgtgctgtgtgcacaacagtagcagcagggagtgctacttacaaatcaatccctcccgcccaattcgaaggtcggtcaccactttgcccagaggctttttgacttcaatcataattatattgtcaattgtttgaaacgcatctgttgcagttggaagaggccgatggaaaatttttcggcttttcgcgaaaaagttttcccagaaaatggcgtgggacaaataaaaattgtacttttattatgagcaatatatatttcctatcaatttcaggtttgctttagacgtttgccaatgaaaaaatggagttttgtgaatgcaaattttaatggattttctttcgacgtgtcataagcgggttgtttcgggacaaatgcaaaccaatttgatgctattcgaatgagctaggcgcgctctaccctttcaaatgtatcaacaaagggtctaccgccactccctggcgagatatggccagtcaaagcagagtgggtctaataaaacaagaatttttaaaattttcggcatttgcccttatttcgagcctgctctacgtgtgcttcttttgccaatatggccctgctatagaaatcttgtaatggttcacgactaagtgatgaaatatttttagcccatttcttttctatccaagcatgcgaattgtttattgcattttatagccttctggaaaaagatagtcagtaaaaataaagcttgttttaggaatatttgagtatatttacaacaacaatttttgggcaatttctaaagaggaaggaaaataatttttttatcaantattttatattaagt

SEQ ID NO: 161 - DNA, 6561 bp, Heterodera glycines
  unsure (1)..(6561): unsure at all n locations
gctgatggagacgccggaggcgacgactacgacgaccaaatggacgacgacatccacnggtggcagcggcagcggaggcgtacagtggcaacggcgcgtgccggcgggcggcgattttgcgcgcgaattgcgtgacgccggtgggacgggggcatcagtttataatagcatgaaattatttaaatcatgagaatgcggagcattctaaaagctaataatgaaaggacaaattaggcctcggataggaatcgaacccacgcctccacccgattcgcgtgggttgctctaccactgagctaccgaggcgtattcgaattttttaaatttaaattttattcgcttaaattgccatttgctttttcattcttttgagatagaaatgtttttaatggagctttaagtcatttatttgaatttggccaattaaagagaggtaatggcacaaaaaaactcgaaaaattggtcagaagggattaaaataaaaatttaaataaaaatttgtttagctctgaccgagcgccaaagggcggccaatttgcagcaaaaatcggcgctaaaacagccctttggctgccaattgcccagctcactgcacaattacgcttatcatcaggtgcagttatggaaattcctaatttaatttttttttcttattttttgctttaatttggccaatttctgtgccaaatttggccccttcgtcctttttttttttgttggccgtcggaaagtcccctcggggaaataagttccttccgccggcatttgccgtccaattaaaaaggcaaaataataaaaccaattaacacagaaacgaagaaaatattccccattttaggacactttaattggcctcattttttaaattttcttggcattttctttgttttggccctattatttatggccgagtaaacttctctttttcttttccatcgaatatttataattaataaatattaaaattgcatttttataacaattttagacggtcacttcatcgtctttgagcagtgcagcaacaaaaaatggcggtggcaccgccaacaaaaacaacggtggccaagcagtggacgaactgatccgggacatggagtttaaaatgcgcagtgccaacgcgtcaaacaaaggtggctcataagtcttttttggcatttgaaatggaatctgtccgagatcgagactctcgagcagtgacaagtgtgtctgaccccaacaatttcgctgccgccccccccccctcccccgtccaattccattgcttctcccgctacttaaaaatttggccccccgcggagtcactcactcaattcacggcatagcgcccgccgggtacaacaacaacaaaaaagaagcagcacaaaggaatttccgccttttccacatgctcttcttggccccttcgtcccctggggcgtttttggcttttccccatgcccccccccgttttttacgctttcaatttcctctcatgggcgccgtgccgtgccaatgcgccgttttaccgccctaaaagggcaaaaaattcttttccttttgtcagtttatgtacttttttcttctctccacaaaagtgtagtgccaatgtttgtgcttaagtgttatgtcgaaatttgctcagtgatctttggtcaacgacaaatttgtatttatttaacgtgcgaaattgctactttaaatgcccataaataaattcaaatttaaattcttaaagtggattaattgttaattgcttctcgtgtggcgaaagaccaaacttttaaatggccaaaaattctttaaaaaatcccataaaatacgttttttgaaacattttcatcacttttttatttgaaaattatggaactataaaaaccataaaatgcacattatttcaaatacctatttctgctttaacccccccccccctcaaattcgcaattcttcccattttttcgcgtccatgtttcatcaaaatctgtgcccgctctgtgcaaatataaaaaaaaccattcattcatttggccattccattcaacacatccacctcccattcattcatttccttactctttcttcttcaccccgtgggttttgaagtgtaaaaagtgtgtcgaattgaatgggccgggcaaaaaaacgggggttggcgatgcttttaagccttttgaacttttggcacattgaattgaatcaaaaattcaacaaattttactttgcccacccccctaatgcttcattttctcccatttaaactttttgtttagttttgccattctttgcctttgttaccccccgtttttgtcctctttccgcccctttttcccccttttttcggcattaattttgcctccccaaatgagggggttttgtcgagactgactttcaatggacaatttgtcttcttgtgtgttttgtgttgttgtcgagagtgaaagggccggacgcaaaagaaagcgccaaaaactttggcgccgctgcccccccccttttggtgtacatttttttcccggcggacggtgaaagccttttcgaaaacattcatccgccatgaattggatgaggaatgcgagtagtgaatgaatatgtgtcttccgtccgtccgtcgtcaattgttcgttcggcttctcgtcgtcgtttgtccatggagcacagctgcccggaggaagcggggaatgaatgcttcacgtccccccggggtggcggggcggggggagggggccggagagcggggaatgggagaggccagctgatgaaccatcgggcggggggagcaagggggagatgaagcatgcgaggaaaagctggggacaggggagcaaaagatgaagcatgggaggggggggggtgagtgagggatgaagcatggaggaggagggagaggccagctgatgaaccagtggggatgaggaggggaagatgaagaattggggggcgggaacggagagcattaccaccatcaccaccgtccgcttctcctcctcctcctttaatcatcatcatttgccggagcccgggctgaatcaagcggcggtgcttggaagagcacaaaacaaactttccctcccgccgcctatccccggagggaatgggcggcgggggggggaacatttgctaatgcacctccatccacagtcgtattcattttgtcactttttctccatccaaatctttttggaaaattttttcctatcccattttttcaacaaattcatcattgaacacaacgccaattcgttgtttttttttcttgacactgtcgcggtcatttgattccctcctctcagcttagcccccggcaaatgattaaaactcgcaaaaaatcaccggaaatcgaccttatgccattgctggacacccccaaaaccaaagcccgccgaagtggcacaatgttgaacagttgccccccccctttggtcggcactttgcttaacccccccccccaattcctcctccggcgcttttcacacggacccaaaaaatcgacgtaaataaaagtacgccccctcctcactttcaacgcttgttttcaccatctatcaatccaatcattaattttctcagctgctaattgcctgatcagtgcttcgcccttatgggcggctgatcaaacattgggacagcgaaaaatatatattaagatagggcaatttataagaccacacattccattagagaataataataataataatttaaaagcttattatctgcagcgaaattaataattagtcattaattaccacccaaataattaattaattgtttgccctctgtccgcccctaaaattgttgaatttgatccggcaaaacgcgtgtgaatggcggaagttggtgcgtattttaatagtcgaaacttgaaatttacagtaacaacttacagtaactaattctcaattttcaactcacattaacattcttggcattatttaatttaattgcaaattaaaatttaaaaaaaaacaaaataaaaaataattaattgaattttgaattcttaaaagcattggaaattaggaattttaattataattgtttaaattaattattaattaaaatttcaatttgctttcagatacgtgcacaaagtgccaccagcaaatcgggggcgaccccccgggggtcaccgcgctcggcaacccctaccacgtcacctgtttctgctgcgatgtgtgccaaaaacagttggccggtagttgaataattggccatgaaaaggcagtggggagagcgtcacattaaaaatattttatttttaatttttgaaaatatttttaaagaaaaaaaacatgacgcgactctattgctgataaaaaataatgaataattgtttgaatttgtggaaaatggcaagaaatagtgaacatttttaaataaacaaaatacaaaaaattttcatttattaaatttttactttttatatttttgccgctctaagcaaacactcgaaaatgaccttagggggtataaaatatttatttaaatattttctgtatgcttcttccgcttaggttgttccttttacgcggtggacgggaagaatttgtgccaagttgactacatgaactcgttggaaaagtgcgacaagtgcaaaatgccgatcactcagtgcgttcaaattggctgaaaattttatgggattcgaaaaagagtgggagagtcgcaatacgagagccaaaaatgccttgaaatctctcgaaatcgaaaaccgagactctcgaaaaaccctcttctacataccgctgaaatggtcatattttagccggcattcaactccctgttatcgttttttgcattttttgagctttgatcccacatgatatccatccatttgattaatctccctaagttggcattatgtattattatattttttatttaattttatgccaaattcccaggaaaattctccgtgccctcagccgcgcctttcaccccgagtgttttgcctgtccgatctgtcaaaaatcgttggacggcattccatttacagtacgtaccttttgttgtctgctggttactgtattattactttttactcaggtggacaaggagaaccaagcctactgtttggaatgctatcacgagtaattaatatcaattaattttatttgtattgggacatatcaatcaattttaaatgggtttgatcattcgctataaaatggtcgatcactctccgcggggttctaaatctcgaggacggtggttgggcattttggacctattaaattataaattaaaaaaaaatttttatggaatcaggcgggaaaataaacgtatatttccttaaaataattcccctccaattctttggcgaacaaaaaacaaaacaaaattggtaaataattcataattcattttttaaatttaatttattaaaccatcgcccaggcgcttctctccccggtgtgccgcctgtctgaaagtgatcgcaccaaatggcaatgagacggaggtggcgcgggtgatcgccatggtcagttagcgtgaaattaaaaaaataaaataaatttcaaaaatgcgcctggggcataaatttttataggacaaaagctaccatttggactgttacaagtgcgaagactgcggtctgaagctgaattccaaaattgagggccaaggtgaagttgcttttttaataggaaattgagttaaaaaaaggccttacaccaagtgatcagatcactactaactttcataatgatcggaattggcaaattgggggtaatttggaaaacaaaatgcccttttatataagaaaagactcggaaaagataaatccgtaagataaacaatattttctttgaattgccatttttataataaaatttcgatgaattgtcaccaataatttataaaacctcaattgatgaatcgaccattttactccttccccctgtccccataaaaaccggacgaagttcaaaattaaggcttatccaccccatttttttgctaattttttaaataaatttcaaatttatttttaaggctgctacccgttggagtcgcatttgttctgcaaaaactgcaatttgaagcgactgaagtccctcaagtgattgatcattcgttcattgactgtctctcccccatttttatttgtttttatcctcacaaggattgattggccagaagattgatttgagttgcatttaaatttaattgcttaattggccaataatcccttttcccgcccctaatttccgtgccctccgccacctcagaatctgtgtatgaaaatgtgaacaaaatgccctcccccctccacaaattcacaaattgtttctgttccttgccgggccaataatataataataatataataataataccctttttagtaatttctccgccaattaaacaaaattttaaaacgcctattttctagtcccaatttgtaattgtcccccataatcattgctgctgctgtctgaaaattatttgataaaataaattaataaagaaataaatttttggaaattaatatatttaggtaataagaatttcgatagcccttcacatgctctattagccttacaaaaagcaaaaaggttttcaagcatgtaaaaaagttac

SEQ ID NO: 162 - DNA, 3471 bp, Heterodera glycines
atcgaaaagcgcactccgtcgatggtcggggtaagaagaggagaacactgttttgtttttggggcatgccttttcagctatgatttttggttgtttttttgtcgaattcgtttggacaaaaaaatgaattttttttaaactattgtaattaaaattttcccacatttttacaaactctttacagtatgccgcaaaaatagaagagaagaacaatttagaatttgttggtgactacaaatagcaagtaaatttttaccatattttcaattgaatctgattttttcttgaaattatttactaaatttcttttataaatttatgacatttaatatttgccaaattatttaagtgatttttaggaagcgccacgtgacgaaaaattgcacttcattgaccaaaccgtgtgccattgcccgcttggcaaatttgaattaaatgtagtttaaataatgtttaataataaaaaatatgtacataatttaaattattttaaaatatttatttcaagctcgtcagtggtcatctaccgcatcgcttgcggcgaaggactttaccaagtaattattgttggagcagctcttttcctcgcccagttagattggaatttaaaaaacgaaatttaatttttcgaaatttttaaaatatttttcccataaccaaaaagaaaagcttttcgaaaagccccaaacaaatggtttattttcagcatcttttggcctacgaagtgccgctggtcaagcatttgttggcgcaccgttggcaaagccaagctgacactgactgtcgtcaacaaattgcggaacatccgatccacaccatccaacatcaatcagctaatgcgataaagccacgggtaatggaaaaattatatggaaatcatggatttaaaattacattcaaatttcaatgaaaaaaaatgttggtccctcagaccgaaatacccgactggcacactcatcgacaagggcgtggtcagccccaaatgttctgagtcctttttggcctcgcagcgtgcgttgcaggtgtcttcctctgttttttgaacttttaaatcaaaatttgaaattgtttttccccagggaactgctcgagtgccacggcacgccattttgatggacgacaacggatatccaacggacaaaacccaacaatcacatccgtatgtccaagcagacgaatataaattgtttaaaaatgtttgactatttcttaaaggccctctgttttgaacaccaaattgtctctccgcccatttcccctccctgcgccggcaggattttcccattatgtttagataattttggataaatttcattcgctttcatatgccatcattttaattcttttttgtgtgtttcatatatttttggctttttaggccaaaaaaggctggaacatcttcaacattgaccagcagtcggctgacaaatgaggcgaaggctgggaaagcttcgacactctgaacgacaatttggattttgagaacaaaagctaattgagcaaatggcgcgtcaatcaatgcctaaggggctcgaattgatttttccaatttaaactgatttcttcgcttttattatgtacaaatataaaatcatcttttttcttaattttttttctgtttctcattttgttagcaaatgttttctcttacgctttatcccttcatatcccattatcattacgtggttgtattatctcattgtcagcgttttctgctaattattattttttggactttattataacatatgatgatgctgttttccaacctttacggccaagtttaatgtacactcatcggtaattgtgtcggtgagcccatttttaaaatctttttcgcttttttaagttaaatcagaaaagggttcatcggcattttgattaattacataatcaatttaagactgataaacaaataaaaaatgaaatgatttactttccaataattagttggatttaatgagattgttttaaaaagcattttcagtgccgtttagtccattggcactttttagtctctgtctatgtgggttagtgcttttcactgacggaagcacggaaatgtgaattggtaaaatcaatgctttgttcgcaccgtccaataacaggaaattcgcccccgcgggcgatggatgccaccgattgtctgtccccggctaaaattccccccccacaaaaatagtccaattttaaaagtctcgtgaaatttttgtgaatttaacttctcgagatggagcaattagcgattcttttcgacgaaatttccccaccccctaaaaaattagaatctaattatattttgaggccttcgaaacttgtgctcattttcaatttacccaaagttgtggcattttttctcgcgtaccatgtgatgtgtagaaatgatcgtcattgttatttttcattttgaagcataaattcttctcgcgcacccccgaaaatccgtccaaatctttcgcgacgcattcgtcccaaaaaataaaacaaaataaatcgtccttataatttaatccgactgatcagtgcgcgttttccgctgtttgcctcaaatccgccgacaaattttgtggcgatggccaaaaaaatttgggtggaataaatgtacgaatgtttcacacgttgtataattaaaataatgtgtgtgaataatagacaatttattctctaatttgtgtgccttttctctcccctttttccatcgtttaaaatttatttccgctttcattggtcaacaaaaagagaatgtttaccgttatccataagctcaatttaagcatttttggagataaatggactattttgaacaattttgatttatttcatccagtttctagaatatatttttgcatatttcggtttttagcacatataataaatatttcggaattttagcacatatatattccatacttgctcataatttatataagattattgacgtgaaaattaggggagggggggggggggtgatgcattttgaaaattttgtgagaattattaacattttttgttccgaaatttcagtgaatgttcaaacgccgtgggatttctcattcaccaaaatttattttttaaaaagtaattaaatattttttaatgttattgccgagcatgaataataattaatgatttttgaccgtaaattttagctttttttgttcgaatttgggtctggggtcctgaatggctggatttttagacacttattcgtgatcactgatcagtgcccttgctaaaaactcggaaaaaattttctataataaacttttttgaaaaaacgagacacaaattatatattaattatcaacgtaatatccggtcgcataagcgagtcacattttgccgttcggggaaacaatttctctcggccctttgaagtccaatgattaattgtcattgcctaattagtaccattattatacaatcaaatttctttcagctaataagccatttccgccatttgattggcca

SEQ ID NO: 163 - DNA, 3213 bp, Heterodera glycines
taatgttacagtggaaggaagaaggatcttccataccgtaccagtcaatcaacccgaacgagaattacaaagagaacgtaattacttgaccagagaggtcctgagcgagagacagatagagaagtggagtgggaaagattgagtagagagagtaagcgtgaggcggaaagagtgagggcgagagtgagacgaagaaaggtaacgacctaatcccccagcaaacccgttcccttggattccgatcaattccgacatctaattgtgatttcgtgagtttgtctaaacgcatttcaaaatcaggcacgtgccaaccgctatcctcccccatcacgggtgatactccgttccctcagaccagcaccgtgccgggaagtaatgtgattggcagtggtctaactacggtatcctcgtcaacggtgggcagctgtttgccaatgttggcaccgcttggaggccaactaacgtacagtacggcaccgcaacagcagcagcagagcattttgggcggttccggcacttactcgcaaggcaccgtagtgcagctatattgtacaaacggcggagcagtcagcggaggcgcaagccaagtgagcacagcgggaaagaacttgccaaaaacggaagaaattgaaaagaaatgatggagagagagagagagaatgccaaaaagatgagaaaatgccaaaaataaaaaaggtttacctaaatcctaaaaaaaatcgattaagtgagtgaacacattgtacgaaatttagctaaagctgctaatttggcaattttcctagaattgtgcattttcttcgcccaatttttgcaggccgtctgtcagcttggccaatggcagccgttcagtctcggccaatgtttgggcagccttggactccccggagggataactccgtcgccccagcagcagtcaggcattggcattggcactaccccatttggcaccattccatttggcactacaaccactggcaccaatttgggtaccgctattggttgtttgcccgctgttaccaccgccgcttttggcaccgtacaatactcgcagcagccgctgtcatcgccgcagggctccccgctggtcattggcgcgaccaattacccatccggcactaccgcaacactacaatgccaacaaggtcagttttgcagaatgtatgcagcaaaaaaatttcggtgtcaacgaaaaagagtagggaaggagctggtttttagttctcaatttgagttcgaaagtttttagtcttggttttcgattagactaactgtcttacagttagaactaatttgaaatccatcaaatgccgtaggtgaaaatgattctgatgtaatttgctaagaaaatgacttaattctctgatttttttccattatttaggcctgccctcgggtgctcagtcgtccgtctgctcaaatggcatttggacaccgccgctgggcatgtgcaccggtggcaccacgccatttggaggcatccaattgggcaataccgcgcagcagagcaatgccgtcggcagttgcttttttggcctgatggcacctctgggtaaaaaaaaaagcattgaatgaccgtaaaactttcgatggttttcctttaaggtgcctccatacagtactccagtgggagtacggtaggaccgtttccctcgggaactctcgcgcaagtgatttgccagcaggtgaatgctttccgattccctattaataattttagtggtcaatgcaactcgtacaaaaggcaactcgtatttaacaaaataataaggtgaagcttaagcctaggcttagcctaaagcttaggcctaagcctagcctttaagcaattttcgaattgccttttgtacgagttttcatgacacctcaatagcagccaaattttttaacaaaattgccattttccaaggggtcgccgcaggggcaaagcagttcaatgtgtacgaatggtcaatggcaaccgccacttttgccgggctgttcggcacagagtgggggactctccaacggcataaacagcggcattggcgcaataaattccggggtattaggccaaatttgtaaaatggcaaaagaaatttatttgatctctgttagacgaacacagtgagtggcggtttgaacctgctcggcattggcacgcaatgtctgcttggaatggcacccgttttggggggtaattttttaaattgcaatttttcacttgaaaattccccaaggcagggagtttgtgattttaaatttattgtataccaacatggacttttgtagtcgtatttttgtaataatttaaatttgattttgaatcctttacaacaatgatgtcatggcaattcgtacaaaggcttagactaagcctaactttcggcttaatttaaatttaaattttatagccgtgaaaaatttcatttggtccattaatcactgcttttcctcgcccaaaattaaatttttggaagctcctcaggcagtctttggggttatcttttaaacttttttttgatatccctcgcttaggcaacattgtctattcgtccgttgggccgccctatccccagggcaccaccgccaatttgcaatgtgccaacggccaattgccgaccacaacaacacagagtagtggtctcacgacaagtacaatcggtggcatcggcagcagcatcggcagtccgtcatcgaccacggcgacatgcatcggaggacagtggcaaccggcacaattcggcgggggcgtcggacaatgcaccgggggagggacaatggcaacgagaacagccggaggtgggaaaacaattaccaaccaattatatatttatttatttatttatagtaattactaattagagtgagagatattttcggaaattgaaatataggcaaggcacaattttttggcgccgccaactttaacgtgttataactacttttttcttatgtgtccaaataaaatactcttgaaccaataaattaatcctcattagctttaaaagggacaataaaatgttatagcgtttggcgccaaaatggctggcgccgaagtgggcggtccccccaataggtcgaccaaaatgatttgattctgtgctcattcgtacggctcccagttgggcggtttaccaaaagaacgccattttaagaaaagcctcaaaataattttggaaatttatagaaagttttaatcggttgcaaattgaacaaaaaaaatttgaaaaa

SEQ ID NO: 164 - DNA, 1756 bp, Heterodera glycines
  unsure (1)..(1756): unsure at all n locations
gaaaagcctcaaaataatttntggaaatttatagaatcttctaatgcggttgcaaattgaacaaaaaaaattttgaaaacagtctcgtgtttttgggattttcagtctcggtctcgaggtcatctcttgaagtctcgagaaattttcggtctcgaacagcactacttcgttcgaacgattggccaagccaactttctccgtgattgtgccaccgaaccttttacagccccctcccccttctcgcgggcacattaattgaaaaagctccatctttcaaatttatgatttagtagtcataaatttagaccccatcgccccaaacattgtagcacttggccaaacaacgtttccatcctccactccgggttttggcaccacaccgctcgtcccatcgcagcagcaacagcagcagtgtgtgctcggcatcggcgggttggcattcaacggacgaatacagtactccaacggggcactgttcggaccgtacccgccgggcacaaccgccacattgacatgcaacagcgggtaaaaggccgggctaacaacaggcaatagacagatggttgcccagatttatgggtgcaccacaaaaacttgttgagaaacaaatgaaaatttttctagccatttttcgattttcaaattttttacaaaaaatcgctagaaaggtttttcaaattcttttttatattttcttataaaatattttaaaatttttttcgtaaaaattttctgtttgtaaattttttttttaatttccggcggcgagattttgccaccatcccagattttattaccaacaatttgagctttttttagcgccaatgccaaaaattatgctaatttaaagaatgtttcgttagattttttccgaaatttttgaaaataattggcaaatttaaatgtaataattttctaattcttgaattagtccgttgttttgtttcactttttaaattcatttttatcgtgcttttccagctttgtgcccagcggccaaacggtggccagctgccagaatggccaattcctgccagccgtgcttggccaatgtgtgcagtcgagtgccgacgcgacaccgtacaccatgccaagcgcaaccacgacgacgacgaggaggagcagcaacagcagcactactgtagcctcgtcaacgacaacaagcagtaacagcaacaatggcatgggcacaacagcaaatgctacagcagcaacatttgccatcaacggaacaggaggtgatagtggcacaacacaaatagagcaagggaagagatagaagacgggagagacgggagagagaaatggaagagagagaaagataggagagaaatgaggtgaaaagagagaaggataagagagaatggaagaaaataaagataagagagaaagagagaaagggaagagagagaaaaggagagaaagagataatggaagagagagagaaagaaaggagagaatggaacagaggaagagagagagagtagagagactaaagttggggccattggcgggtttgagtacaaagttggatcacatggccattttgaacaaatactattgggggtttgtgtgtgtgttggcaggaaatggcacgaaaattccgatttccgaanattttggggtctcggaatgccattccctggtattctggttatggcaatgatgactcacaaatcaggatttttcttatccgacgggtcatttccggcattttgtttattccgaaacaatcaaattttcgctcacagtcgac

SEQ ID NO: 165 - DNA, 3505 bp, Heterodera glycines
  unsure (1)..(3505): unsure at all n locations
tttttgatgnaatagttatcaaattttatttttttatccgcagtattttgtcaatacttatacatattatatatattgtgaatatttatccttttgtatatatttaatgttttaatccattaaattgatatttttgagtgattaaatttatttatttttttctttctttgtttattttgataaaaaaatgagctatgtataaaaccgttcacccatacaaaaaaaagtccggccgaaactaaaaaaaagtcaaatggaattccgatacttagccaattatggccaaaggtgaatgtttggcattggcattgtaaaatttaaatgttcatttagacacccaacaaagcgttttttctaaaaaaaaaacaaaacaaaaaatacatacaataaattagacacaatatttacacacagttttgagcattcgattgatcaatcgattgaatggctgatcgatcacccaccaaatccgatcacaattcgtccctctcctgccaatgcttatcttttcctctttgtcggagcatttcgcgcacttcttcagccattcgttgcgcgtcatttccatgccgtacaaaaatgccattggcattctgtcggtcgccgatccgatcaacgccttaataaaacataaaaaataaatgaaaaaagcaattaactatgttttaccagggtagagcatcaccgatgggaatgcctgaatgccggccatttggcaaatgtggccgaaccggtcacagtccactttgccaagacgtactttgccttcgagaagctgaagaacggggagcatttcaagtgctaatgatgggtacaatcgcttattttatgggcccaatgtgaatcttagtttgttgggagcccaattaatccaaaaaactatgataggaccattaacggagagctttgattgctaatgatcggccagcggacagacactaaacgatgtttgagaaagttgacttaccttcgccagtttgtcaaaagttggcgcaaattgcacacaatggccacaccatggagctgaaacttatcaaaaatgacactgtggtatactgtaggggatttgaaaatgccagggatttaccgtagaaatcaacgagaaacggctgatcagagccgagaacggtggaatggaaatcacccgccaaccgctggaccaacgtcggcatcatttcggaaagccaatgggccatggattgggcatttcgccaccaatttggcggataatcacttcaaaattgattttaacattggcgcaaaattgtcgagaatttcggaaagatgccaatgactcattccattttcggcccccacacactcactacggttgcaagtcgtgccggtgccggtagagacgaatggtcgggtaactgtgcacgtattccccgtcgcaaatgtccgggaacgcttcgcagtcgacggagccaaaagacacccaaaaaacaaaaacaaatgaaaaagttcccccaaaacaatgggaggtagttcctttctagagagcccttttctaattagaagtcgggagtggattccatccccgggacctccctctcatggacagcaaaaattgctaataagataaattcaaaaataggaaaatccgaacccaaaatccttcaattgccctttgaaaaaaaagaaattgcaaatgaggatcaatggcaacacgtacaaaaaacaactcatataataaaaattttacaaaataaagcctaagcttaagcctaggcccaagcaagtcgaagcctaggcctatcctaaagcataggcctatgcctaaggcattaaacgagttgccttttgtacgggttgtcatgacaccgcaaacagaagaattaaggtgaattgaaacaatttgataatttaattagaaaaattgaacagtcaaatgccaaaatggtcaaggtcaacggtcgcttacaatgtccgcctgtggtgcgaccactgaaaattgccgagccaatcgccgaaattcgggtgccaactttaaaatgaggaaatcttcgtaattttcgacaaagaaaacgggtttttcaaacctgttgacaaggaccgcaccacggggctaaaaatgggaaattagttaaattacagggcactaaaaactcgagacgaaatcgaattgggggacaaaaaaaagaggaatattcgactctgagccgagactctcgaaatggcatagcaagaaagattgatcagccagttaaaaaatgatttatcgagaatttaaaaaaaaaatgagaattacggcattggatggtttcgattgctccaaaaaccgcattattaaaaatatcgtaataatatttatttggaccgaaaaagtcgacgaagaacaaatggccttttggcctgtgcaccaccctttccatgaacaaagtgctgttcagcgccagcaccgacgggttcaatgcttcggcaacaaattcgagcagttggtccgctgaatgggagccgacgatgggatgccgagcaccgtccggcgtgaacagcacggagtggggataactgaacgaggggcggagggataatcaaaaaaattgccatgatcaagaaagatatggagattttcgagttggttgaggtaagtctttgacttggagcagctcgtttccccccccccccgcccgccttccctgtcggttccccgtgaaaattaaaaaaaaaaaatcaaactttaaaaattttaaaaaaattctagaaaattttttataagaaaagaatttgaaaaaattttcttcagacttaaaaacgccagagaaatttttgaaaaacttttttcttgaaattttatttgcctttaaacaattttctaaatgaaatattttgtttgaaaattaaaaaaaattaatttttcggaggaggggaacgtagtgcaccttttgacttagtctctagcctcgaggggtcgagtctgaattgactagtccactggaattgggagtaacttagggttcgagcctgatccgggattcgggaatggaacaaactgtcgggatttgaaatgatggcaattctgcaaaaatcctctgcccacatttaaatgaaaccagggtcgagaatcgggattaggcattaattagcccgacctttccttaattttataatgactcattttttgtgtttcttctgccgcttcttccctcaccttctgatgcccgcgcttcggcaaatggtcgcttccgcttcacaattcacagtgcccagccgaagcgggcgcccgtcaatttcggccggcaatttgcgcagttcggccaacaggcggagacatggcgggcaccaggggacgaagtggtcgaccagccacagagtgccggcggtgccgtcggcagctgccacttcgtcatggatttgctgcaaaagtttttgggatggaaggaaattgcgcctttaatctggcacaagaatacattgtatttgtcggcattcagcacgatcagctgcgacttggcggacctagtgatgaacttggcaattgccgagtgtcattttagcattgcct

SEQ ID NO: 166 - DNA, 5775 bp, Heterodera glycines
  unsure (1)..(5775): unsure at all n locations
attcaataaaattttttgaaattttaagccaataatccttcatgtcggntatcttttcatatcaagtgcggtgtgactttattgatgttggaacaagtagtattattttaataaataaaatttatatcttatgggagttaaatgatcaaaaaactgtttgggtgttatacattttaacattaattttattttaactagtaactttaatgaaaataataatcaggcgatgcggataaacaccaaaataattgtttatatatttagaaaaaggtttatattattaagtgtttctttatttttctttaaaaaataattaataaaagcattccaacaagtatttgcagttattttatggtcttggtataattctaaaattagttaaaaaaagttttggggttctgttggatgtgttgatatttaatattattaagtttcgacacgaatacttttattgattagttatttgttgatggtcctctcccatcgactcattctttgcatttgtgttattttacatttcggtgtttattttcggactctctaatttgactccgtcgttattttattattattttgtgattctaattttattgtttattcatttaataaatttatcttgtttgtgtgttagcaaaacacaacaactggcgacgcccgtgcatttttgcgcttaaccgtgaattcaccaaaaaaagcgactctgacggccccctcacataacccataacaaacaagttattccccatctgtcgtagcccgaagagtttctcagtattttgactgagcaaagctaagtgtggattcggtttttgccaaattttgctagtggcaagcttttaaactttatctttgtctcatctatcattcatcttctgtctgatctggtaaaatgacgacaaaggaggagctaaaagctattttggacgcacaacaaaaacaattcaccgatttgttatcaacgatattgtctaaaaatgtgccatccaacaattctgacctgttttctaaaataaacggtcaaattcccgatttcgaatatgaccccgaagccgattcgacgtttgccttgtggtacgaacgcttcggtcccttcattgagaaggacggtcaagtgctggacgacgacatgaaagtgcggttggtcttgggaaagttgtcgcccccggattacattcgttttgaacaacaaattcttccaggaaaagcgtctgatctgactttccaggaatgcatcggcaaactgaaaactctgttttcagacacaaaatcaatttttgtgcgccgttttgagtgttttcagctggcatgtgcgccgactcaaaacgtgctggactttggcgcgattgtcaacgcccgttgcgagcgagccgaaatgacgctgtcgaaagaggaagtcaagtgcatgatcttcatttcaggtttgacagacgcacataaggacttgcggcaggagtgcctccggcagttggaaaaggcaagagccgcaacgccgcctcaggacattaagctggaaaagcttctcgaggagtgccgcgccatcctgtcgctcaaaaactcgtccgctgcgctcgcaaatccaggccaagtccatgcaatttcaacccgaccacaaaaacttggggatgggtcttcaaaaaagcattccaaacccaacaattttcgtcctagccaacaaaattcgggaaattcaaatgttaccaaaacatttacaggcaaatatcaacattctcaggcaccagttagtcaaaagtgtaagcggtgtggtcaagcacacgcggtgcgagactgtttatttcctgtggacgtcaaatgtttttgatgtcgaaagcaagggcacacgagaaatatttgccccaattcagctcatccacgtgttcaatcacacgttgtggtttcgactttcagtgtgaatggtgcgaccaaagaatggatatggattccattacaagtcaatggccaccagatcaaacttgcagccgattcgtgttcacatttgtcgatcatacagcttccggtttggcaaagtttgggcgaaccgaggttggaaaaagttggtaaattagtgggttccttttcgggccacaaattgaagttgttgggaagtttcaagtgtgacgttctgttcagaggagtcacaatgcggcttgaactttcagtggcagacaccgaagcgccgagcattatgggattggattggatcatccctttcgagcgtgccacccaacagccaattgccacgactttggagcagcagtcgctcattgtcaacagtgtgcaaccaacaaatgatccggtcaaattggaagggcaaatcaaggcttccttcccgaaggtgtttcaacctggcctcggacattgtgtgaagacgaaggccacgctgcatttgaagcaaaatgtgaagccagtgttctgccgtgcgcgacctgtgccgcatggagtccaagcagcagtcgacgaagaattggaccgacttttggactcgttagtgctgaagcccattgatttttcgcgctgggcagctcccgttttggcagttcgtaagaaaagtggtaatgtgcggatttgcattgacttttatacgggactaaacgatgcgctggagttgaacaggcatccccttccgcggaccgaagacatttttcatgctctgcgtggagccaaagtgttttcgcagcttgatttgcgtgatgcttatctgcaggtcgaactggacgaaagttcaaagcagttagtcggcatcaacacgcaccgcggactttttcaatatcagcgtcttccttttggcataaaatcggccccgtctatttttcagaaagcgatggaccaattgacgtccggtattccaggcgtgtttgcctatttggacgacatcatcattgcttcggccgatcactcgcagcatgttgctgctctcattgaactcttttcccgaattcaggactatggatttcgagttcaattggacaagtgccactttttgaaggctgaattgaagtttctcggacacgttgtctcgtccgatggtctgaagcccgatcccgctcgatccgatgccatccgtaatatgccgtcaccgcatgacattggcactttgcgctccttcctgggtgcgctcaactattacggtcggtttgtcaaggaaatgcgcgatttgcgtgcacctttggatctgcttttgaagaaggacactccttggttttggggtcctgatcagcagaaggcttttgatcaggccaaacaggttcttcaatcggatttgttgctgacgcagtatgatccgagtttgccgatcattgtcgctgcggatgccagccaatgtggaatcgtagctacaatcagccatgtttttccaaacggagtggagcgcgtcatcgagcacgccagtcgaacgctcactcccgctgaacgaaattacgcccaaattgaacgagaagcgttgtctttgatcttcgctgtgcaaaaatttcacaggatgatttacggtcgtaattttactctgttaacggatcataagcccctcttggctatattcggtaataaaaatgggatcccgatctacacggcttcccgattgcagcgttgggccctaattttgtccaattatgattttacaataaaatatgttaaatctgcaaattttggacaggccgacgttttgtctcgactgatttctgagcaccggacagacgaagaagtcattgtcgcccacacatcggacaacgacgtggacagcactgaagaagtcgaatatgctcttcttgtcaacttggagcagctgccagtcgatgcaaaagaagtgagcgaactgacgacttcggacgatttgttgcagcaagtggcacaattcgtacgttccgggtggccaaacaaatgcccagctaatgaattaatgcctttctattcgagacgtgatacgctcaccctcgtgggcggttcaattttgacaggaaaccgagtcattgttcctgcgccgcttcgtcaacgtgtactcaagacgttgcactttgctcatcctggcattgtgcgaatgaaggcgctggctcgcaaccatgtcttttggcccggtcttgacagtgacattgaggcaatggtaaagcattgtgcggaatgtcaattcgccgccaaaatgccgccgaaagcgccacttcgaccatggccaattcctggtgaagtttttggacgtgtccatattgattttgcaggcccatgtgccgatggaaacatttatctcatcctcgtggatgcactttccaaatggcctgaagtgatgcatatgcgcacgacaacagccaagggcacaatcgaagctttaaatttggtatttcaccggtatggtgctccaaaagaaatagtgtctgacaacggaccaccatttacttcccatgaatttaaggacttttgcaggcttaaaggcattaagcacaagttctccccgccgtatcagccgcactgtaatggtcaagccgagcggatggtggacacattcaaacggcaggcaaagaaaaacgcaaaatccaaaaatcaacaatggatttcggaatttttgtttgcgtaccggtcctcgccgagtccaattttgaatggtttttcccccgcagaattatttttgggaagaacactccgcacgcccttgtcaatgcttgaaccgagacagcacacgccgaacgagaacaacaaccaacgtggacagtaccaatcgaggatgtcacagcagtacaaccaacatcatggcacaaaaagccgttcattcaattcaggagactcagtcttagtcttgaattatggtaggagtggtaagccatcatggttggaaggtaaaattgtgagtggtagtggtttgatttggaaaatcgaaattccaatccttggaattaccgtaacgcgtcacgtcaatcaaatgcgttcattttccccttacatttcaagtaagattgtgtccgatcagattcaagccgctccgcaacaaccaattcctccaatggcgccaattcaaattgatcagacacctgtccgtgatcaaactcctgtccgtgaccgcacacccgaaccagtcaaatctcctcgtccgcagcgacagcgcaagaagccaatttgctattcgcccggctaattgccacggacggtctttccaaaagagggagatgttggatgtgttgatatttaatattattaagtttgacacgaatacttttattgattagttatttgttgatgggtcctctcccatcgactcattctttgcatttgtgttattttacatttcggtgtttattttcggactctctaatttgactccgtcgttattttattattattttgtgattctaattttattgtttattcatttaataaatttatcttgtttgtgtgttagcaaaacacaacaagtccaaagttgcgcaacgagaaacgcccccctgaaattaattcgattattgacatttcataagaaaaacccgcataaattattcagacacagctttgcaatcgaccgctttcctttgttgacaaccatttttgatgggtcgatgcttattccaaactgctcatagcattcccggccgaattgcgcttcttggtcggcgttgcctttgattttggagtcaaatcctgatgcttggatcttctgcgccatgaactcagcaatgtatggtctgaacagctggtcgtcactctgctcgtactccagcacgcggaacactttggtgacccgatacccctcctcgagcgctgcgttgagttcaattgaagtgctggtgttgacccaccgcgttg

SEQ ID NO: 167 - DNA, 6235 bp, Heterodera glycines
taaaaaaaaaaggttattcagacctttaatttgatcaaccatcgtacatagtccttgaatattccatcactcctaaatttcaaaaatattaagatttcttaacaaactcataccattcatcgtagtgccaagctctccagaatctgtccactcggtagccagtttccaaggctcttgccagctcaatatgtgtgaagtttcctgtaaaagcccgctgctcatccgtgtgtgggcacttgtgcactcgtcgtgtgtttaacttccgaaatttggcagcacaacgatggcagcagcagaacagtaggcgttcgtcgatttttagtggaagaaccggaattcggagcccttttggaggaataacccgcacacgataaattccttggtattgtaaatgctcaggtcgagtccagtcgacgatcatctcctcaacggtggggtggatgacagcgggtattccgatcgggtagtcggtggcatagttgacccacgggtagaggctgacgatatcgaagacagaaatcttctcatcctcctttggctctgcaatcagctgaagcggcccagttctgcctccgtagaatgtttgacgtgggtcgatgggcccccggtcggtccccaagtcgtcgaaaaaagctcgcatttcatcatctcttttgagctgttctcggatctgacactcccaaatctcttccacgtcaaggccttgttcatcttctccaccgtaagcatcctcagccggaacaggctcctgcagttttagcaaacgcagtttggtagcatcgttgagttctcggcatgtttttccgtcaaccagttcgtcgtcaggtttgaagcaactctcacatccgtgccagtagcagccgagaacttctatgcacttgttctgctccgcaatccacccatcaagtttgaactgccgccatctcttttcgagaccatttccagcgtgctgtatgcgaacaccgtctcgcttggagcgccagtccaaatatttgatggcgaagacgctagccctgtcgttccgctcgtaaccgccttcaggcacgatggcaagctctttttcgttaaggaatttccctttaaagatggtcatgcaaacgctgaatagaaattaaattagaagaccgattggtataacgacctggcaatagtagcactcagcggaagcacatcaaagccttcagtgatatcacgcatcagaatttggcgaaattggacaacagcagcgagaagaatctccgtatcgttccgacaatacgtctttagctcgtccggtaaataaaacggtgtgtttttgttcacgtcatacctaaaaaacataacattaaaaataccaaatcgtatgaataccattttatgaatttctcatatttgtcctgcttcattgatccagggcagtaatcctccttgtccggcaaatgttgaagatgcacgttgtaattttctcttagaaatataatcatttaaattaccctcatttggacatactaaccttcggttgaaagcgtagggaaagaatggtttatcggcacagttgagattgaatgttttcggcatttcttccagacgaattggcatcagtaggcacgagtctcgccatgtgagttttgagtggcgccgagaatgttgaagacgaaactcaaaaattttgagcccattcatgatgacctcaggtcgtcgctttgtctggccgaggtattttagcacaaaatggccatcaaacctcgaggcattgtgtgcctaaaattgtttttgcataacaatgatgttaaaaaagatcacaaactcacccaaataaatgtttgatatttgttgtcccaagccttcaaaatccactcgacaaatgccgaaattggctcatgtccttccgattcgctccaatccttcgttcgttccatcgctccgtatgttgtcaaacaaattttacaattgagtcgcaggccattttcagaatcacagcactccgtacaggtaattcgtgctgacaggtagttgaccttgtgtcgctgttgtcccgcctgttgcagctgttccaatcgagtctctgtgtcccagcataccattcggtatttgggtttctcgtcaggcaccacaatgggtttgatgaagcacgcgccttccttctcatggtatacctgtgttttttggaggagttattaataaataaatagagaaaaaataccttacatcgcgcacaatagttgctgtaacatttgtggggattttttctatccacttgaaaagttctgttacattcatcgcaacgtttaatcaagttgcacatctgcggacgatgaccatcaaagcagctttgagagaagaaaaatcgtttgcattgttgacagtgtagacagacaccttgcactcttatgcaaggatattgcggtccaactgtaggaaatatcaaattaattgttggattaaattagtaaccttttccacattggtgacaacggctcttacaggacatcgtatgtttagcgtctctaccatagaaacactcgcaatcaacgcaatattttatcccaagtttgaagaagcagtgaatttttttgatgccgtgatagtgcccatccgacagaaacagcgacacacagaagcggcgtcccatcggacccttccaaattggtcttggaagctcctcaggctggtccgtgaagagtacaatgcggtacattccagtatagatgcggtcctttttgtgaatttacattaaaaaatttcttgttttttttaaattatttgtacccatagttgttgaattagaataagatgttccattccataagcatcttgatccggtgcaatctctgctgcacgcatcagctcttggaccgcaattctcagccggtcccgattggacacaaaacggttcagtgccttgtggtcggagcaaaaatcagctcgtctcttcacacgttgtataacttcagaagacacgtgattgctgtttgaactttgtcctccctctgctgtttgcagatggacggtagacttcaaaaactcagcgtcagtgtaggcacgtgtggcaatcaatgcgtagaataagcagaaattgttgcccgtattaaaaatacggatcatatgccgctcatcatagccccagtgttggtatgggtggaagcgtggcgctgctccaacaggaggcgcaatgcaagtcacgataatttcgatcggctcactgagcaacagcgagcgtttgctgatcccgccaccatgcacatcctcatcgccgtccgattgacccaatttgtcgagctcggccatcagaacttcagcggtgttttgctcaggtggacgaaccggcaagacgattgggtcggtcagtcctgcgtagggaggtgcccaattaattaaaattcccttgttaggtaccttttccattgagcaaaacacctagtttaaggacgcgtcgccgatggccagctgttccacctccatcctgatctgtgttctcctctgcgttccgtatcgcttgtccgatgatgtgctcaaatgcgttaagaagtgcctcttccggctcatcatgttgtccattgagcacaaattctgtcacgtgtcgatgtagtgcaaaacgctccaccctgtgcacgtagtactgcagttgctcaaacaaaggtttctccgtctgctcattgtggtcttcggcattgtctgctgctgctacaacagtttgcgctccatcaatccccctttgatgaaggcggccttctccatccatcggaattgcgtgggactcttgcttctgctgctgttgccgtagatgatgctcctcaaaatgggccatggttttaaaatcccaactttggcggcgttgtcgtttcgcaactccatcagaattggagattgtaggcgagaaagaggccgccgccaccgccgccgccgccgccgctgccgccgctgtggtgtagtcctcaagggtagctgatgatgaggttgatggttcgtctcccgttcgtttcattgttgaggctgttggggtgttctttttcaaggaaaagagtgattaaatgcaaaaataattgtttggcgaaacagtttgatcaaatttaaaaaatttttcttcaaattttattcctatgcaacagttaatcaacattggcttcagcccaataacggccgaaatcagttctttttggcacgcttcttcccaatgtcaagttcgatgatttctccatcttcgttgtccgcttcattctttttgtccacaagtatcgccgcagcaatccaatccattgtggtgaactcgccgccgccctttgccttgaattaatgattttaactggctcagagtcaacaaaaaaaaaaaaaaaaaaaaaaatttcctaaccttcagattgagtttgaaggtcaaagtctgtcccaactttgactgaagcaaagcttccaatttttcggagcacttttcgaccatgtcggcaaactgattgaccctcatggccaggtagtcctctgcaacgttggagaagacggtcactttttggctgatttcaaggtcttcgcagtcttgaaggtcgagtctcaagaagagacattggagtgggctgttggcacgatggtcacatccgcggcagaacatctcatcgtcgagctttttcttacatggcacactgccggaggatttaagcggacaggcctgcaaataaagaaaattattaaaaattttcaaaattaataaccttatacaacgaaaactgcaggtctgccacctttgcacgtacaaaaaatattcccggcgcattgaacttcgccacttcgctcagctgttttggatgggatggaaattcgtctgcgggtcgtttgttggatgaagatgtgagttggaagcgtttcagtccgctcatgcttttaaatttgatgcaaaagaaatgtctaaaatatggattaaaaataaaaagacaatcaggctttagggggttcaaaagaacaaatattaacaaaaagttcaaatgatgacgaatattggcataatttcaacgtttagggcgtgttaaaagacatatagaaaaaaaaattttttcgtaatggtacgaatattggtataatttcaaccttttggggtttaaaatgacaaaaataatgtcaaatattggcataatttcagccttaggtagtgtaaaataaaaaatgaagcaaaaaaaaaatcgttggtcaggcgctcagatggtctgcacccttgcaataggtttaaaatattgacgaatattggcataatttcagccttttgggtgtcaaagtgacaaatattagaaaaaatttcgaaattatggggaaatattggcataatttcagccttttggggatgtaaaacgacaaaatattgacgaatattggcataatttcagccttttgggggaattaaaaatgaccaaaagtgaaaaaaaatccgaaaaagaacttaaattaatttaaaaattcaaatatttaaatgaaattttaaagaaattttaaaaattaaaaaacattttagatgtagggtttttatgtatagtaaaatttgtttaaaaatttaaaattttcccttattctttctacctcaccgctgtctgttgtgtggttggcgtttatatggcacgcttgtccacagcagatgaacgatttgtatttagtagtcaatgttgtactgaccaaagtcttggagctaataaagtcaaaatatatttaaatttgtccaagaaataaatgtttaaaattaaataatttttcttttctcactgatttttgtgccccaaggttgtcgtttgtttgctgacgatctgctgttgatgttgtcaatgtgttggagtgttttgtcagttgttgatgttgggcaattggccggcagagtcgttgtcagatgtgattttttggcgttcaaatcgcgcattaaataccccgcattttccgcctccgggcatattgtctagacatatcctagtagcctgttgtagaatgtttgcccatattatgcgataatttgatggctcattaatcaaaaacccctccctctctcagcttttcctactgaacgccaaccgtcctttgtcaggtgtcacttggacccgactgcttgttctctcgctcttcacttaaccctaatctccgattacaatctccaaaatttgcgcgagagactgccccgtcatccaggccgtcacggattacccgttgtttccttccaccccttccaagcatttatttattaaccggtcatactccatggctttgataaacgtcccccctttctccccccccc

SEQ ID NO: 168 - DNA, 7155 bp, Heterodera glycines
  unsure (1)..(7155): unsure at all n locations
ttgatcaaatttaaaaaatttttctttcaattttatttcctatgcacagttnaatcaccattggcttcagcccaatacgngcgaaaatcagttctttttggcacgcttcttcccaatgtcaagttcgatgatttctccatcttcgttgtccgcttcattctttttgtccacaagtatcgccgcagcaatccaatccattgtggtgaactcgccgccgccctttgccttgaattaatgattttaactggctcagagtcaacaaaaaaaaaaaaaaaaattttctaaccttcagattgagtttgaaggtcaaagtctgtcccaactttgactgaagcaaagcttccaatttttcggagcacttttcgaccatgtcggcaaactgattgaccctcatggccaggtagtcctctgcaacgttggagaagacggtcactttttggctgatttcaaggtcttcgcagtcttgaaggtcgagtctcaagaagagacattggagtgggctgttggcacgatggtcacatccgcggcagaacatctcatcgtcgagctttttcttacatggcacactgccggaggatttaagcggacaggcctgcaaataaagaaaattattaaaaatttaattttaaaaaaaccttgtacaatgagaactgcagatctgccacttttgcacgcacaaaaaaggttccagatgagttgaacttaacaacttcactcaacttttttggatgggccggaaattcttcggcgggtcgtttgttagacgttgatgagagttggaagcgcttcagtccgctcattcttttagattttgtgcaaaaataaacgtctaaaatttggattagaaaaaagacaatcagctttagaaggtttaaaataacaaattgttcgaaatggtgacgaatattggcataatttcagcctttagggggcgctcagatggcctgcacccttgcaataggtttaggatcaaaccaccaatagtatcaaatattggcataatttcaaccttttgggcgtgtaaaataaaaaaaacggcaaacattggcaaaattttagcctttaagaggggtggcaataaaaatattgaaaaaaaaagttcgaaatggtgacgaattttggcataatttgaacctttaggggtttgtaaaaggacaaatagtgaaaaaaaaagtagaaaatgctgtgaatattggcataatttcaaccaatggtgacgaatatcggcataatttcagcctttagggggtgtaaaatgaaattgcgaaaaaaaaaagtcgaaatggtggcgaagattggcataattcagcctttaggggatgtaaaagtacaaataatgaaaaaaaagaacgaaatgctgacgaatattggcataatttcagcctttaggtgtgtaaaagaacaaataatgaaaaaaagtacgaaatgctgacgaatattggcataatttcagccttttggggtgtaaaaggacaaatttaaaagtaaaaaaagcaaaatgttaaaaagaaaacatttgaaaaaataaaataaaaatttaaaaaacattttagactcagcgattttatgtacgccaaaaaaattgttaaaattctccttattttttctatctcaccgttgtccgccggggattgtcgtttgttttttggcacggctgtccacgcagatgtatgagttgtactttgtagtcaatgttgtgctaaccggagtcttggagctaaaaattccaaatatttttaaatttgtataatatctaaatgtatttaaaattaaataatttttctttttcactgttttttgcccgccaagggttgtcgtttgttgtcctggcctattgattgttgtcaatgtgtgggagtgctttgtcagttgttgatgttgggcaattgaccggtggagtcgttgtcagatgtgatttttggcgttcaaatcacgcattaaataccctgcattttgcgcctccgggcatattgtctagacggagcctaggatcccgttgtacaatgtttgcccatattatgcgataatttgatggttcatcaatcaaaaccccctccccctctcagcttttcctaccaaacgccgaccgtcctttgtctggtgtcacttggacccgactgcttgttccctcgctctttcacttaatcctaatctccgatttaaatctccaaattttcgcgagctactgccccctcatccaggccgtcacggactacccgttgtttcctttcaccccctccccagcagttaattcaattaaccggtcatacttcatagctttgataagcgtccctttctccccccccccccccccagcgagagcttagtccctttatccacccttccccatgcaattcccttcagttcatgtcaattcccctccctcctttctccgcacaattctaatctccgatttcaatctccaatttttgcgcgagcaattgccctcaggcatttcgcggatttccctcactgcttctcgcctgccttcccctcctcctcttatctccgaaatcaatctccgagtgttgagcgaacgaacacttgcgattttgtccgctaatcctttgcttctcctcgcttcacttctcccaccactatctttaattcaatagccaatcacccctttattttgtattttactttatgctcttgactcaaaaaaaaaaatatttcatctctttttggcgacaacttggcgcgcttcatgaggtaaaatcatgggtcgggaatgcaaacatttgggacatcttttttctccccctccatccatatttttttttccttttctctcctttttacctatttttctacacttttcccttttctctaccttttcccctcgtcttttttctctcttttcctctatttcttttttccctattttccatttttccctcttttctctccttttttctcctttttctctcactttttcctcttttcctttttttctcgctttttcctcccttttcccctttttctcgccctatttcctcttttccatttttattttttcctctcttttccctatttttttcctcccttttctcgtttctttccctcccccgtgagtgcgtttcctccccctctttctatccctgtgggtgcatccccttttttcctttctaacccccgtgagtgcattccctcacccctttctctccctgtgggtgcattcctttttttcttttctcccccatccatcgcgagtgcaattctccccccccatgtgagtgcattttacacatctttcttcccccacccccacccccgccccttcaccgaatttcaattgattaattacatctttggatggaccaatcaaaatcctattaaaacaattatcctttttttggatacgtatatccttggccaatggtagtgttttggaattggggtatcccatgttagctggagattaatttaaattaaaagaattggtttttggtgaattaattaaatgaatcctctcgtgggtttagaccccggtctctgggacaaaaaccctggggttcggttgtttgtggtgaattattttaatttaatcatacatagctgacattttcctttttcggataactgtaccgctgcccgagtggtagtgttttggattcgactctctggttcgggcccttttgtttgtggtcgaattaatccaattaaattgtctcatgggttatggaccccggcaccagggattgggtgattttaaatcacacatataagacatttatcctttttctgccaacactatccttggcctgttggttgtgctctggatttggctcttgggttcgggtccccttatatgttgccgaattaattgaattaaatcctctcatgggtttggaccccggcccctgggactgagtgattttaaatcacacatatatgacatttatcctttttctgtcaacactatccttggcctattggttgtgctctggatttggctcttgggttcgggccctctgacttgtgggtgaattagttgaattaaatcctctcatgggtttggacccctgcccctgggatcactctgggtggtctcgacattcaaaaacattggtaaaaaaaagggtgattttttgggtggagggagggttttggacgcccgtaaacgtgtccttatactactgttaatttctcaaaaaagtctcattttttatcaatttcgctagcttaatgtaatgctttttggcgtaaattttttttcgctctcaaagatttactcatttttcggaatttcttcgctaaaaatcaaattttgccttaaaagtgaaaaagtcatgaaaagggtcaaaaaaatacaaaaaaaaaagaaaattttgaaaaattattgggcatttatttgaccacgaatttgagtgccaaaaaagacatttttgtaaaaaaaaactaatttttccaaaaaatcgccaaaatatgtgacaaaaactgccgaaaccccaaaatatgtttttattcccaaaaagcccaaaataaatatgtgctaaagactcgctctgattgaaaggaaaacaggtaaaaatgctatttttgagattttcatgcgatagatgcgcaaaaaaatatataaaaacatataaatccgttccctgataatatccgtcaagaaataggaaaaccctaaaaatccaagctttacccaactcaattaattcttctgctatttgtgtgacatcattcggagctcggccaaattgtgctaattgcctcaaaaatgaaccgacggtaaaagaattttaatagtcacacaaattcgtcatttatttagctaaactgttttccataatttcagttggatttccgaccgtccgttgcccagcaaaattcgctttgattccattcagattaggtaagtaaaatcagagatttatagcaataaaagcattcattccctttttgcagttacatcgaggccaaattcaacaacttcggctggccaagcgttgtccaaatggttgcactctccgagaaaagatggccaacccaagcgattgcgttgtttccaatggaacactgattggatcaacaatttcaaggaggtgtggccataatctcgacaagtcactgatttttgttttccaaattgtttagcaatttctccgtgccaatgccatttcttccgtcagttaccaaattcttttttctgttcgtgtgcaaatggggcaaaggtatattttactggtcccgtttttttttaatttgaaaagcctggaaaaatttttctagggctattttatggtgctgagcacgaatccggcattatttttgacaaattctaaacccctaacccaaattcgaacatattttcaaaaaaaaatttttgtttttattgtgcatacaggcagggatttccgggatcactgatcactagggcttccaattatatggaaatccatatttttttcctggacacgcaagaaaaacatgtttttagcttggtttgaagcttctaggatggatttcttctatatccatatttcgcgattatgtccatattttgttagccattttagatgtattttaattgaatttaatgaatttgaagaatatttttgaaaatttacccctcaattcggaaaatttatgtccatatttttgctattttatgtccatattttgcgatttttcctaggttttattgccatattccgagattttatatccatatttttggaagccctactaatcactagggctgggacaaatattttgataaaaaagccagaaatatttacgaaaaaatatttttctgtaagtttttggcgggccaggacgttttcgcgtggttgcatataaaagagaagtgcaaaagcaactctaacaaagggaggtggccaagtgtccgtgggatttcaaaatgaaacttggttaggtggatagagcaccaatgggttcttaagaaaaatggttttattttctgccaaatgagcacgagtgccgagttatgacgtgccaaagtttttagttttttataattaaagaaaaggaacaactatttcctttcttcaaagaaattgttagtgtataggtaattcgttagtcaaaattttttttgggtcaaaagttcgaatcccctatgtgtaaattcattttgttttgctttttgtgagcaattcaattatcaaattttatttctttatcaaaatatttattttaattttattccattaaaaatcaaaaattgcattaaacataaatgtaatacatattctgtcaaattaaaaaatatttttttggcgaatatttttattgaatattttgcgcattaaaaaatttaaaaaaaattaaaaataaaaattttttcataaaataaatttttataattgacttggcgtaaaagacaaaaataaaaaaactaatttatacataggggatccgaaccctgggctaaaagatgctgactagcgcactaccgctacaccactggacaccgtgctcttgtgcaaataggtatttcttttatttaatcattaaaaactttggccttttttatcttggcacaggggtccatttggcagaaattgaaaacatttttcttaagaacccatgggtgctctatctacccaaaaaatctcattccgaaatcccacggacacttggccacctccctttgtaagcaaaaaacaaatccaaaaataaataattattttttagcattgcaaagaatttattagtttttcaatttttttttatattagaaaaaatttcggtctttttttcaaaaaaaaaagtcttaagttttgaagtttttcttatttcttagggaaaaacatttgtgcttcgcttcggtaaaaagtaataaatgcgaatgcctcaagcgctgtgagatcgtcgaatggcactttgacaaaattcggcacaaatgggccaaagccgccgtaacagtcggggtcagtggatgcagaacaggcagccagagatcggccatggaaattgttttcggcaaaaacaactttggcttcattttttggcaccattttgacactgtggtgacggtgaaatttttaattagtcaactcttcgaatttttaaattgcgctcactcatacgcccaacgacgggccaattttacggccgtgtcacacgcctcgacgcctaaatgattacagaaaactttattttacaataggaataccgtatgag

SEQ ID NO: 169 - DNA, 3603 bp, Heterodera glycines
taatcatttgttgtttgtttactacttaatctatccgttcatctgactgcattgcttgttttcgacaacattgttgatcaaatttcccattattaccccgtgaatgcgtgatcaaatgatcgcttatatgcagcaaaccacatttatttaggcatattatatgcacaataaaaacaaaaatttttttttgaaaatatgttcgaatccgggttaggggttcagaatttgtcaaaaataatgccggattcgtgctcagcaccataaaatagcgctagaaaaatttttccaggcttttcaaataaaaaaaacgggaccagtaaactagtttgccgcaaatggtgccatttgaattggtgaacgaatggacgaaggaaaagctgacattggccaaggcaaacgaaaatgaattggacaattggataatgaaacgatgcaaaattattggggagaaagaggaaaattgggacaacaattgcaacaatgtgttcttttggcttgttggtggcattgattgcattgggtgagcaatttaaaaaaggcatttaattttgtttaaataattcaaattgcgcttaattaaggccattgtctccgccaccggcagaagaaacgggacaaggcatcacaaaagtggcgtcttctgctgacgatgaatgagtgacggacaaaagaacgaaacaatggtgattagtggaagaagaaatgaattatttaagaatggccaaccgatcataattcatcagtgatcaaatgcaatttatgatgaaaacctctcaatttcggtaaataaatcggacatataaaaatggcaaaaaatatatgtacgaaacacaaaaattttgagatttgcacaaaataatcaacaaaaattgacttttcaggcagggatttccgggatcactgatcactagggcttccaattatatggaaatccatatttttttcctggacacgcaagaaaaacatgtttttagcttggtttgaagcttctaggatggatttcttctatatccatatttcgcgattatgtccatattttgttagccattttagatgtattttaattgaatttaatgaatttgaagaatatttttgaaaatttacccctcaattcggaaaatttatgtccatatttttgctattttatgttcatatttcgcgatttttcctaggttttattgccatattccgagattttatatccatatttttggaagtcctactaatcactagggctgggacaaatattttgataaaaaagccagaaatatttacgaaaaaatatttttctgtaagtttttggcgggccaggacgttttcgcgtggttgcatataaaagagaagtgcaaaagcaactctaagcacacttattgatgtcaacagaaattcaactaatataagaaaagaaaatttacaaaagcctaaacttaggcctagtctaacaataagccattgttcgagttgcctgtgtatgagttgtcatgataaccttaggtttaacaacgaaatttatagttaaaaactttattgaatacctaacaaaaaaaagtttttctcttagttattaagacaactataataccatgagaccagggatggcacggaatttcgatttccgaaaatttttggggcctcggaatgccatccctgccatggacacaaaatgtcatgggacgcgtaaaatgtcatgggacgcgtaaagtgttgttgggacgcgtaaaatgtcatgggacgcgtaaaatgtcatgggacgcgtaaaatgttgttgggacgcgtaaaatgtcatgggacgcgtaaaatgttatgggacgcgtaaaatgtcatgggacgcgtaaaatgtcatgggacgcgtaaagtgttgttgggacgcgtaaaatgtcatgggacgcgtaaaatgttatgggacgcgtaaaatgttatggaacgcgtaaaatgtcatcggacgcgtaaaatgttatgggacgcgtaaaatgtcatgggacgcgtaaagtgtcatgggacgcgtaaaatgttatgggacgcgtaaaatgtcatgggacgcgtaaagtgtcatgggacgcgtagtgtcatgggacgcgtaaaaccgactagaaccaattttaattattttttccgtttgacgcacatccgaccaaactgacaaattattgtagaagatactagccgcaagaaataaaaaagttaagaaatttgtccgaattcgggttcgggattcgaaacatggatgttttgcacaaatccgaccaatttcagtcctaaacaggtactcacgcgaaaatggccacgcgaaaacgaccccgaccggtttttggggtctattccttcaaaataaaaacctagaaaataggccctaataactcgaaaagtagcttaacaacagccaaaaaaaatatgtttttcgtgcgtttcaggccatggggagctcaggaaacaaatatgtaaaaacctaaaaacatagccctatttataacacatgaacaaaaagatacaacaaacttcatcaatccctcccttttcatgactataaaaggtaaaagtgaaggatactgacgggatggaaaatgtatataaattatataccaatcgactccgctcggtctctaatgaaagaatccgaaagaattttttggcggtaaccaatcgctgaagagttacagacccgggactgaaatgacaaaatggctttgggactgaaccgtccaaacccttaaacgaatggaattgcgacaaaatgcatataaatcgattccgcacggtctgctaataaagaattcgaaagaatttttggataaaaaagaaattgacaaaagttacgggtccttaaaaatctaaaaaaatgatttattgttaattaaaaaattaatttaggtgagccaaaaaaacgtaaaaggtttttgaacttcgcaaaattaaaatagtcctaaaattttgaatgttatcatgattttccttgaacttataaagattttaatttaaaaaaatggcaattctgaataaaatctgataaaaacttgtgctgctccatttttcctaggccaatgacttcttttaaagattttttttaatagctcacgtttaaaattaactgtagttttaatatttgccaaaaattgcgcaaaattttccaattgttccagcctctattgtcccatgtaaagaaagcacttttaaagtgggatagattttaccctctaatccctaattaacatcatatttttatgtactttcacacgtttgggcgcggccgtttgggcgctggtgtttgggcgcggccgtttgggcgttggcgtttgggcgcggccgtttgggcgccagctcgtttttccacttaagcttttttctttggcatccatttccaacaatcttggtatcattcgaaagctcttaacatgctctattagccttaccaaaagcgaaaggattttcaagccttgaaaaaattttattaagaataaacttcaaaaatttcgtcttttcgaaattttcatgtataacttttttggtaattgtctaatcacgaagcaatagcttagaaaaagcttctaaacacattaagctttcgaatgataccaacaatgttggatttggattaaatagaaaaaa

SEQ ID NO: 170 - DNA, 9155 bp, Heterodera glycines
ttttttattagaacctgaaaacatatttccgggtgttttaagggtcgctgatcacaattatgacatccgtttttaccgaaaacaaaatttaaaattttttaaaaaaagctagaaaatatttttttcgaaatttcaatgtcaaaattgacaaaaatacagttagaaaaatatactaacttacttgaaaatcattcctaagttaaaataggtcaaaaaatctttgaaattctttgattcgacctcggttttaagattttcccttcaaaaaacgagttgaaataataaaaacgagttgaacaataaaaacgagttgggcaaaaaacgagtcgatacaaaaacgagttggccgaaaacgaaatttcttgcattttttataggttttttttgttacttttatgtctctcttgataaattctcatcttggatcttttatttttatccatggacgaatccaatcaaatcgggctggaaatagttaccccactgtgcaagtatgtcaaagattggggggttcaaacataaattttttcagtccctggtagcctgacagtattttaaataattgattgctgtaaagacttttttgatgcgtttgcaacttctccggcgctcgctcgacgagcggccgccccaccatttgccactattttctcgtcgtcgcattgcccctctttttccatttgggtaatgtcgttttgtgttgttgttaatgaaaatgtgacaatcgacgaaagcatccaatcataatctaaaagtcgccctttcattcatttctccattttcgatttcaattctcagaaagggaacgaattccccccattcattcgtcgccataaaatgaggccaacaaccattccaattgatcattgttcgctactccccaccccgccccgcattttcaggaattgatcgaactcaaaaaaaaacatgagtagttagagactgtgatttcaccggattacggtagccccccataggtgtgggaggggtgcatggccaactgagcgccagccatttgagcgccgccaagtgagcgcgggccatttgagcgccagacttttcagtactgaagccaaaacctattgcgcgactttttcttggaaacccaaacctattgcaggggtgcgcgacttttttgactgcgcgactttatgcaaattattttaattaaatttatttaattttaaattattttaaacgtcttaaaggtcaaagacgttgaatttaaattcatttaaaattctccaaaaattccccgcaccaagcggatccgaaccccaggggggcggccagactgacgcactaaccactcggccacattggcaatggataataaacattaatttgctctcataaagggaaaaattgacgtcaccagcggcgggaggggggcgagagcgggcggcgagaagggggagggggtcaaataaacaaatcaattattgaattcacaattttctcttttaaaagcaaaaagaaatgggggaccgtataataaaatataatttagaaattaaaataattaaaaggttaattaattaattattttcctaaaataatttttttattacttctaaaataatataaatatttttcagtgaattaacaaatacatttaagtttaattattgatttgtctgttaattttttatctcctcaaaaataattacagcaccctttcaggtgttgggcgtttgtttatttgaccaataatttttaatttcacatctttacgttgcccctccctcacacctgctcatttgtctggaatttgtcttgcgccaaaccgctgtgccattcatttatgtaatttgacaccagtctgataataatttcgccaaaatttatttattatttgtccatttattacgaattattttgcatctatcactccaaattttgttaaaaaaaaaaaaattttattgtcccaatttttaccattttgtgttttttaaacaaaataaatatttgttcaaatttaaagaattaatttttaaaattttagacacaaaaacaaatcatgagccaaaaccgtgacgaaaactcgcagccacctgtactcgatggaccgtacccgctggcacaagagcgcaatgagtttgtggaagatgaagcaccggtgctgcttgagatgttggatcgtctgtcacaaggagtgggttttgttttgaattatttaaattttttaatttttccattttggcttatgctaattgttgattttgtttagggaatttgccaagccatgggcctgttttcgtttgcacttgccgactgtttggccacatttcatacatttgccatactgttcgactgtgagacacctgtgccatttgacgagcagcacaagcgatacgtgttcgaacacagggacaaaccgcggctaatctacgtttcggaagatggtagcgctatacaggttgacggtgtggtgaagcaaggggaatttgtgatgagcatcgagacgatgtatctcgataagcgaaacggagttgatcacttttgcacattcctgcacacttttggcatttgtttcttgatgtgccattgaatgtgtttatttgtttcctattcagagcagtaaattgtttgcataattctgtttaattattttttgtttacaaccaaaatattgatccgcatttttatgttataattttaattcatttttgaaatttttatttaaatggcaaacgaagacttccgcttgtccgaatgcatccgttttattgagcgaacagcccaagagtatgattgtgttctgccggttccacggcttgggtttgtcacggaaattttcttaataatttttaaaatagctcaaggcgcgatgagcacctggatgcctgtgttctcatggaatcagtgggctcaggccaccgcctctacattttcgaatttgaggactgccttcaggtatttttaaaatatgaggtcaattaattaaataaataaataaaacaaaaccccacaggtgaaaggacacatcgaaaacgaagatgggacaagtacacgcgtgatgattgagcactatgataaatacaatgggttatgtggatttgaatcgtttttggcgtcatgtgtttttaccttttttggattttttgttcccgtttcctatgaagatgatgattgatttaattttaaaataatttttattgtatattgcgtttcacaaattcataaacaaattcatccgaattacttggccttttcaaaaattgcataataaactcaaaatcaaatcctaaggacataaaataaataaaaactaaaacataatgaccacaaacattagagaaaatcgattgaaattttcttcgattaaaataaattttccgaaaattatttgccaaatattttttgatcagatcgtttggcatctcgccataggagtcaaaaaagtaggccacccccggcgaacgtgcccatattgcgcaccaatgggttcccggcattcccgacgggtcctgaagtggcaaaatttattttattgaaaatattttggcactcaccaaattgacaattagactgcagggaaatttcgtgcactttggcaatcggtcggccggaaaagtgccaacaaaatattttctcgtcgcccggttctcaaagagagctctgtcgatgaaccgattgtccattcctgcgacgaatccgcctctccctcaaaaacaggtaaaatcccgcagccgcagtacctgctgcgccaaacaggtagatgaggcagagaaaaaagttgattggcgacttctcgatcacatccggaaaacacagtacaatcccttcgtgtgcagcattggaggagggcatttgaacaaaatcggaggaataattctcaccattcatactgtaaggtcactagtgattgatctgttccggtcaatcagaatgagcccgtcagcctcggcataggctattaaagtgaccccctcgttcggaaccgcttcggtaaaccgaatgttcaccgctgtacagccctccttgatcagctcaaagcccggcgagtcctcctgcgcattggtcatttggaagacatagaggcagtaggcagtcttgaacatgctgtagctgatcccgttgctctcagttgtacaggccatgccaaggtgctcctgggtgtcatggtacgcccttgcgtacctgttgttcttgtagtccaagttgtacggaaactgtgggtatgtcctgccagaggcggtcagttcaatatcccgcacctgaacattttttctgccagaaatacatgtcaaagcggcacttacgttgtggtggttgaagtaaaaggggttcttctgattgtgcccaatgtaattttggttgggcaccagcccaatgatgaccctccgtggcacttcctcggtgaacagattggcagaaaaatcgtatcgtccaccggtaatgaacagcgacttcatcagcgttttccggatgccgtatctggcgggctccaggtccaacttctttgcaatgtcaaggctgagtccgtccatcagatcaaccgtcttcactatcagcctgcagtcgacaatctcaagcgtgtacttgtccctatttgcggcttcctgatgtatcataaaatcgtccgactgcagggcgagctcaatgtcaatctcaacattgctgatcatgtacaagtcctggttgaatatgtcggcgctcagcttgcttatcgcttgaaagcccttgctctcctccaccgcctttttccttcgatcgtttactttggtcgggtcactgtcacggaaatagcctgccacgccaaagtatgaatcctttgccgttacagggtagctgagctcggtgtccaggaacaccttgtagctgtacagctggtttgagtcgtacacctcccgctggttgatgtgcactttcaggttccggatgaacgttgcgccgggcatttggataaggccgaccgctgcgtttgccggcacatcaaccacaaccccatcatctgccacttttttgagcttgaactctgtgcacacaaacaccttgctaaggtctacatagctggtgattgggtggatctgaaccaacggatttgtctgctattgtatgtgaaaaccacctgccttaaaatgaaagggcctagagcttattgggttcagcgtcaggtactccctgtagctggagttggacacagcgcagctcgttgggggtatggtgaagaagtccagccccgcatttgccacctcagcacttgacgcatccacttttttatacaacattttgctaataataaccgagtgagtcaaatcttttcttctttaacagagctttttggggaacagtttgtccaacaacgtctgagggtttcaaaatgatttcagcttttttcccgcctcctcttctcttccttcttccgcgccccttttgtagtgatgaagaggccttgtccagcaattttttcgctccctcttttccttccgacaccagcgcgtctttgatgttgccaccctttgacacctcgttgaggaatcgtgcacccgtctcgaggccctctttgccaatctcggcagcaatgtttgccgcatagggtcgtgccgcagtgaccattggacgaaggtagcgccacaggttgcgcagcacagagccaactcctgctcccttctgtcgggggacacccaagaaataaccgtatccccgctgaaacgttggtgccccctcaaagacgctgatcggtccaccgcctccactttgcggataaattttctcgagccgtaaatttgagccgtcaaaaatcacgcgaaccatctctctcagaacgttaacacctttttaaactgaagagtcaaaacaacttggccaaactcaaatggcacctcccttaaataagtgattagaaataattgccctgctgaagagcctaacctcccggtcagagtgcgaatctcaacgtcaagcacatccacctcccttgctatgattttgtgaaacaacggcgcctggaagtccttctctaccacactacccgactttccctcaacggcaatcacttggagcagattggcaaaggtgttgccgacaatcatgctctcaatgacgccactgttcaggtaaatgcacaggtggctcacaccaccacccaaatcaaccgcatattttgcaagctcttcatttctgatctgctgctcttgttcatagcccaacacgtaggccagttgatcagtcagcgtaatgtgcgaaattttcccgttgaaaactttgagctcaaatctgccaatttgctcggtgaagtaaaagcggaaccctttgaccagctcgatcagctcctccttttcctctcgcgttttcaccgcatagttttcatcgtacacctcttgctcaaacagctcacggaactccccaatattctgttggatgtgcgcggatgggttaaactcgggcgcctcccaggggagctctgagtgccggacacggtacttgtgtacagcattcacaaagtggtaatcatccgtttcgtgcagatagtgtacgtctggggttgggtctttgccgtgcaccagcctcatgtacccgcctcgccacggtctgaactctttgagcagctccaactctttttgctttcttatggcctgttgctgtcgtttaagctcttccaactgcttttcctcctcttgctttttcttggtctcgttttccgctctctccgcttccgcctttgccgctctttcctcttctgcgtttgttaccattgccactctctccgcttccgcctttgccgctctttcctcttctgcctttgttaccattgccactctctccgcttccgcttttgccactctctcttcctctgcctttctttcttttgccactctctcatcctctgcctttctttcctttgctactctctcctcctcagcctttttatccttggtctctttctcgcctttcttttcctttgctattctctgctcttccttcttttcccgtgccagtttttcctcccttgccttcttttcacttgcctctttctcttcctttgccttcttttccttggctgctttctctgcagtcttccttctatcttcttctgtcttacgacgcctctcctcttcttctcgccgtctacgttcattttctcgctgctttctctgctcctcttcccttcgctttctctcttcttgtgcccatttttcatgccgcaacgtttcttgttgagccgctgattgcttggccaaatatgaaagtgggtttaagggcgcttcgcccgtattgtcttcttcctcctcaacaaacgagacgtcaagaatctcgccctcctcctcatcgtcgtcgtcaatgttcccaaaacttgcatgcaccggtgcggacctttttcgtgtcaacagccgttccacttcggcaatcatgccatgatgaatgcccctctcaagctgctgtggcgagagaaaacttccctttggcacacggaaacggtattttcggccgtcgtgcaggtgaacaatcacatattgtcggtctgatgtacccagctttgcccaacttaagccaaaaatcggacccaatagccatgattttcgcccacctgtttgggtaaattatgcctgacagtccaaccatccacccggccccatcaaacaccaacttctttggcaagtgcactttgaatttgtttgttttatttccaacaaagcctggcgtattgctcggcaaaattacaaagaaagagtttgtcatttgatcaacaagtataaattcttcaaaatgagatcgtccttatatcgtggtgtgccatctcggttcactttcccccatctttgatccagcggaaactctttgccatcgtcgtcgtcgtcgtcgttgccggttcatccttctttaggtgcttcatgatcagatcggtgcagtcaaagttcagctttgcacagtcttggcaaaacgattgggtgaactcaaggcgttgctgctcgccattctgattgatgagtttgaatcggctgttcccctgccggaaattgtcatcacgacactctttgcacatgaacgtgaacactccgtacttaagaaattttcctattttttcaaattaaatattagccaaaacctttgggcgggccaatttccaaaatatggtcgggtactcaaacacattggtcggttgttttttgggcgattcatccactaaaatttggctaatttaaagaaatttgcagaaaaagccaaaccttcagcttccatggcttttgcttttttcatagcggaagcaatttcctcatggattttgtccaagcgaggcttgcgtcccctttttgagggccccggttgcaggtcaagcagtgtttgagtgttgttgttgtctccaattgtgatgacgtcatcatcattttgaggggaaaaattttcccgtttcgactcatccatttctttaaatttaaaaaaatctaaaattattataaaaaacccaaaaaatgattacttttgttctcaaacaccaattgatcattgatttttctcggggccattactattaagaaatagtttatgattataattgttaaaagcataaaatgaacctgcgaaaaaaacacgtaattattgattgatagtgagaggggtgttagcgcgcagcgacctccagacgggctgtcccttcttaatcgataggccacgcccatccacaaacacattgacgagagagtagtggttagagaaagatacaaaagggcgccaattcaaacacacagtgaatcccaaagccgatttattgattttttttacagattatggtactccctctgactgctgccctatccaaactgcaaagctgtaaacccgaaaatttagcagaatatttgaacaaccccgaggcagtgaacaaagcgaacgcttacttggccggcaaaaaactcaaaactacctaccagagtcgtgattgcaagactaaagaggtcaagttcgcaccttttcggtgaaagccgctgcggaaacctacgcctttgagggatttcttggcacgtttccaaaaattctgtttcggtctaacacacacatgcgttcagaggttaaagtccaccagtatttctacataaagcaccggatccgcctactgtacccacagctgaagtgcattgttgagtaccacaacaaggggcactgcaaatactatcccttgggtataaaattttgcccgaaaaaaataaaataaa

SEQ ID NO: 171 - DNA, 7122 bp, Heterodera glycines
  unsure (1)..(7122): unsure at all n locations
taatttaaagaaatttgcagaaaaagccaaaccttcagcccccccggcttttgctttcttcattgcggaagcaatttcctcatggattttgtccaagcgaggcttgcgtcccctttttgagggccccggttgcaggtcaagcagtgtttgagtgttgttgttgttgtctccaattgtgatgacgtcatcatcattttgaggggaaaaattttcccgtttcgactcatccatttctttaaatttaaaaaaatttaaaattattataaaaaactcaaaaaatgattacttttgttctcaaacaccaattgatcattgatttttctcggggccattacgattaagaaatagtttataattataattgttaaaagcataaaatgaacctgcgaaaaaaaacacgtaattattattgattgatagtgagaggggtgttagcgcgcagcgacctccagacgggctgtcccttcttaatcgataggccacgcccatccacaaacacatagacgagagagtagtggttagagaaagatacaaaagggcgccaattcaaacacacagtgaatccccaggccgatttattgatttttttttacagattatggtactccctctgactgctgccctatccaaactgctaagctgtaaacccgaaaatttagcagaatatttgaacaaccccgaggcagtgaacaaagcgaacgcttacttggccggcaaaaaactcaaaacaacctaccagggtcgtgattccaagaccaaagaggtcaagttcggcacattttcggtgaaacccgctgcggaaacctacgcctttgagggatttcttggcaagtttccaaaaattcagtttcggtctaacacatatgcgttcagaggttaaagtccaccagtatttctacataaagcaccggatccgcctactgtacccacagctgaagtgcattgttgagtaccacaacaagggccactgcaaatactacccattgggtatacaattttgtccggaaaaaaatcaataatcattttcagagttgttggccgttgaggaaggcggggagagtcaacccgtcgaaagacctgccgctgaaacggactacctggactacttgaactttcgcagtgggtggcaatcaacactctactgatcaatgaagcgtgtgcggcaatcggaaaagttgggcgaattcccggagattgagttcgccgtcaacacaatgggcgtcacggtgtactgcccgcggcacctgcaaacgcctcggtttgtgccatgggaccagcccgggcggtgctcgagctgtagaagcggaactgttgagctggactacatcatccagcccgagggggtgaccatcttttcgaatcggctaaagacagacggcgagaactttgtgccgtttgatgcaattggtaagctgcaggtgtatgtcagagtttgactcttttcttaagtggactttgccgatcgtgcgaaattccgcattagggcccggaacaaggtgttcacgctgccgctgcgacacccggaggtgcacgccgccggcccaagcttggaagacggcgtaaaagaacaaaaggaaatgactcagatgtcataagcacttgtccatttttctttctattgttgatattctgatggactacccaagaataaacgaaagtgaactcgcttttcccatcccttcggggataattgtcagtgggccgtcctcttcgggcaagacccagctggtccttcgtctgttacggcatgccaacttgatgtttgacccgccgcccaaggcaataggtatgtgcaaagggggtttctgtgcagtgggctgttgttatttagtatgggcatacggtgagtactcgacgcagattcccgatctggagcggcagggagttgtcccccacgcaggtgccccgtctgacgagatgctgaaaaagctgccaaagccttgtctgattgtttacgatgacttgatgggtgacattgaggccaagaagttggccgatctgtacaccaaaaagtcccaccataacaatttttccgtgattttcctcacgcaaaacctgttcgataaatcaatgcgggtgccaaggtcgaacgcccagtacatcttcctgatgcgggctcccaacgacatgcttagcattcgtaatttggccagccaaatgttccctcgcgagcagggattcctgatggatgcctaccgacaggcatgtgctctgccgtacggttacctgttggtgactctccacgcgaacagagacaacattatacgcctaaggacaaacattttcccagacgacgaggagagaatcatttttgcccccaaaaatggttaagcgggaacagaagatcggtgagcgagttgtgcacaactacgactatttgaagaagttgggaaagacaacgtcggagaagaagcgccgtcatttgttgaacagtgccggttgtgaggaactgttaacgcttgtcgagatttgtctcaacgttttgaacgggagtttctgtctgagcaggaaacaaaagcagagacttgcgccatttgccaaagacatcagacagttggcacgtgtgcgaagtgagaggggtgcgcgaaaactagtgcagcagtcaggcggatcactttttgcccctttgttggcccccattctgattgaggctgcccgatacctgctttcgcgcagcaataatggccaataaacttattctgctgccgtacgagcactacaaggggctggttgcagcgagggagacaaagaatgacgacgacgacgacattgctgagcggacaaacttgggctttgtcaaacgacaggtgaccgctgcagtacagaagcggaagggaaacgtcagcgaacggaacgcaatgtacaaccagcacctgcgccggtacctgaagatgcgcaaggaacataaggagcggcccgtccgagtacagctcagcaacggcgctcaactgctaaataaaacagtggagacgggtgtgcaggtacggcctggtccggacgaaccgaaggacaagtccgtgatggttaccgacgaagatgaagaggaagagattgaagtgccaaagtttttaaccccaacaagccagacgcagggaagcagccgatcacccaggcccaataagaaagcagcaaaacagcaaaaattgatcgagaagaaggaccacctgttggccatcattatgtctgatccgcagagattcggcgcaactgaccgtgggaaaatcattaacccaaagacgggccgagagttcatcgactcggacctggcctggtcaattgaacgcctggtggaccctcgcccggagaatgccccttcgccaagcggaacaaaagagttgaagaggaaactcgcacagagtccgctcgccagtagcctactcaatcgactgtttgttgggtctgggttcgtcggacaagtcaaacaaagcgggcgttttattccctcaaaatggacgaaaaaataaacaaaatatacaccgacccggccaatccgggcgggtttgcgggcgcgagtgctctgtacgcggcggtgaagaagaagcacccgaagttgaagcgtaccgagtttgaagactttttgcagaggaacaccacttatacgctgttcaagccaaagagagacaagttccgacgcctacgcactgtgcctgcgggtttcatgaccggtaagttgtagtgggcttattgcgcacaattcagggttcagatgttcaggcggacttggcagatttccaggcactttcgcgcaagaacagcggctaccggtacctgctgttggctgtggatgtgttgtcgaggcgaatgtttggctctcccgtaaagagtaagcgcccagtggacatgaaaagggcttttgaagagctatttgagcaaatgccaagggtgaccggacacactgtacaccgatcgagggctggagtttgtggcaaaaccgttgaaggagttttacgcggagaagggcattcaaaagtttgagaccagttcaaagaagaaggccgccgttgcggagcgtgccatacgcaccctaaagactcggctgtacaaatatttttcctccaacaacacatcggtttgggtggatgtgcttccaaagtttttgagtgccatcaacaactcggtgtgccgcgcgaccggacttagacccaacgaaatcagcgacaccaatgcgagggaggtctggaagagggtgtacggcgaagggctcgcacaattggacaagacaccaaaaatcagagcaggggaaacggtcagaattcccgagcctaagcacattttcgagaagggtactgtatttcacacattttttcggtcaatttattttaattttaggttatatacccaattactctgatcacgtttacacagtagacgaggcccgctcaaccaacccccagcactatttgctcaaagactattatggcacaaagttgaagagaaaattttatttaccagaattaacaaaagtacaagttgatgaaaacacaatgtatcggattgaaaagaaatacaaagaacgagtgagagatggaaaaagtgaaatattggtgaaatttattggctttccggaaaatattgngtgacaaatgaaagaataaatgaataaaaatattacaanatgacgaaaaatcatttaaanaaacaattatggcataatgtcggggtcgttcagctcctcttctgtgaacatgttcacattgaggtctgggttgaacagacaggtacaagcgccagggcagttccacttacaccactctttgtcgctgtacccaaagggcaccaccttcaacccgtgatccctgaccacccccttattcacggtcgggttgaactgcttgaccaaggggacggtgaaaatctctcccttcttggtgatccgaaagttcttcgttgggtagttgaagcggacgttgttgtccggctgtcccagcttgttctgcaccatgtccttcatcttctcgaaggtgatgcgctcgcaggcatccgagtcgagcgtgatgccgcgcaccttcagcttgtactcgtcctcccccgttgcgttgttgcgcagccacaatccgtacgccttgggcccagctaaacaaaaaatttccattttttttttttttattttaatgagttttaccacaaatgaattccataatcgtgtggttcgggtgctcatcagcgagttccccgagctgctcaccacccggaagggggtcccccagccgcgtcaggtagtcgtagaagatgctgtcagtgtcctaattataaaaaattatttcctattttcattttatttccagttttaccatgtagagaatgcgggtgtcgtagcgctctacaccaggagcaggtccatacactttttcaacgattccaacaggtggattcgcgcagcagaagtggtccatagggcaatggccacctgagaaaggcaaataaatttcaaaatttaaaattttttcttacgttgctcgtgctgtgttccaccacatgctcatccttggccttgtagcagaccatccaaaacttttccgtcagctgatcgatgctgctgacctcaatcttcgagtcgttgagcagtttggcgattccgcatggcactcgacgatttcggtttttgtgagccgattcctgtacgttttattttttttttcataattttttaaagaaattttaccgaagtgcgaaccggccccacagcgagttcaagcacaacttggacaggtagcggagcccggggttgtgcttgatccggtccgcctccagatggacttgggccttttctttggccttgtcgatgtggtcctgtttccgccgtgccgactcctcatcgctgatgcccgcctccgtacaagacgctggatatccgcttgcttaaatttttgttatgattttttattaatttttttccaaattttcaccctcaaatttcattttgaggaacttcagcagatacgagtggaacagcccattgctccaatcgcacgcgaggcgccagatgtaggcacggtaaacgtgcgtcaccttgtacccagagcggagggcggcctccagctcaatgtgcgtgacagttgtcgaaaatcctatcaagaaaaatatttgcttaattataagtttctaaacccacccctttcagagtcctcaaaatgtttgcagttgtactcggggtcgatcaagccgcgcgggtacatttccgaacacgtccggcagagggggaacagcgtccggttgttgagccgatagggaaggaccgggatgtcgtagtggcagtggcgtggcggcacggcgtagcacttgatgatcccctcgaggcggatgccgtcgtcgccaacaatgtccgctggactcctccattccacgtccttgtcaaactgcaccacagtcgggtggccaaccgggtaattggtgtacatattccttaaaaagccaaaatttttcaattattaattttttccggcatttcttaccgcgaaggataaagactgttaaagtccttcactttgattgtgcggcttttccagtcgcccgtctctgggttgatcactgaagcgcccaagtattcgggcccagttcgacctgtgccggaaaattagttaaaaattaaatggaaaaggtaccgccaaagaaggcatcgtggaagtcaattggtccagaatccggacaattgtcgaaatacgccttcatggctgggttgtcctccagcattgcgttcaggtggcactcccaaatcacttccacttcgaattcccgcgcaatgtcacgagtccgttttgcatcgcgggcccttagagctccggcagtttctcctccgcccacaattgccgcatcgtcggggaagcagctcgggcatccatgccaatagcatcttttcaatgggaaaattggcacatttttggaattttttccttacccgttgacctcaatggccaaatttttgtcctcatctggacgctccatcatcccatccaagctgtagttgccgaacttgaactcccctccagggctttcgacatggcgcagcacccgaccattctcccgcaattcttcttcggcacgccactgagagtcgacaaatgtaaaattaaataatttggatacaccttcaaatatttccgagcgatggagctttgcttgcct

SEQ ID NO: 172 - DNA, 1243 bp, Heterodera glycines
cgtcaggagtcgcgagcgcctacatgggagcctcgcccgcgtacgagccaccagcggttgtttaagggggacacgggagcaaaagcatcactaatcttttgtttttgcagcaggagaagtccccggatcagagcgcctacatgtgagaagatgcaacaacgaccggcggatggatggacgaaacctgaagagcgagcgacctgtcagaagatgcaaagataaagaagatgtctcataatcgtgatctgtatttattgatgtattgtacatttgtatgcatatatcatttgctgtgtattatcactttatttccatctgtgttccgaaataaattgaattgatggtcattaagcgtgtgtcaatttattaactgaaatttggtcctctccctccctccctccctctctctgtttgacgtagacatttggatggcataacgttttttggcgtttaaacattcgtcccctattagcgggtcatcacagaaaccgttggacatacggtacttatcctttttgtcatccccctgaattgttttaccttgttccccccattttcgaaaaaaatgaaaattttaaaaagtcgttaaacccagggctcggatcgacaatttttcaaaaacagaacagatttatttttaaaattattcgatcaataatgtattatttttttcgcctccgattgtcgaatttaacgatttttggggaggaaataagcaaatcgtaaatttcagtgcattcgggatcaaacaataagatttttaacaattttttgcgggtgcagtttttccataaaacttctggtgaacgggcgaggggagggggtccggcggaaaactgatttgttaacagaccaaaaaaggccaatttttccaataaaaggcaagcaatgactttttcaaaggaaagatttgattgtccggcttgttatttgtgattttttgaacgagttctgtccttatttgtgaatttcgtcatttttgtaccagtgttacctatctcaggaattgaaacagaaggaagggcacactctgaatttcagtttatctccaaatttgggcggctaacattcgaattccaaacgaaatgtgtgactggtagacttataggaaggaccacttttgtctaaaactcattttgacctgaatttacaaggagtgagcagaccgagttctacgcgagctaagcctccgaccaaacagacgccaaattttaccaccccgccccccttcctacaaaagcat

SEQ ID NO: 173 - DNA, 2635 bp, Heterodera glycines
ccctccatacacaaccatttcaatgaagcacaggagagcatttattaagcacaacaacaatacaattacatagtacaattaaatatacattcatttgaaatgatgatcacagaaatttacatacagatacaacaatttacatgatgggggacaaaatgacaattttgggacggtgggatgggatcctatcatgtccatgttgaggtgacgaagcatccttccatcagacgttgtacttgatcggcaaggccttgcggcgcaccttccggtctccctggaaccactcgagcttgaacgcggcggctgggtccggcgcgttggtccactgcacggtcacgcggtcgttcttggtgtcctcgctgccggggtcgaaggcgtcgcaggagacggccacgttgacggactcctttgggccgagcactccggtcggcgggttcacattgatgcgcttcggtttggtagtcttgaaggcgtagccgatgcgcttcgtcccagggttgatcacctgaaaaaggggggggggaggttattccgcataccacggcaccacgcccaaagcccaaacgcacccgcatgtggcaggtgaccttgtggtcgaaaggtgcgttgaagacgaccttctgcgtgggcattgttgcgacgtcctctggtggaagttgcgccattgctgttgttgtcgctgttgtcgggctggctttgtgggtgcttgatgtgtgatcgttgagagcgttgcttgaagtgttgctgctgctgagtgaggagaatgtgcaaaatccacctccttatatacaaaattcgggtgcaaaaattcatgcagcaaaaaaagtgtataaaaggcgacggttttcttcacttttcaccagtgccagccagccttcaactcaacgcaacatcaacaccagtgcgcgccaagctcgtctacacatttcgtcgcgacaactcatcacttcatcatgagcgacatgagcgcctacatgggatccggccccgccgagcctgcaccgtcgtccggcgccgcggaagcctctccatcgtcaggagtcgcgagcgcctacatgggatccggccccgccgagcctgcaccgtcgtccggcgccgcggaagcctctccatcgtcaggagtcgcgagcgcctacatgggagcctcgcccgcgtacgagccaccagcggttggtttaagggggacacgggagcaaaagcatcactaatcttttgtttttgcagcaggagaagtccccggatcagagcgcctacatgtgagaagatgcaacaacgaccggcggatggatggacgaaacctgaagagcgagcgacctgtcagaagatgcaaagctaaagaagatgtcccataatcgtgatctgtatttattgatgtattgtacatttgtatgcatatatcatttgctgtgtattatcactttatttccatctgtgttccgaaataaattgaattgatggtcattaagcgtgtgtcaatttattaactgaaatttggtcctctccctccctccctctctctgtttgacgtagacatttggatggcataaagttttttggcgtttaaacattcgtcccctattagcgggtcatcacagaaaccgttggacatacggtacttatcctttttgtcatccccctgaattgttttaccttgttccccccattttcgaaaaaaatgaaaattttaaaaagtcgttaaacccagggctcggatcgacaatttttcaaaatcagaacagattttgttttgcgaaactgcctccaaattagttatttttaaaattattcgatcaataatgtattatttttttcgcctccgattgtcgaatttaacgatttttggggaggaaataagcaaatcgtaaatttcagtgcatcgggatcaaacaataagatttttaacaattttttgcgggtgcagtttttccataaaacttctggtgaacgggcgaggggagggggtccggcggaaaactgatttgttaacagaccaaaaaaggccaatttttccaataaaaggcaagcaatgactttttcaaaggaaagatttgattgtccggcttgttatttgtgattttttgaacgagttctgtccttatttgtgaatttcgtcatttttgtaccagtgttacctatctcaggaattgaaacagaaggaagggcacactctgaatttcagtttatctccaaatttgggcggctaacattcgaattccaaacgaaatgtgtgactggtagacttataggaaggaccacttttgtctaaaactcattttgacctgaatttacaaggagtgagcagaccgagttctacgcgagctaaccctccgaccaaacagacgccaaattttaccaccccgccccccttcctacaaaagcatttgaattgaagcacatatgagcatttattaagcacaacaacaatacaattacataggcaacaattaaatatacattcatttgaagtgatgatcacagaaatttacatacagatacaacaatttacatgatgggggacaaaatgacaattttgggacggtgggtgggtgggatcctatcatgtccatgttgaggtgacgaagcatccttccatcagacgttgtactcgatcggcaagttcttgcggcgcaccatc

SEQ ID NO: 174 - DNA, 2695 bp, Heterodera glycines
aaaggcaagcaatgactttttcaaaggaaagatttgattgtccggcttgttatttgtgattttttgaacgagttctgtccttatttgtgaatttcgtcatttttgtaccagtgttacctatctcaggaattgaaacagaaggaagggcacactctgaatttcagtttatctccaaatttgggcggctaacattcgaattccaaacgaaatgtgtgactggtagacttataggaaggaccacttttgtctaaaactcattttgacctgaatttacaaggagtgagcagaccgagttctacgcgagctaagcctccgaccaaacagacgccaaattttaccaccccgccccccttcctacaaaagcattgaattgaagcacatatgagcatttattaagcacaacaacaatacaattacataggcaacaattaaatatacattcatttgaagtgatgatcacagaaatttacatacagatacaacaatttacatgatgggggacaaaatgacaattttgggacggtgggatgggtgggatcctatcatgtccatgttgaggtgacgaagcatccttccatcagacgttgtactcgatcggcaagttcttgcggcgcaccatcccgtctccctggaaccactcgagcttgaacgcggtggcggctgggtccggcgtgttggtccactccacggtcacacggtcgcccttggtgtcctcgctgccggggtcgaaggcgtcgcaggagacggccacgttgacggactcctttgggccgagcactccgttcggcgggttcatgttgatgcgcttcggtttggtggtcttgaaggcgtagccgatgcgcttcgtcccagggttgatcacctgaaaaagggggaggggttattccgcatgccacgtgcaccacgccaaacgcacccgcatgtagtaggtggccttgttgtcgaacggggcgttgaagacgaccttctgcgtgggcattgttgcgacgtcctctggtggaagttgcgccattgctgttgttgtcgctgttgtcgggctggctttgtgggtgcttgatgtgtgatcgttgagagcgttgcttgaagtgttgctgctgctgagtgaggagaatgtgcaaaatccacctccttatatacaaaattcgggtgcaaaaattcatgcagcaaaaaaaagtgtataaaaggcgacggttttcttcacttttcaccagtgccagccagccttcaactcaacgcaacatcaacaccagtgcgcgccaagctcgtctacacatttcgtcgcgacaactcatcacttcatcatgagcgacatgagcgcctacatgggatccggccccgccgagcctgcaccgtcgtccggcgccgcggaagcctctccatcgtcaggagtcgcgagcgcctacatgggatccggccccgccgagcctgcaccgtcgtccggcgccgcggaagcctctccatcgtcaggagtcgcgagcgcctacatgggagcctcgcccgcgtacgagccaccagcggttggtttaagggggacacgggagcaaaagcatcactaatcttttgtttttgcagcaggagaagtccccggatcagagcgcctacatgtgagaagatgcaacaacgaccggcggatggatggacgaaacctgaagagcgagcgacctgtcagaagatgcaaagataaagaagatgtctcataatcgtgatctgtatttattgatgtattgtacatttgtatgcatatatcatttgctgtgtattatcactttatttccatctgtgttccgaaataaattgaattgatggtcattaagcgtgtgtcaatttattaactgaaatttggtcctctccctccctccctccctctctctgtttgacgtagacatttggatggcataacgttttttggcgtttaaacattcgtcccctattagcgggtcatcacagaaaccgttggacatacggtacttatcctttttgtcatccccctgaattgttttaccttgttccccccattttcgaaaaaaatgaaaattttaaaaagtcgttaaacccagggctcggatcgacaatttttcaaaaacagaacagatttatttttaaaattattcgatcaataatgtattatttttttcgcctccgattgtcgaatttaacgatttttggggaggaaataagcaaatcgtaaatttcagtgcattcgggatcaaacaataagatttttaacaattttttgcgggtgcagtttttccataaaacttctggtgaacgggcgaggggagggggtccggcggaaaactgatttgttaacagaccaaaaaaggccaatttttccaataaaaggcaagcaatgactttttcaaaggaaagatttgatttccaaatttgggcggctaacattcgaattccaaacgaaatgtgtgactggtagacttataggaaggaccacttttgtctaaaactcattttgacctgaatttacaaggagtgagcagaccgagttctacgcgagctaagcctccgaccaaacagacgccaaattttaccaccccgccccccttcctacaatagcattgaattgaagcacatatgagcatttattaagcacaacaacaatacaattacataggcaacaaatacatatacattcatttgaagtgatgatcacagaaatttacatacaggtacaacaatt

SEQ ID NO: 175 - DNA, 1330 bp, Heterodera glycines
attatcactttatttccatttgtgttccgaaataaattgaattgatggtcattaagcgtgtgtcaatttattaactgaaatttggtcctctccctccctccctccctctctctgtttgacgtagacatttggatggcataacgttttttggcgtttaaacattcgtcccctattagcgggtcatcacagaaaccgttggacatacggtacttatcctttttgtcatccccctgaattgttttaccttgttccccccattttcgaaaaaaatgaaaattttaaaaagtcgttaagcccagggctcggatcgacaatttttcaaaaacagaacagatttatttttaaaattattcgatcaataatgtattatttttttcgcctccgattgtcgaatttaacgatttttggggaggaaataagcaaatcgtaaatttcagtgcattcgggatcaaacaataagatttttaacaattttttgcgggtgcagtttttccataaaacttctggtgaacgggcgaggggagggggtccggcggaaaactgatttttaacagaccaaaaaaggccaatttttccaataaaaggcaagcaatgactttttcaaaggaaagatttgattgtccggcttgttatttgtgattttttgaacgagttctgtccttatttgtgaatttcgtcatttttgtaccagtgttacctatctcaggaattgaaacagaaggaagggcacactctgaatttcagtttatctccaaatttgggcggctaacattcgaattccaaacgaaatgtgtgactggtagacttataggaaggaccacttttgtctaaaactcattttgacctgaatttacaaggagtgagcagaccgagttctacgcgagctaagcctccgaccaaacagacgccaaattttaccaccccgccccccttcctacaaaagcattgaattgaagcacatatgagcatttattaagcacaacaacaatacaattacataggcaacaattaaatatacattcatttgaagtgatgatcacagaaatttacatacagatacaacaatttacatgatgggggacaaaatgacaattttgggacggtgggatgggtgggatcctatcatgtccatgttgaggtgacgaagcatccttccatcagacgttgtactcgatcggcaagttcttgcggcgcaccatcccgtctccctggaaccactcgagcttgaacgcggtggcggctgggtccgacgtgttggtccactccacggtcacacggtcgcccttggaggagtcgctgccggggtcgaaggcgtcgcaggagacggcca

SEQ ID NO: 176 - DNA, 1287 bp, Heterodera glycines
ctccggcaaacccccattttggtgaataacccgaaccaatttgcgaatttccaagttggttgaataccaatccaaaaaaatgcaaacaatcagcaacagtttggggtaaatggaatgcttccaccaccatttttctggccacaatttccaatgcaaaatttgcaacagccaatacaattttacggcgctcaaaatttggttccacagctaccagctcaaaattttcaaccattttttaacaaccaaatgcctgtaatgtttgcaccaccaaatgtgcagtacccaaacactgcaataaacccagagcgccaaatcgtgaatcagcaaaaataggcagcaacaaatttttccacaacagacaagtctaagtggacttgaatacgcaatgattttggaccggctcccggatattaggggaaatgaaggcggtgattcaatctgcaatttcttcaagaagtactcacagtacacagccgattggtcaaacaaaaaacgaatcgaatcgttagaggcaaaactaagcggtcgtgccgaaagagcttataatgccgctttggccaatgaaccatttgtctatgaaaatgttaagagaaacattttgcaacaattagaggacaatgattgcagagaaatgagcgcatttaatgacttaatgaatggggtcacacgaaagcatggcgaaaacttagacgatttggccgacagaatttcgagcctagtgcgtcgtgcttatccagggctaacaagaaacctggccgatgagtattccataaaacaccttatccgaagtttgaacaatccagatctagcattgaatttggagctccatcgccgtaacggaatgtcttttgatgaattcgttgccttggcttctcgtgcagaagcaacccaaagggctacaaaaaggcaaagtgcggaacaccgaccaaaccaggaacgaaaatatatgcacccaagcgaccgcgaagttgaaacaaatttcaaaaatcagttaagacccaatccagttgtttgttacaattgtaacgaacctggtcatatttcacggaattgaataagacaatttccgcccaaaccgaaatgaatttccatcgtcttttcctcaacggaatcagcagcaaaccccaaatactactgcaactggagcaaaccgagttttcctaaactcgaaaaacggaatgccctcagccggtcgctcgcagaatttttaaagcaaaattacattagaatggaggaagaagtgaaaaccgatgcaactgttgccggtgttaagttggaaagagaagt

SEQ ID NO: 177 - DNA, 2092 bp, Heterodera glycines
  unsure (1)..(2092): unsure at all n locations
gacctggtactgaaaaaaggtacaactgggtacctaagtcccggttttgaccagttttgactgggaccgggaaaagttccgggttttcccgggtttcccagccaaaaagtcccggattttcaacccgaaaagtcccggtcccggtttttctcaaaattctcggtcccgtacaactctagtggcaattgttcgacaccttcggatttttagcttaataaattattatcatttttatttataataaaagaaattcaaacaaactttgatgaaaaaaacaataataaaaataaaccagaagaagaataaaacattgggtcttctttatttaaaaatttaaattatttcatttataggggaataattatatgaaaattataacttcaatcaatttgaatataaatcaatttcttctcattttccaaatttccttttaatgttattccaaaaaaaaacttcgaaaaaaggcatttttttaaaaaaatcaattaaagtgaaagaatttatttcttcagtaaattttgattcattactgacttaactccttctgctgatttgcattcgcatttaaatggaaaattgaaattgataggtcaataatttatgcggtgatttgccttgtcaaatttggtaaacaaactgtttacatattatttgaaaccaaaatcttacacaaattcatttggcttgtttatgcggctcgccgcttcatctgcttgggccagctcggtactcaattcgatttggcggtccgacccgacctgttttgtgagcataagattttgagccaaaccctgtcaggcactttaaggagtaatccgaatattaaaaagccatagactttcataatacaaattgaaaaaacagttcattgtaaataattttcgtaagttattgaatttttgttcctttttgaagatttttgaccgaatatatttaaattttgaataacttttttaatgggtatatttttgaaaaataagaaatttttgttgttttcaggtattttagaggttacaaatattcaaaagttataatattctcgagaaataaaatgtgtaaatcgaaaaattgttaaaataattttgttcacggtgaaatttttgtatgaagaaaatttattaggcactaaactactgttttttgaaaattttctattttcatttataggttcggggggggggggctatatccctctgctcactcgtcgtgtgatgttggaaatatatgtccgcctatttagcttctcgtcgtaccagtgcttttctagcattgaaaaatgtccgaaatttggttctgccgttgtttcaggtggaatgtcccaacgtttgctggacgaaacaggacggccaaacagtctaaaacagctttttttcctaatgataaccaacaatgttggatttggtaggaaagcaaaaaaaactcacgcaataagttcatttcttgtaagaataacttgttctttttttctgagtagcctttttgaacactaaattttttgtaaaaaaccaaaattatggcctagacaattattaaaacttactcgctcaattttatcgtggttttgcttttcatcgaagagtgttagtagttcgcgtttgacgcgatctgacaatttgtgtgccttttgttcgatgtcgtccattaatgttttgttggatttaggcaaaaaatcagaggtgggcatgctcatttcatgcgcaattcttttatctgattctgaaggcattcgggtcttaaaatcgaataatccgcgacatgttcggggggggggggggctatatctctctgctcactcgtcgtgtgatgttggaaatatatgtccgcctatttagcttctcgtcgtaccagtgcttttctagcattgaaaaatgtccgaaatttggttctgccgttgtttcaggtggaatgtcccaacgtttgctggacgaaacaggacggccaaacagtctaaaacagctttttttcctaatgataaccaacaatgttggatttggtcggaaagcaaaaaaaactcacgcaataagttcatttcttgtaagaataacttgttctttttttctgagtagcctttttgaacactnaaattttttgt

SEQ ID NO: 178 - DNA, 2891 bp, Heterodera glycines
  unsure (1)..(2891): unsure at all n locations
ctgagtagcctttttgaacactaaatttttgtaaaaaaccaaaanttatgncctagacaattattaaaacttactcgctcanattttatcgtggttttgcttttcatcgaagagtgttagtagttcgcgtttgacgcgatctgacaatttgtgtgccttttgttcgatgtcgtccattaatgttttgttggatttaggcaaaaaatcagaggtgggctgatttgcgtcatatgcccatttttgcttttttaatacatcgaacacataaatctaaatttaaaatttctaatcattgcattaggtgttgacctttttaccaaaatcatgctcatttcatgcgcaattcttttatctgattctgaaggcattcgggtcttaaaaatcgaataatccgcgacatgttcgggggggggggctatatccctctgctcactcgtcgtgtgatgttggaaatatatgtccgcctatttagcttctcgtcgtaccagtgcttttctagcattgaaaaatgtccgaaatttggttctgccgttgtttcaggtcgaatgttccaacgtttgctggacgaaacaggacggccaaacagtctaaaccagcttttttcctaatgataaccaacaatgttggatttggtaggaaagcaaaaaaactcacgcaataagttcatttcttgtaagaacaacttgttctttttttctgagtagcctttttgaacactaaattttttgtaaaaaaccaaaatgatggcctagacaattattaaaacttactcgctcaattttatcgtggttttgcttttcatcgaagagtgttagtagttcgcgtttgacgcgatctgacaatttgtgtgccttttgttcgatgtcgtccattaatgttttgttggatttaggcaaaaaatcagaggtgggttgatttgcgtcatatgcccatttttgcttttttaatacatcgaacacataaatctaaatttaaaatttctaatcattgcattaggtgttgacctttttaccaaaatcatgctcatttcatgcgcaattcttttatctgattctgaaggcattcgggtcttaaaaatcgaataatccgcgacatgttcggggggggggggctatatccctctgctcactcgtcgtgtgatgttggaaatatatgtccgcctatttagcttctcgtcgtaccagtgcttttctagcattgaaaaatgtccgaaatttggttctgccgttgtttcaggtggaatgtcccaacgtttgctggacgaaacaggacggccaaacagtctaaaacagctttttttcctaatgataaccaacaatgttggatttggtaggaaagcaaaaaaaactcacgcaataagttcatttcttgtaagaacaacttgttctttttttctgagtagcctttttgaacactaaattttttgtaaaaaaccaaaattatggcctagacaattattaaaacttactcgctcaattttatcgtggttttgcttttcatcgaagagtgttagtagttcgcgtttgacgcgatctgacaatttgtgtgccttttgttcgatgtcgtccattaatgttttgttggatttaggcaaaaaatcagaggtgggctgatttgcgtcatatgcccatttttgcttttttaatacatcgaacacataaatctaaatttaaaatttctaatcattgcattaggtgttgacctttttaccaaaatcatgctcatttcatgcgcaattcttttatctgattctgaaggcattcgggtcttaaaaatcgaataatccgcgacatgttcgggggggggggggctatatccctctgctcaatcgtcgtgtgatgttggaaatatatgtccgcctatttagcttctcgtcgtaccagtgcttttctagcattgaaaaatgtccgaaatttggttctgccgttgtttcaggtggaatgtcccaacgtttgctggacgaaacaggacggccaaacagtctaaaacagctttttttcctaatgataaccaacaatgttggatttggtaggaaagcaaaaaaaactcacgcaataagttcatttcttgtaagaacaacttgttctttttttctgagtagcctttttgaacactaaattttttgtaaaaaaccaaaattatggcctagacaattattaaaacttactcgctcaattttatcgtggttttgcttttcatcgaagagtgttagtagttcgcgtttgacgcgatctgacaatttgtgtgccttttgttcgatgtcgtccattaatgttttgttggatttaggcaaaaaatcagaggtgggctgatttgcgtcatatgcccatttttgcttttttaatacatcgaacacataaatctaaatttaaaatttctaatcattgcattaggtgttgacctttttaccaaaatcatgctcatttcatgcgcaattcttttatctgattctgaaggcattcgggtcttaaaaatcgaataatccgcgacatgttcgggggggggggctatatccctctgctcaatcgtcgtgtgatgttggaaatatatgtccgcctatttagcttctcgtcgtaccagtgcttttctagcattgaaaaatgtccgaaatttggttctgccgttgtttcaggtggaatgtcccaacgtttgctggacgaaacaggacggccaaacagtctaaaacagctttttttcctaatgataaccaacaatgttggatttggtaggaaagcaaaaaaaactcacgcaataagttcatttcttgtaagaataacttgttctttttttctgagtagcctttttgaacactaaattttttgtaaaaaaccaaaattatggcctagacaattattaaaacttactcgctcatttttatcgcgggtttgctt

SEQ ID NO: 179 - DNA, 2057 bp, Heterodera glycines
  unsure (1)..(2057): unsure at all n locations
aaaaaaaactcaccgcaataagtcattttctgtaaagacaactttgttctttttttctgagtagcctttttgaccactaaatttttgtaaaaacncanaaattatgcnctagacaattattaaaacttactcgctcaatnttatcgtggttttgcttttcatcgaagagtgttagtagttcgcgtttgacgcgatctgacaatttgtgtgccttttgttcgatgtcgtccattaatgttttgttggatttaggcaaaaaatcagaggtgggctgatttgcgtcatatgcccatttttgcttttttaatacatcgaacacataaatctaaatttaaaatttctaatcattgcattaggtgttgacctttttaccaaaacatgctcatttcatgcgcaattcttttatctgattctgaaggcattcgggtcttaaaaatcgaataatccgcgacatgttcggggggggggggctatatccctctgctcacttggaaatatatgtccgcctatttagcttctcgtcgtaccagtgcttttctagcattgaaaaatgtccgaaatttggttctgccgttgtttcaggtggaatgtcccaacgtttgctggacgaaacaggacggccaaacagtctaaaacagctttttttcctaatgataaccaacaatgttggatttggtaggaaagcaaaaaaaactcacgcaataagttcatttcttgtaagaacaacttgttctttttttctgagtagcctttttgaacactaaattttttgtaaaaacccaaaattatggcctagacaattattaaaacttactcgctcaattttatcgtggttttgcttttcatcgaagagtgttagtagttcgcgtttgacgcgatctgacaatttgtgtgccttttgttcgatgtcgtccattaatgttttgttggatttaggcaaaaaatcagaggtgggctgatttgcgtcatatgcccatttttgcttttttaatacatcgaacacataaatctaaatttaaaatttctaatcattgcattaggtgttgacctttttaccaaaacatgctcatttcatgcgcaattcttttatctgattctgaaggcattcgggtcttaaaaatcgaataatccgcgacatgttcggggggggggggctatatccctctgctcactcgtcgtgtgatgttggaaatatatgtccgcctatttagcttctcgtcgtaccagtgcttttctagcattgaaaaatgtccgaaatttggttctgccgttgtttcaggtggaatgttccaacgtttgctggacgaaacaggacggccaaacagtctaaaacagcttttttcctaatgataaccaacaatgttggatttggtaggaaagcaaaaaaactcacgcaataagttcatttcttgtaagaacaacttgttctttttttctgagtagccttttgaacactaaatttttttgtaaaaaaccaaaattatggcctagacaattattaaaacttactcgctcaattttatcgtgtttttgcttttcatcgaagagtgttagtagttcgcgtttgacgcgatctgacaatttgtgtgccttttgttcgatgtcgtccattaatgttttgttggatttaggcaaaaaatcagaggtgggctgatttgcgtcatatgcccatttttgcttttttaatacatcgaacacataaatctaaatttaaaatttctaatcattgcattaggtgttgacctttttaccaaaatcatgctcatttcatgcgcaattcttttatctgattctgaaggcattcgggtcttaaaaatcgaataatccgcgacatgttcggggggggggggctatatccctctgctcactcgtcgtgtgatgttggaaatatatgtccgcctatttagcttctcgtcgtaccagtgcttttctagcattggaaaatgtccgaaatttggttctgccgttgtttcaggtggaatgtcccaacgtttgctggacgaaacaggacggccaaacagtctaaaacagctttttttcctaatgataaccaacaa

SEQ ID NO: 180 - DNA, 1935 bp, Heterodera glycines
  unsure (1)..(1935): unsure at all n locations
agtttgtgttatgccggccgatggcaaacaaataatcaatatttatttggagcagaaagggaaaaagacacaaataatggggaggaatatttaaataacaagaaggaaaataacacaaaggaatgaagtgaacggggggggggggggttatttatggaaggaaaagcgggcgtgacatanccaagggagaaggagattacaaacaaagcaaagggtcaaaatgggcaccggccaattgggtaccatccccaacagtttgttttattgtaaaataagtgtatatgagaatgaaaaatggatgcttaattaaacaaaggaaacattgaaaattattgcttaaaatggcaccaaattcaaaattgcgtcaaaaagaaaccatttttgaaggtttgtttaattattttgaaatttaaataaaaatgataataatttacgcctgctctccgtccacctcgtccactttgttcagcagcaacaccactggctttcggaccagcgcccggtcgtactgctccatctcgcggttgagcagtgccatcatttccagggccaaactgtttgtattttaaacaaaaaattttttgcgataaaacattggcgatttgaaaacttttcagcccaatcccaaaaatttaattttttttttatttacattttaattttttggctaaaaattgcaaaaaaaaaacaaaagcaaggaaaatttttgaaaaaattatgtatttgaaaaacctaatattttatttgcaaaaaatcgtatttttttaaccaaaacttttcatgattttgattgtctcgcgggttcgattccctaagagttcggtcataattttgcaacaattttttttggtgttgtgtccacttctatgtaattttcttaattaattcatttttcaaaactttttgtcgacgatccttttttttaacagaccgccaaaattttaggggtttaaataaattattttaaaaaaagttttactggaaaaattattatattttttatgatttttgccgccagcgactgaccactttttgcattggctacaaaaagtagaaaatggactcaaaatcccacatcgattcacacaaaatgccacacattttgctcaattggccaccctcttctcccttttgtggcaattttggccccaccggttgcgcgacgcatcatccaaaatgcccggaaggtcggcgatggacagagtgaacggtgccgtcgaagtattgacattttccgactcaatttcctcctcgtcgcccattcggattttgttgaccactgacaacgcctcggacaattctttttccgcatcgtctccacagtcctcatctgttggggcctaaaaatggaaagaaattaaaataaattttggaatttgagttgtttgtttaaatgtatgtcgttcaattagcgcatttgagaaaattagctttttataacacagccgaagaaaatttttgaatttttaatgaaatttgtagaaattttttagaattttcttaaatcttatttgataaaaaaaatcggctaagattctctgttgtagtagcttttgatcatactctcccccctccctcttaatcaactcgtcactcctccagattccctgatcattctcgcctcccttctccccttcatctcttagcatatttacccttccgccctcggcatctcttatcattctcgtcccctcctcccccggcattaccaagaccaccggcttttgaacaagggcccttttgtcctgctccatttcgtggatgaacagaaaaaaaacttagattgggattttcttaaactttttcgttaaaaagtggaaaaaataatgaaacaacatttttgaaataactattttgattggggtaaaatggaagtgaattgaatgcatatgaagacggccttgccccatccatgtatagggggggggggggggg

SEQ ID NO: 181 - DNA, 2563 bp, Heterodera glycines
  unsure (1)..(2563): unsure at all n locations
catataaaaataantggcttgaatacacacaaattaaaattggtcttttttgaattttactgaatatataaagcataacttaatcgaaattaaaatagattattaattaataaatttaatgaaaatgaaaacaatgattgcgcatcatcaatttttctcacagagaatcaatgcgcaacaaaataagaaaagaaatttcaaatgaatttattaaaatgtttaatgggttttaataatttactgaatttgtgactttttcagtaaaatttttcttaccatattacatccatattcatcataaaagattaatgataataatgttgtaatttgatcattatagaagatgaacgaaaagaaataataaaaatataaaatgagcaatttctattacattttgctttttaatatgtaaaacaaaatttgctaatttcaatgatataaaatcaaaagtgttaaaatataactgtgatataaactaaaaattgaaatgatacaagtgttaaaatttacaaaaagtaaatatagaactgattatgaaaaaaaacgtcacggatgcaagaaaagctaatattaaaaataacgaatagattattatattcattattattttatgttaattgaaaatgctaaaagacacagaaaagcgagataaataattaagtaatagcattctataaattattgcaatatggtcaataaaataagaaaattgttatttatgcaaaattataattgatataatttcactttaaaaaataaacaatgaaaatagtaaatccaaataaaataattttaaaatattgaaatatatcaatttcgtttaaaaaactattataatttcttaaaaacactaattactaattaagtcaaataaatgaattgaattttttaaaaacatataaaaataatataccaaagtagttaacgggtaacaaggtgctacgcctcccttctccccttcatctcttagcatatttacccttccgccctcggcatctcttatcattctcgtcccctcctcccccggcattaccaagaccaccggcttttgaacaagggcccttttgtcctgctccatttcgtggatgaacagaaaaaaaacttagattgggattttcttaaactttttcgttaaaaagtgaaaaaataatgaaacaacatttttgaaataactattttgattgaggtaaaatggaagtgaattgaatgcatatgaagacggccttgccccatccatgtatagggggggggggtgggcggagggcggagcggccacacttttcccgcgtccagacatttccattggatgcttactttttcttgctcatatgcaatccattacatttctaccgtatcagttggatctgattttccatttacgtctcatatccatcggtgagcgggcgctgcaattgagtaaatgtccttcccatgccgcccgcctccccccccccggcgcatcctccgtccgcttctgtcccacccaattcccctttctcttcttctttggctaactgatgagaatagtctttttttgtcgctgctcttttgcctgtccgtcctactgctaaatcctccctcctcgctgtggccattttgccatttcaatgtgcatttgttaatttccaccgctgccgacgctacccgtcaacaaccccaacagccaaagaatacaccttcagcagctggtggatagctgggacaagggtgggacgacgggcgatgggggcggaaggttgagcgggcgcaacacagcacacatatttaaatgtaaatgagaaatgaaaaagtgtgatgatcggagcggggagatggcggggggggggggtcgatgggactttgcttcgtggctgtttaacatatcctattgcaacaaattgtctgaatagccgacgttttgtccaatgacaattacggcttataaaagatttcataaaagtttgaaattaaatataagaaattaattttgtgaaaaattgccgctactgtgggactccggtttcaaattgatatccaaatggaatggcatttattcttttccgatccgatgtgttcatttaataataacattttatccgtttaattactttttccattttttattcctatgatagtttttaaatagttctttttaaaggatttcaatagcccccgatatagtgtttttttggggggggggggggagggaatggaaaggcatagaagaaatggagaggggaagaatttgaaagaaaaagagacaaaaggaaaagaaaataaacagataaacttttatttgacaatttttacacttgtgcgaagcattctgatcaccgatcgattgggtatgccgtttttgaagatcaccctgatttcttcacacgcatttcgctcacctttcttggcaatttcccttaatttttattttgccatgccaatttattcgccaatttgtgtgatgattgatcgatgcggctgttcgcggaatgtctggcccaattagtagtcagcaggggtggacaattactttgacaattgcaaatatttgtgactgttctaagcttcggtttcgatagtgttggtt

SEQ ID NO: 182 - DNA, 1903 bp, Heterodera glycines
agaaatgaacaaaaaatgtccatcaggttaaatgttgccattactgcccatgccattatgagttttgtaaaaggtgtaggacacatagtcttttgaattttggcacagtaccctccccgtgggcagaaaaatggtggttgtgcccaaaatgtgcggcatatgtcccatacaaaattggggacaaacagtatataaatgagttgcaattagaaaaaaacaaatataaaaaatatttaacgcccccttcactcttatattatcgggcgccactggaagcggtaaaacccaatggcttatgagattgttgaagcactatacagaaatgattagcccgcctcccgaaaaagttttatattgttattccgaaatgaacgattcggtcattgatttgatgaaacgcggcatagaaactcataatgggattcccgatcagtcattaatcaacagtcagccaaaacctctcctacttgtgctggacgatctgatgctgaacattaacaatgatttgttagaccttctatttacgcgaggttcgcataattggaacgtaaacgtaattttcgtaactcagagcctttatgggcgaaatattcggacagcaagagcgaacagtcattaccttgtgctgacacgtaacccatccggacagcttcaggtacggacagtcgggtctcaactgtttccaaagcgcttaaatttttttatggaatcatataccgacgcaacaaataaaccgtttagctatcttgttataaatatgcatccaaatgcaccggaaactgagcgtcttactagtaaaatatttccagacgagcgtagagtaatttatttaccgatcgaataatgatacgctaagcgccgcattgtctatataaagaaatgagtacggaataaatctaaaatgtatcaatttagtccttacgttagagaaaatacagatttcttaaaaaagcttgcggccaccaggtctgatataagcttggagtgaatgagcttgcaaatcacgtagagacggcagtcaacgctttttaaattcaaaggtaaaggcaccaagagctcacgaagaccctcatttccccgctgggcaaccgaaacagaaccaagaatagcaaatggaaaagctgaaaccgacagtggaaaaagaacttgagagcagaacgaagccaccagtctccaaaatatctgataaaaaggaaatgaaacgcgaacctgaaaaggcgaccgtagaaaaagagatggaacgtgaaccgataaaaacaccagaaaaggaattagagcgtgaaagcccaaaaagcggacaaagagttggaacctttaataacagaacagttaaaacaagacgacaatttgttagaaaaagcaaaaaatgaaattaatgaaaagatgcaagaagaaatccaaacagataactatattcaaaaggggttagaaaaggaaattcccgaagagccccaaaaagaactggagcgggaaaaaagtcaacaggaaaaaacggaaacagaattcccctcattcgggccgccgcaaatgggcccagtaattgcgccactcgctcttccgccgctggcaccggcgccacttctgctgccatcatgctcgaccttcgcgaacccattcggtgtacgcgcaccgccaaacaaatgcgcggtgtgcggacgccgttttctggcgcctcgtcgccattttattttgggtctcttcaattttaaaaacgataagtaaattttagatgatttaaaaccacattttagcaaagaaataattggattttgcctgaaattgttaatacaaattggcaccttgacttacttttttgacccaacatttatgattacttttatttgagttttttgtcttaaatcaatttttttaagtattttaattcataaaatggcatccctag

SEQ ID NO: 183 - DNA, 954 bp, Heterodera glycines
cctgtactttaattctgcgttggatttttgctcccataattgtttgagtaccccaaacggacacttgaaaaaatcgatttatttttgttttcggggcagtccccccgaaccgatgcgcccagatttatggggagaccgaatctttccggaatagcttccctatagcctgtactttaattctgcgttggatttttgctccccataattgtttgagtaccccgaacggacacttgtaatattcgcatgcatcgttatcgagacagtcccaaattttcttaaatttggtttgttaatagagacaaagtttggctatagaatggtaccaagaatgtaaaagttggttgctcttaagcaaagttatgacatgttttgtcgaaaaagtcgctaaaatggcggattttacgaaacgcccaaggtggcggattttacgaaaagctttcccacagatttccatttaggaagaattttaaaagaaattcggagaattaaaaaaaaaagattggcacagaaagacaaacaaaaaattcctgccgagatcacttgaattaatttttttttataattttcatttaaaaacatgggtttattccgcagttttaataaaattaatgagaatttaaataaataattaaaaatagtttatattgaaatattttatcattttaagatataattaaaaattaccaccataaacaaaaaattataaatgaataaattaatcattttatgctgagaaatatttttttaagtaaaaagaacgaagtgaagattattaattatggtgactaaaaaaattattttaataagtacaaaattccttcacattcatttaaaattaactttaaaaaaatcataaaagatgtagaattggtttgaaactcaaagacaattggaagaaaacgggagagaattatttttatttatttgtgtataaataatttttaacttaaaatt

SEQ ID NO: 184 - DNA, 3457 bp, Heterodera glycines
  unsure (1)..(3457): unsure at all n locations
aaaaataaatattcatttctatctaaatttaatcttcgttttcagaaattaatataacttaagcaattatcagtttttatagttgcaacatttaccgcccttcccccacaaagggttgacgactcaaatcaatagccgaaaaggcatttaaatatcgtttttttatttaaatgaaaatacatattaacattattaatataaataatagtaagtataaacttatttttatagcattttaatattatgcaaacattgtttaacaccaaaacctttcttttctgggtatttatcacaaggacgtccaaaaaatatcggatataaagtcgcgaaatatggtcataaaacaagggcaaaaatcgcgaaatatggacctaaaatcggaaaaatatggatataaattttaaattgagttatattttcataattcaccgggccataactttatcgaagtcaaagagaaaaccgtaattaatcggtgaaaagttggggctaatataagagaatatttggcaaaaaagcttcactctaaccttaaggttagggttcggaccccgtgggcgggggtggctttttcgcgggggcgggggattgcgggggtcagagtcgcgggggcgggggcgggggtgggaaatttctcgcccccgggacggggggggggggggtttggtttttaattagctccaaaaatctttttatgggggtgtttttgtttaaaataaggtttnnntatnnnnnnnnnnnnnnnnnnnnnnnnnnnnggccaaaaaataagattttagggtcaaaaataagaacattttgcaaaattgcttcaaatatttttacattttattcgatcaaaaatgtattctattattatattttttataaatttcagtgcattcgggatcactaaatcagatttttaacattttttgcggcacatttccaaaaaacttggtgaatgtgcgaggggataggtccggtggtgccgattggcgccgcaagcggaaaatttttaagactatatgaattttgttaaaaattagccaaattttttagaaatttccctttttagatgaaaataaggtactaccccaaaaccagaacatttcttagaaatccgcgcccggggacgggggcgggggatgcgggggtcagagtcacgggggcggggacgggggcgggggcggggtccgaaccctaagaaaaagcgaagaccacaaaatgccaaatatttttgaataaatttttaataaattcaatcaaattaaagccatttttctctcaaatttcatctagaatttgcaaaaaatttcactgcggcgcctgtcggcaccaggggtgggcgaagctcggcttagtactcgaagccgaagccgaaggcgaagcccaatttttattcgaagccgaagtccgaagctcgaagcccaaaaaacccgaagttttcgaagttttcgaagccgaagccgaagttttttcaaaatttttttttaattccaaaaaattttttcatcacaaaatttcggttaaatatcaaatagaccaaccaacaacccctttcgataaataaatataatgatttttttaacaatgtattttctaaatttttataattcttagaatactcacagtttttgagtcaatttaaaaaataatgggaattttggaactccggcggtgccgataggcgccgacgggaaaaatttgaaattttagtgacagatttagttcaaaaatgaaaagattttgcgattttaattgttatatttatattaaatttccgtcgaaaaaagaataattttgaaaaattagaagaaaagaaagtacttggatgggaactgatcaaaagaaacataatgaaaagagcaaagagcactaccactcgaccatgcgtgcgaacaaaaaaataaaaacaaaaaattaataaatatatattaatttaagtttatcaaaagcccatcactaagggtgcattttcacattgaaaactcaatctttaggggtgtatttttcccgaaacttcgggtaaaatagccgaagccgaagcatgaagttcgaagctcaaaaaacccgaagttttcgaagccgaagccgaagtttcgcccacccctggtcggcaccgccggaccggcttttacttgttaactcggtagttttggacagacaaaattttcaaaaaaatttcatggcggcgcctatcggcaccgccggactactgttcccgaaatgtttttgaaaatgcgcgccgcaaaaaaggatttaaaaagcaactaaaatctataattttatggattgatcccattaacaatttgtccgccgatttctctctccaaacctctgaccccttaaaaatcttgatcaacccattaacctttttcatatacatataccgccagcctctaaaaaatttcttctttttttaatgaccaggtatatttagttttttggagattttcaaaatttaattctaaattttttcgaaatttccaaaattccgcaatcccgcgcgggttcccacaaattttaaatgcggtatattcttcaggttttaagtgcgtcaattggcaactgatggatgaattaaattgtacttaaaattgcaaatatttaaaattttatttttcagaatttgtcaataagattttgccagtaattaatggctttttttaatttattttgatcatttgcgctatttttgccaccattttataattgccacaatttgtgaatgtgtttcaagtttcattttcatttaaatttacctaaaaatggctctatttcactttatgagtctaatcagagtttatgaatcaagatcaaatacttgtgaatctacataataaattttgattttgattcaactttttgaagaatttatttatttttatttacaccagcagcagtaaaaaaatatataaagaaatttcactttgtttttcgcaagcgatctgaaacaacaatacgaccactgttcggtataccatcggatgtagttcgttgatccaaatgaccaaagattgcataccagggatgacatccgagcagggattcacgcaactggatttcaattacggaaatccgtcatccataaaattggttaagagtaatttatgatcagaatgaaagctttgaatgttttttgaggcaaaaaacccaaaatattggccaaaatcaagagaaaaatagcaaaaatagggcaaaatggcagatttagagctgtggtagaaaagtccaaaaaactattaaatttcaataatcttttagaagtccttttaaaataaatttaaaatgattgtcctggtttggcgatgccgaaaggcaaataaattataatgtgtgacgtaaaatgctttctttttgaatttttagggctcattttgggaatgatttgtgaaggggtcccggctatgtaaattgacgaccttttttaagtttttaaaactgctttttcatggcgtgttttttccaaaaactg

SEQ ID NO: 185 - DNA, 5308 bp, Heterodera glycines
  unsure (1)..(5308): unsure at all n locations
taatttccgtaatccggaaaccgtaatccgcaattgcgtgcagccctgattccgaggcccctaaaattgtcggaagttggaatttcctgccatccctggcgcatacactaagaagagctgatatggagggcacttaaaaatgatttacgacatttgcactgaactaactctgacatgttacactgcaattttatgtcaattatttttgttgttttttagattatttttatcgcttttttgggactttatatttacaattaatatctaaactttttgcgtgctgggtcgtttcttaaaaactgccaagtgggcgtttcttaaaaactgccaagtgggcgtttcttaaaaactgccaccttgggcgagaattaaactacaaattaaaacaactatatagaaatattttatctaaattttattgatataaagtttgtaaattaatatatatattccagtatttcttttttaaattttcttattctttaaaatgttcaccaaaaacatgaactgacaagcataacaaattctaaaaaataaactatttaaaatactaataaatacagacttttgttaatgaacattcagcactttcatacaaacatttgcaaaagcttttgtcgcaatcgtagcgttttttagatttgtttatatagcataaagcatggtaataacagcaatcatcgactatattattttaaaatgtataataaatataaaatacttttttaaaccttttttaaagttgcaaaaccatattactggtgctataaaacatgagtcaaaaaatgaagtgccacaataagtgctacaatatttctttgcaactttcaaagggaaattttaattataataagcttatcagtaaaaaatttaaataattaatttatcaagaaaaaatattaaatatatcgttgagctcatttgtaaattttattaactacaatcatcagaagcaataaatttattaatattttaattttactgaacttggtgttgaagatagtgttgacaaacaaatgatgtaaaaattatatgtatatatatttttattatttataacgttggcaaacaaatgatgtaaaaattttttagccttatcctggtaaaatcagagagtgaatgacattcattaaatctgaagatattcggagaaaaaataatatacaaaaaatgaaaaatttaatatgattttaagaaaactgaaattacaaaattgatcatcacttttatagctgctcttttgaattcaaaaagattttcttgaccctttggataaaacaaattttatttaacaaaattttttttcatctttcattttttgttgagcaaattttacctttttcgcaaaattatttaattattttttctcactttctgaaacaacaaataaatgttaataaatgaagaaaaatagattttatacagaataaaaacatataatgctgagcagataaattcaacaaaaaataagttattttctttaaatatgaaaattaaaaaagaaaaaagcttacaacaccttcgattcccaggacgtctccgttccaagtactaagaaggcccaacgttgcttaacttgccagatcggacgggatggcgtgttttcaacgtggtatggtcgtaagcgaaagtgctccatttgaaagcaattaaatagtcaatttttaatgcattttttctctttggttaacttatcattaaccaaaacaaggattgttaaagaatttagaattcacttaaataaggtaaaaataaaagataaattcgatagtttttttcgaaatgaaagagcaaacattcggaattttgaattctttttttaactaatttcccaactgcaaatcggctgaaattaaaaatgatttatataaattttgaaatcatcgcaaattctctttaaaagcacatataaagccttttcctaggaacaatataattgttttgattagaaaaacctcgaaaacaaaatttcttaagaaaaattggttttggtggtgattttaagaaagtcatccacccatcatttttagtggttaaagtcatcttttgaggctccaatattaaattttattgtattccgttaagaaatttaaaaattcatttcggcacaaatgccaaaaaaggcaaaatggggatacaaaagtcatactaatggttttaaaccaacctaaaaatgctttttaagccttatcctggtaaaatcagagagtgaatgacattcattaaatctgaagatattcggagaaaaaataatatacaaaaaatgaaaaatttaatatgattttaagaaaactgaaattacaaaattgatcatcacttttatagctgctcttttgaattcaaaaagattttcttgaccctttggataaaacaaattttatttaacaaaattttttttcatctttcattttttgttgagcaaattttacctttttcgcaaaattatttaattatttttctcactttctgaaacaacaaataaatgttaataaatgaagaaaaatagattttatacagaataaaaacatataatgctgagcagataaattcaacaaaaaataagttattttctttaaatatgaaaattaaaaaagaaaaaagcttacaacaccttcgattcccaggacgtctccgttccaagtactaagaaggcccaacgttgcttaacttgccagatcagacgggatggcgtgttttcaacgtggtatggtcataagcgcaagggatccaattgaaagcaattaaatagtctttttatatttttcttttttgattaatttaacccagaacaataattgataaggtatttagaattgaaagagaaaaatttattagttttcaatgaatcagcgaaaaatttggaattttttttaacaaaattatttccaaattcgcaagtctttagaaaaattgaaaaattgataacattttttgactttcttcacaaattctctttaaaacctatacataagccttttcctatacgtaatttttcgaaaatttgaattttcaaatgactaaaaaagctagagaatcagaaaataggttaagaaaattaattttaattgtcaatttttaagacaagtatcctccgttcttagtggtttaagtcactcttttttaaggtgccattttttttattccgataaaaaaccaaaaaaaaaacaatttcggcacaaaatgcacaaataggcaaaattgggacgaaaaattcatcctaatagttcaaaaccaaactaaaaatgttttttcaagcttatgacgataaaaaacataaagcgaatgacatttaaaaatgatgggcctaaattggaaaatctaatgaattaaaaaaagttaaattcaaatgtttagcctgactttatagctgttctttcgaatttaaaaagattcttttggcccttagggtaaaagaaaattcttttaaaatttgttcacttttcatttcacattttttgttcagcaaattctatttttctttctcaaagcggtttaaatttttattaaattttcgacttccataggcaacaaataaatattattaaaaataagaagagatttttaacaagccacaaagttataggaagaagtaatttcaagcaaatgaataatttaacaaaaacaaacaaaaaataattcattttcttacaaaacaaaaaataaaaatggaaaaagaagaaaaaagaaaaaagcttacaacaccttcgattcccaggacgtctccgttccaagtactaagaaggcccaacgttgcttaacttgccagatcggacgggatggcgtgctttcaacgtggtatggtcgtaagcgaaagtgctccatttgaaagcaattaaatagtcttttttataatccatttttcttttttgattaatttaacccagaacaataattgataaggtatttagaattgaaagagaaaaatttattagttttcaatgaatcagcgaaaaatttggaattttttttaacaaaattatttccaaattcgcaagtctttagaaaaattgaaaaattgataacattttttgactttcttcacaaattctctttaaaacctatacataagccttttcctatacgtaatttttcgaaaatttgaattttcaaatgactaaaaaagctagagaatcagaaaataggttaagaaaattaattttaattgtcaatttttaagacaagtatcctccgttcttagtggtttaagtcactcttttttaagatgccattttttttattccgataaaaaaccaaaaaaaacaatttcggcacaaaatgcacaaataggcaaaattgggacgaaaaattcatcctaatagttcaaaaccaaactaaaaatgttttttcaagcttatgacgataaaaaacataaagcgaatgacatttaaaaatgatgggcctaaattggaaaatctaatgaattaaaaaaagttaaattcaaatgtttagcctgactttatagctgttctttcgaatttaaaaagattcttttggcccttagggtaaaagaaaattcttttaaaatttgttcacttttcatttcacattttttgttcagcaaattctatttttctttctcaaagcggtttaaatttttattaaattttcgacttccataggcaacaaataaatattattaaaaataagaagagatttttaacaagccacaaagttataggaagaagtaatttcaagcaaatgaataatttaacaaaaacaaacaaaaaataattcattttcttacaaaacaaaaaataaaaatggaaaaagaagaaaaaagcttacaacaccttcgattcccaggacgtctccgttccaagtactaagaaggcccaacgttgcttaacttgccagatcggacgggatggcgtgctttcaacgtggtatggtcgtaagcgaaagtgctccatttgaaagcaattaaatagtcttttttataatccatttttcttttttgattaatttaacccagaacaataattgataaggtatttagaattgaaagagaaaaatttattagttttcaatgaatcagcgaaaaatttggaattttttttaacaaaattatttccaaattcgcaagtctttagaaaaattgaaaaattgataacattttttgactttcttcacaaattctctttaaaacctatacataagccttttcctatacgtaatttttcgaaaatttgaattttccaatgactaaaaaagctagagaatcagaaaataggttaagaaaattaattttaatttgtcatttttnaagacagtatcctccgnnttctagtggtttaagtcactctttttt

SEQ ID NO: 186 - DNA, 2757 bp, Heterodera glycines
tacaaatctcgtaatgacagggacagtaatgacaacacttaattttatgtgggcagttcatttttcaatttaattttattttgggttgctatttatagaaggggtatataaagggagtgaaaggaccatttgattgataccttgtatcaaaaatgcaaaaaccgataatcgtaaatataattgctctcgctaatctcggtaccggaattaaactaaactctctgacgatcaccgaatgcgaatttaagtataaccctagaaaattcaatgcctcggttatcaaatgtataagccccatcaaagccacggcattattatgggaatccgggaaaatgatatgtctggggacgaaaagtctgatagactgtgaaaatgcgataaaaattttcatagaaataattaagggctcggggtgtccgggggcttcttacaccggacacacgattgaaaatattgtttcgacctttaaattcggacatgaaattgaactgaacgaattcagaaaaaatcgtcgtgccttttatgaaccagaaatattttgcggtttaaatttcaagcggggtaaaagcatgacagcgttaattttctggaccggtaaagtcgtaattacgggaactaaaaacaattctgaaattgaggaaatgtatcatcatattctcccctatttgaaaatggctcaaaagaatttaatgagacgataaaaatttttatttattgagacggtcccgaaattcttgcagatgacctacttttgaaaaaaattttttttcaatcctaatttattattcatttttcaattttatatttaaattgaatttaaataattaattttactgtaaaattcattaatttgctgcaattattaattaaattagcacttctacaatccattatcgattaattggcgcggcggcggcatcgtggcgcggggagggagggcgtggaggaaatgcaaaaaaaaaacacactttggcaaattttcaaaatgagttttaatttcaggatcagaaaatcatataaaaatctcaggatttgagaaaataccccaaaaggtttgggatcaaaaaaaaggaattaattttttggaatcaaaggaatgcgcatccatcccttaggatttggttcttggcggtaaatgtccacggcggctacttcaaagggctgcgcccacgggctcgtgcgggaaacacccgcaacctttaggggtcatatactacttggggctataaaagtcaaactaaaatgctttttacaccttatcccggtaaaatcagagagtgaatgacattcttttaatctgaagaaattcggagaaaaaataatggacataaaatgagaaattcaatatgattttttaagaaactgaaattaacaaattgatcatcacttttatagctgcgttttcgaattcaaaaagattttctggacctttggataaaagaaattttatttaaaaaattttttgttcacttttcattttttgtttagcaaattttaccttttctcaaaattatttaattattttttctcactttctgagacaataaataaatgttaataatgaagaaaaatagattttatacagaataaaaacatataatgctgagcagataaattcaacaaaaaataagttattttctttaaatatgaaaattaaaaaagaaaaaagcttacaacaccttcgattcccaggacgtctccgttccaagtactaagaaggcccaacgttgcttaacttgccagatcggacgggatggcgtgttttcaacgtggtatggtcgtaagcgaaagtgctccatttgaaagcaattaaatagtcaatttttaatgcattttttctctttggttaacttatcattaaccaaaacaaggattgttaaagaatttagaattcacttaaataaggtaaaaataaaagaaaaattcgatagtttttttcgaaatgaaagagcaaaaattcggaattttgaattcttttttttaactaatttcccaactgcaaatcggctaaaattaaaaatgatttatataaattttgaaatcatcgcaaattctctttaaaagcacatataaagcctttccctaggaacaatttaattgttttgattagaaaaacctcgaaaagcaaaatttcttaagaaaaatggttttggtggtgatttttttttagtggttaaagtcatcttttgaggctccaatattaaattttattgtattccgttaagaaatttaaaaatccatttcggcacaaatgccaaaaaggcaaaatggggatacaaaagtcatactaatggttttaaaccaacctaaaaatgctttttaagccttatcctggtaaaatcagagagtgaatgacattcattaaatctgaagatattcggagaaaaaataatatacaaaaaatgaaaaatttaatatgattttaagaaaactgaaattacaaaattgatcatcacttttatagctgcttttttgaattcaaaaagattttcttgaccctttggataaaacaaattttattttcatctttcattttttgttgagcaaattttacctttttcgcaaaattatttaattattttttctcactttctgaaacaacaaataaatgttaataaatgaagaaaaatagattttatacagaataaaaacatataatgttgagcagataaattcaacaaaaaataagttcttttctttaaatatgaaaattaaaaaagaaaaaagcttacaacaccttcgattcccaggacgtct

SEQ ID NO: 187 - DNA, 3353 bp, Heterodera glycines
  unsure (1)..(3353): unsure at all n locations
cgctcacctacagcaggtgggactggcgcgaggtggagaagttcaaccccaacttcttcttccttgtcctgttgccgcccatcattttcgagagtggttataatctgcacaagggcaacttcttcgccaacattgtgcccattttgttgctgtccattgttggcactgccatttcggcattggttatgggcttttgcctgtacgcgtttggacaggttgtgttgacatttttaggggccggtaccctattcggatgtaatccgatcccgaataagtaatcctaaccttgggattgacatgtttgtttccgcaatttttggagacctctcaattttctgattgccgaagtttttgaatttttttgaaccctttccaatcatcgagtccttttttaaaacttcggaataaaaagtgtcaagtttgatcggcccccaaaatgccttgaagaaaaatttatttattttttcaaggctgggctcatctacgagttgaacgccatccaatgctttgcgttcggctcaatgatttcggcggttgacccactgatcactttggccatcttccaagcactcaaagtggaggtgcagctgtacatgctcgcctttggcgagtccatgctcaacggttagaattttttttcaattccgagcaactcgaaaactgcataaaaccctcatttgtattggggttttctggaggtcggagcattcaaaaaatataggtgtacgacgttccccctccctcatatcgttcgttaccttcgaaaattaaaaaaagcaaatgagaggtatttcaaaaaatagaaaaaacacttatatgaaaatttcaataataacaatttttaaaattgaataaattgttaggaaaatggggaaggggcgggaactagctattcccaaaaatataccatggaagagaaaaattccatgaccgaatttatatcataactaaaaatagcacggagaatagctgtattccaccgtcccccgctttcgaaaatttaaaaattggaatttaaaaataataaattttgagacatttctaaacacttcatagggtaatacggttgctctcttttggattaagaattcccggtatttcaccatttttaaaggtatcccatttcagacgccgtttccattgttttggccaccactgcgcaagagctgtcctcgcccgacgttgccacgatgagttcgtttgccatggttcagttcgcttttctccgcttcctggtcatgtttttcgcatccgccgccctcggcgcactgatcggactcatttcggcgttggtaatgcataatttttaagtaatatactgaaagtgccttttcccaattccaaacggcattatgtgtattttcactaaattgcttttccatgtttagctgttcaagcacatcgatttacgtcgaacacctcagttggagttggcccttctgttggtgtttgcctatttgccctatggactggcggaggcaatttcgttgtcaggttggcaactttggaatggaaaccatcgattcccagtattcaaaaatggaccacaaactcaaggtggacaagggagtgggctcaatttcgtaaatcgtacggggctccgaggcaatctcgtaaaaaaaattggcctctgagaggggagggcggtattttatctttcgtaaagacaaattccagactctccccaccccttgtccatgtatgcatgccacaaaccctgttcattgcaaaaatcatgttaaacaccatttatttttggtccattttccttataaactctccttggtaattttttttttttgcgatttcctaattcaattcctatgaaattcaacacatccccccttttttcaggcattatggccattctgttctgtgcaattgtcatgtctcagtacacccatttcaacatttcgccaatcacccaaatcacattccaacaaacatttcgcaccatttcatttgttgcaggtcagtgataagatttaaatgatttttttaaatctttgcccttttgtttgtttctatttttttatttggtattttgtattttatttgttcgaaatttggggttttcctctttttgattccgttttttgcactgttttcggaacacataacaattgaatacaataaatactgttttgaatatcctatcacatccattttctgtcctttttttcaattcccaccaaattttcgttcgattttttaaaaaggtttaataattccacaattttttattacaaacacatttggtcaacctttttccccgttctttagagacgtgcacttttgcctatttgggcctctctctgttcgccatcaaattggtgttccatccgatgttcctcattttcagcattgtatttattaccacccacaaaagatgacttttttcaaaaataatcattttctaaggttcttctctttgcaagccgtgcggccagcgttttcccactgtccgacctcgtcaatcggttcagcaagacgaaaatttcgatgaaaaatcagatcatcatttggttcagcggtgattttttaatgttttttaataatacattgatatcctcagacaaaggtcttcttctaattgatattttgaattatataaaataagttcccgatacatttaaaaaatataacttaataagtttcaggtctcaaattcttgcttttttatgaaatttaaaattttattgaccacattaaaaattttttaaatcaatttcggtacattttaaaaaaagtttcaccccatacatttcagtttttccaattgctctcttatttttttttacaaaaatttaccaaaattttatatgaaattttaaattattactaccaaatttcaatgaaggaaaaagaaccctatagaactattaaaaaaacaaattatttaattaccccccccccccccccaaggaatgcgtggcgccgtggcgttggcacttgcgctgcacatggactggggcacggacgagaacaagggcgtcattctcacctcaacactgttcatcattttgttcaccatcattttcatgggcggttcagcattaccactgataaaagtgagttgcaatgatggcatagggctaacaataaaacaccgagcaaatttcacccattgcattattaaaatagttcgggaatttcaagatctaaacattttaatcttattacgaaaaaaaattttatttttaaaataaaagtttttgctgatttttaaccagattttttcaaaattttagatgaattactaatttttcgaaaaaaatttgtttttttgattttcatatgaaatgcaccccttactttgcagctnttacatgtacaaattttttgtttcacta

SEQ ID NO: 188 - DNA, 9690 bp, Heterodera glycines
gcccagaattttttttttgggaccatacttttttttttgtttgtcaattgtccgctcgcgcaatctgtttgtttattgttattttgccaaaagtcccaaaaaatttcgtttagtttcaaaaaagttatgccactcaaaaaactagtttcttggaacttttttgctgctccgatttttttttttttgtaaattttcacaaattttgctttaaaagagtttgtcaagtgcttttgaattatgccaagaatgtttaatttggttgataaagaaaaaatttatggtccaaaaaattcgtccgacgatgtttcggcagatgacattctgtcctattccgccacattaaacatttttaacgtcattagattgatctaaaaaataagaattctctcgattaacctaaaaaattttcatttggtttcaaaaaaaatatgatgaaaaaattttaaaaattaatttttctaacttttttttccataaatcattgaatcttaggtgaattttttccaatctttttttgttcttacctcgccgagcgaaaacgattaatattttttatttaacccttttcaaagcggggctttcattttatagttcacccataatccccaaaattctttattttatattcgttaattgaccattttttgaattatcattttccaacaaatatttttcgattgctgcaaaattcatatgatatttttagtatataatttctcgtccatcccaaaaataaattgctgattaataaatattatttaattttcaatcgatttctcagcattttttttaatcaaaaaaaattctcattttacctccgccacccttcagcaaacagcacatttttaccgctcaatcagcacactaaacggtggggttaacgtcaacatgcacattttgacgagaaaaataatgccatccatcaatcaaatctcgagagccaaataattacccactcaaataaaaaggacagcttctcgggagaagccaatttgtctaaatgaaaattcagagatcgcttcagcagcagtgaaagaaagccttgattataaactttcatttttttttgtttcaaaaatgattgataataacaatttttcgtttagtttattttccgcaatttttacgaaataatttttattttatttttatttagaaataaaaataattttttatcaattgttaggagtttataaacaataaataaaataaagacgagattaaattttgtaaatttaattgaaattataattttatattaaatgattcttttttgatcaaaaaattaaattactaataaattttttggttaatttagtttttttaattttatattattttctttattaaaatgcaaattttatttaattccatttttattttaaaaagagccaaagaattacccactcaaataaaaaggactgtttctcgagagaagccaatttgtctaaatgaaaattcagatatcgcttcagcagcaatgaaatccttgataaagatttttgattattttttgtttccaaaatgattgagtataacaatttttcgtttaattattttcagtaatttttaatgaaataatttaaaaacaattttttatttagaaataaaaataatttttttatcaattgttaggagtttataaacaataaataaaataaagacgagattaaatctctttaagaatcatttataaattaatttaaataataattttatataaatgatttttttctctaaaaataaattacaaataaaaattttttgtgttaattcaaattttaatattgtatcatttccctaattattaaaaataatttttattttatcaatttttatttaaaaaattcattaataaatttcaatatttttttattgtgtttttatttaattcaaataaaatttttagttgaaagaattcctgtaaacataaaaaaatatattaagaaggtttccagttaaattaaaaatttatttagaaataaaattttttgggttaattcagattataattttgtatcatttccctaattattcaaaatgtaatttttttatattccttttatttaaaaaatcattttgaaaaattttaaaatgctcatccgattttttctccatatttatataaaatttaattgcatttttgatattttattttatccattcccctctttttccattcccctctttttccattcccctctttttccattcccctctttttccatcaaaaaattcaaatcgataattcccacaataattatcctcctcaattaactataatgagcaaacgacttcgcagtgaaactgacgaacttctttctgccaaaaatcccgacctttccattcttgaacaacgaatgtcacgactcgaaaatttgcttgagaggcttttgccagtgggcgtgggtccaattccagaagatcctatccagcgccttgaaaagcggatggaaaaattggaaaatcaagtcacggcacttgttctggcactcgaaaaacggccaatttctcaacaacaacaaactccatggggttgtcccccggaccacatcatccggcacataaatgctgttgttttggactctgacatcataagagaaaagtcaaaaagagctgttgtggagaaactgcctgagggaatcgatgaaaaggacgtggtcaaatcgattgctgaaaaatgtggtgtggctgatgaccttattttggacgaaatccatcggcatcccaaggaaagaagtgagtcgaccagccaaaacacaagaaaacccagaattctcaaaattccattcgcatccactgaatctcgtgatatttttctgaaaaaattccgtatggcactatccaatttaccaaattttccaaaatttctgagtgccagacgggatatgactcagtccgagctctccattctttacaaccttcgctcccaagcttataattcaaacagtagctgtggactttttaaatattatgtgtccgatttgacaattcgtgaatttgctaatcccaaaccctttagaactcatacgaataaccactaggggcgactgagcaaaccacctaaaagtttaaatttaaactcagaaaaagcaattagcaaaatgccttggattaattccatattaataaatgcccgttcaatcgcaaacaaaatagctgatttagaatatctaattgagacaaataaacatcaaataattttgataaatgagacttggttaaataccaggaatacaattacaactgagttaacacttaatggtaaatttcaaactgttctagcaaatagggacaataagagaggcggcggatgtgctattttggttagcaatgaaattccatttaaaataattttatcagaaagcagaaaccaatgtgaaatcattcatattattttatctttaaaaagtccaatacatattataaatgtttacagacccccaaattgcacaacacaaaacactaaaaaaatgctaaaatatttaacaagtgtaaatgaatcaaatagaataatttactgcggtgattttaacgccccaaatattgattggaacacaaataaattattagcaaaaaatgacccagttgcaaatgctttcattgactttattgaccaaaatcaattattacagcacgtaaaagaaccaactcgagaaaagtcaattttggatttgattttttctggaaagccttccattgttaatgatattaaggttttagaacatttttctacatctgatcacaaaatgatcagctttaaagtttctcaagaaataaataaaacccgtgaacccaaaatttttgtaagggactttagctacaaaaactttcaaaaattaaatcaaatgatcttactaaataggcttagttgtgtcattaatacgaaattttatttagaagaaaaatataacacacttttgatagagttaatgaaagcatttaatcatactattcccaaaaaaccacttaaacaaatagttaagcaatcttatccacaaaaaattagagatttatacgatgaaaagcttaaactacacaagcttatcaagaactgcaaggggaatgaaaagtataaattaagttacaaaattgtttccagggtgcataaaaagcatttaaagcaattttgggataaaagggaaaataatattatctcttcagggcaaaaagcattaacaaattatgtaagaaaaaaattaaatccaaaaaactccattccttacttaatcgataacagtgggaatatttgctttgatgaaaaggaaaaaagtaagctattagcagaaacattccaaaaagtatttattaaaaacaatcaaattttcgattattctgaaaataattctccaagggaaaagcttctgatatagaaattaatgtgggaattgtatggaatttactcagaaaactgcctgggcgaaattccacgtctccagataatattccatatattctacttaaaaactgctcggaaacactagcagtaatattaagtgatatattcagactaacacttgattctggtcaaattcccaaaatttggagaacttctatcattgttccaatatataaaaagggtgaaaaatctaatcctgaaaattacagacctatctcacttacgagtacggtctgtagggtatttgaaagaattttggcaaggaaaataattgaatttttgaataaaaataatttcttttcgaaagagcagtttgggttcttaaaaaacagatccacgacaacccaactattacagacattacatgatttttacgaagccatacaaaatcaaaaagaggttgatgtcatttatatcgatttttccaaagcattcgattctgttcctattgatttgttacttgcaaaaattaaaaatgctggaatagttgggaaaattttggtgtttttacgtaacttcttgtcacaaagaagttttagggtaaaaattgaagaccattattctgaaagctataatacttatacaggggtaccacaagggagcgttttgggtccattattattcctaatatttatcaacgatttaccggcaaatatacctaaaaatgtaaaaattaaaatgtatgcggacgatgttaaattgtatattttccatcaaaatgattcaaatacaaatgatctatctgaagctataaaaattcttgaaaaatggtccaaatctaacggccttgaaatatcggtcgaaaagagtcaaacattgtatattggcaaaaataattcaaaaaaagagtattttctcaatggaaaaattattccaagcttagaaaaagtcaaagatttaggagtaataattgactctaaattatcttttgctgagcatataaataaaataataaaaaatgcttacttaaaggcataccatattttgagaataatgaagactagagagctaaaaactattataagaatgtataagacttatgtcagacctcaattagaatatgctgttgaaatttggaaccctaacttaaaaaaagatatagaaagaatagaaaaagtccagaaatttttcacgagaaaagcctttaaaaaatgcggacttttacatagatcatattcagaaagacttgaaatttgtcagcttatagaattagccaagcgaagaaatattgctgacttaactaccgcttttaaaattatgaagggttttacgagtcttgatgctagtaaactttttactttttctgatcgacccactcgtaggccattacttttgagaatgcggcgcacaaccacaaaaagtaagaataatttttttaaccgtatagccaagaattggaacaaattaccaattgttccaattcaggcagataaggcaaatcaattcagggcattgctaaaagctatgtatgagttctaagggatttattgacatttgcattgacattcattccattttattttattttactttacatttcatattgttgtattttttgacattatttattttgattttttttatgcgccacataagagcactaatgtgcctgtggtttgctcaataaatatatatatattaaaaataatttattacaattgaaatataatcaaaaaatgttttgttttttttgattaactttttatgtgttttgctgcctaaaagcgtaaataaaaatttttatttgcctatttttagtgcctgtatcattaaaatcccgaaatgtcgggttactaaaagtcagttcaccaaatttcggatccccaaaagtcgttatgtccccaaatgtggtgccattttcaaaagagaaacattaaatgtaaagataatcgcattttgctgttcttcattgctgttgcacattgttattgtttctgatgttggcattgtttccggcataatttggtgccatccatgccatggcattttgcccgtttgacaccgaattattgccattgctccacaaaaagcgagaaatggcatggcaaaagttggcacaatcgttccgatctcaacaatccatgcaactgttaattgccagcaacaattcgtcacttgtttccgcaaaccacaaagctttaattttcaaaataataaataaatattaaacaattatttcatacccatcccaaatgctccggttatataaaacctcaaaaatgaaaaaaagtgtgatcaaaatgtatccgttcacaatgtttgtccgttgttccagtggattttgtccgcattaaatccgtcacatccgtataatttgtcaaattcatcatggcaaagagacaaaatggcaaccaattctcagaggaggaacgaacttttcaaattgtattcaattatttctttgtgaaaataccaaccagataattaattgcccaagctgtttattaaagcagctgaaatttactttttatgagtttacttcaacattactaattagcatgtgcattcaacaataattaactttattatgagtgtaatatgacaaggtaaaattaattataagtcattatgaaaaagaaaagccgcgactggaaattgctcaaaattaaacaaagcaattaaatgaatttaattgctatatactctgacaatcatttgggtgaaggatttgtcaagtataaattttcgacgctatttttcacccatattttccgaaggaaacatgtgctcaactgttgattgtcacctgcgatgagtcatagttacgacggcacagaataaaaaccgtgctggcgcgtttcttaaaactgccatccttgaaaattgttcaaaaaattttcaaaaattaattttttttaaaaaacttaaagaaaattttcaacgaaaaattctaagagaaaattagaatttttgaagaaatatttctaaataaaaaatgtaaaaaaaattcataactttactcaactgcaaccaatattttatggtatcattcaatagctttaattattttctatcaaaatattaatacttaaattttttacaaagtatataaaaaagtttgtattaaaatttaaaaatttttagtttttgaaattctagtgtttaatagattatacaaaaggttttaaactccaaaaagaaattaaatttcaagtcattaaaatgcaattcaacgattttttttagaaaagttcataattttttatttattaatttacgaataaaaattaattttcccatgtttttataatattccaaaaatttttaaaaatatttttcaagttttcaaaatttttcaagaattttcttgaaattaggggggagggcagttttaagaaacgtgcatggcttttagttttatggctggcagtttttaagaaacgcactagcaccataaaaaccacattgagaagtgcccggcgaaaatctcctttggctcccgtccgtacatcttccaaaaaaataatgaatattgtgcatttattgtccgtacatggtggcccccttttttggtgcaaatggaccgttatattttgtgttcctgttttaaaattttttaatccaaatttgcttacaaaaaatcgccgaccaaaaaacaagtttggaaaaattatcatcacgttaattagaaattctattttttatttatttacttatcacataaataaatttcatcagatatgcatgcataaatcacttattctgactactgttcagaataaaagtatcgtagatgaagtgagaaaagaagtggacgaaatcacaggattagcaagataaaaatgcgaataaaataaaatcaggtttaaagtaaaactgcggtagacggcataaaataaaaatattttcacgtaattcatattttagaaaataggggtgggtgtattatttctcccgaaatccaggacaatttatcagaagctgaagctcaaaaaactcgatgtttccgaagctcgaagccgaagtttcgtccatccctgatccccctacgccctcctcgattttggcgtcttcagtgcagaatctgatcagaaagaattctttaattgctttgtttaaattttgagcaatttccagtcgcggcgttactttttctaatgacatttaacaaatattacattgccgaaggcatttaattattgtttaatgcacatttgaatgccaatgttgacgtaaacacataataattatgttttcagctgatttaataagtacccaggggaattgtttggtaggaattttgtccaaataaaaataaaatgaacagaattcataaaagacgagacgacaatttttccatttggagttggttggttggcattttgtcactccgatggaactgttgctgtttcgtcatgatgaatttgacaaattgtacggctgtgagggatttaatgccgacaaaatcccacttgagcaacggacaaacattgtgaacggatgcattttaatcacactttttttcatttttgaggtcactttttctagggcagcgttttctagaacaatttaaaataattaaaaaatcgataatatttaagatactgtacgttccgtgtatggtatcaatattcaaaaaaatgtacgacaacccatgctacaaaatgctgtttttcattggcatattggacatggttataaaaaaaatgttttaaaataattaaaatataaaatttacttaattactatgcctagttggccttgctaatgaatgcgttggaaaccgggattcttggcatcattggtgccgtttattgtgattatccattgctgatttatacaaccggatcaatgggtctttgtatgtttattttttattaaacagtatttttttaaattattattttaaattttggttcagccttatggtttgctgaaacagctgccgaatttttgctggcaattaaccggtgcttggaattgctgaaaccagaactggcatacgtcattttcaatggtattttctcattgcattattaattagtgaaaaataaaatcaatttaaattgtccatatttaaattttgtgaattatctcgttctaatttcaaattaatttaaaaaggtaacaaaacttggtggttatgtgcggtgccaatattttattccattgcaatggccatgttcacgaagccaattctgttcagtgggctaaatttggcatggtttttcaacccatatgttggctacacggacgattttggaaaaattgtaagaaattaaataaaattttataaaaaaaaagaattacagtaccacaacacgctgcataccgtacacgactcttttgtc

SEQ ID NO: 189 - DNA, 1000 bp, Heterodera glycines
aatgatgtccgagactgaaaatttctcgaggcaaataccaaaaaaagctgttaattttctcgagtcgagactctcggacatcattcacttctcccatgctctctcttccaaccgcgcactccatccgtcgattgatttctgtggaattttgaattgaaaacatcattgtttctgttttatatcatcatttgtgtgctactattactgtttgtataactattttttttttcgatttttattggtttatctgccgggattttcctccataattcgggcccaattttcgacacattcgttagtcggctcactttttcgttcaaaaattcactatttatttctgtgctgcgctgaaacacatccttttcattttgttagaatgtacagtaatttggaccgaatttgtaaagacaaaagtaagtgtaattgtcaaaaaattattgaggaattgtcatttgtcttgaacatcttcacagatcacactaatgattcaacccccaaatccaccaaaatatccattcaaaaaaaattctctatttttgcaactcaatacacattttatttatattagtgctcgacgacgctccggcttgggctttgccccggattttcccacgctatcctcaaaaatgaaaatccggaccccgacgggtacactaatgtgtcatcgttttccataaatattatttgtctaatttatgtatttatttgacaattttttctccctgtgggtgattttttatgagtcgaaaatagccaaacaaatccattaaatatgcatgtgcaatcattcattcatcaattaatgtcaaattctttccatttttgttgtttatataattttgatcttttgcaatttatttttaaaaatattttagtctttttttcatcaacactaattagttaattggtcctaattatgcttctctgcctcctgttgtaagttctgtccctcactgtctgtctgtcttctctattcatagtttttaatcaaattcccagt

SEQ ID NO: 190 - DNA, 1048 bp, Heterodera glycines
aaaaaaaaaaaaggtaaaaccctaaaaatatcatccctagtgatcagtgatcactccagagcaaatttttgccgattttaaagcattttttggcatatgcttctatttaaaaatttcatcaaagcatttttctagggttgagcggtacggtactggtactgaaaaaacggtacaactgagtacctagtacccgttttgaccgttaccggtactagtaccggttttcccagccaaaaagtaccggtttttaacccgaaaattaccggtacaggtttttttttacaattaacgattaccgctcaactctacatttttctcataatttcaatactccgcctctattttcgtctatattgatactcagcaaatattttctatatgaaaatattttaaatatacaaaaatacgatgatctctaatttaatccatttaaaatttttacaaaaatgattttttcagtttggtttcctaactccatcaaatagttttgttatttttttagttttattgtttttttaactttatccttatgcttcttttttattttaatctgcattctatgatttctatttggcgattcccgaaaaaaatatcgatattaatagggtgaggatttttaggggcgaaaatgtccaaaatagggacctaaaaaggagcaaaaaattcgtgaaataggggcgaaaaagttccaaattttgggatatcattttttaaattgcagttttttatatgaaaataatttcaaattaagggaaacaattttattcactaattgcagttacaaataagatatattttagaaagttttttcatttcttatgggtctatttttgaaaaatttagtgtcgattcttaggggtatatttttctgaaaattttttggatcgattcttaggggtgtatttttcgtttttattgcatttttgttaataaattttggagaaaaagccaaaataggggtaaaaacatattttaggggcgaacactcaaaatatggatttctaggggtcggataggggcgttaaaacgaagaatttccgaacaagaa

SEQ ID NO: 191 - DNA, 2183 bp, Heterodera glycines
  unsure (1)..(2183): unsure at all n locations
ataaacaaaatcctttagaattaaaatatctcttgaagtgctgcggcctttttcgccttctttttgcacacatagccacctattttcgccatggcacagtcatagtcggcccaaccgatgcccttcgataaaaattaattaaaaattttcagcaaatgaatgaaaacttccggatttttccgcaagaattttctcgagaaattaaatgtttaatgatgctttttagttatattttcaaaaataaaaaataaatcgaaaaaaattcttgataagcggcgggtggaaaactgtaattttagaatgaaaattattaaaacttactgaattggtcaacaacatgaacacacaattgctttcggggctgtcctgtttcggacgatgttcgggcgtgtaccacggcgtacggtcggcaactttgaggggattaccgtagtgtgtgttggtgccgtctgaccatttggcactcaaaattgtgccattgctcgcgcgagtcaaactcatgccaatccaatagccatcgtaagtgtacgagtcacaacaccacggtacattgtccttttggcattgggcgtacgattttcgaacaagttctaagtacagaaaaaaaaaaaattaaatctgaagttggggtaggatttttgcccgatatgtcgggtgaggggcaaggcatagggattcgggattggatgtcagaaattaaatttacttgtcttaaattcagacaatatttttggactcatctgctgttaaggtcaggtcggaccgacgccatcttgtgcagacatttgtgccccggacaattgtcctatgtccaaaatcgggttaaaacaagttttttccagtccctgatagcctaaacaacattaaaattaagaaaaccacaggtcttctagtttattaggggcattaattctgttgtttgaataatgatgatttttcaaaaatttgctgtctatcaaatgatcatacccaattaattcaatcacctntatttaatgctgtttaggttattagggattgaaaaaacttaagttagaacccaattttggacataggcgcaaatgtccgggataacctctgccgtcgttaaccttgaacaaactgattctcaaacgagctgtgcagtgaagccaaatttgcacccaatgcttcacaacgtgatttggcatcttttgaattggcaaaattttctgcgccatgtgagccataaaaagtgaaaacctatacaaaaaaaaatttctgaataataaaacacactaaaaagttgcaaccttaaaacaatttattccaatttttgaccatccttcctcacaagaaaatctttttgcggaagtcattgagcagcagcagccaattagggcaaaaagaattgaaaagtattttaaaaacatttgttatttatatattttattttttattttcctaaaaataagcgcaccttttatatttgtaaattcagagaaatggaaaaattaattatttatttcaacaattggtttacacattttttatgttattcatttatttttgtcattcttttattccttcaaactaattgcttctctgactttttcttttgttattttgctttaatgaaaaattattttataaataattaaataaataaaaattaaatttttatttttggcgtcctttttcgagttataatgcacaattttttccgcatcaaattttttggcattgttcatatttttgttccaaaactttctgtcctgctggtgcatcatcgattctctcatccgttgataaataacattcaaaaagtgccttcggccaaaatgccaatagaaagcagcactttggtgccacttttttttgttcgcccctacggcatggagtgaggaccacttcgttctctttcccagggggccactccattctttctatccaatgattcggcggcacattcttcattttcccccaaattttcgtgtgacgttcgctcaaacttacactttctttaagttactcacaaaaaaggatttttgagagcggacgaatgagccccaagaaagggactgaaaaattctctcctccatgagaaaaagctgttaaaaattttgtacatttatccgtctgcactttatgtaaagactcctataaataaatacgtcaatggatgaaaatccattagtggacaatacaatataattagggtgaga

SEQ ID NO: 192 - DNA, 4119 bp, Heterodera glycines
ataataaaacacactaaaaatttgcaaccttaaaacaatttattccatgttttgaccatccttcctcacaagaaaatccttttgcgcaagtcaaagagcagcagccaattagggcaaaaataattgaaaaatattttaaaaacatttgttatttatatattttattttttattttcctaaaaataagcgcaccttttatatttgtaaattcagagaaatggaaaaattaattatttatttcaacaattggattacacattttatatgttatatatttatttttgtcattcttttattccttcaaactaattgtttctttgatattttcttttgttgttttgctttaatgaaaaattattttataaataattaaataaataaaaattaaatttttatattttggcgtcccttttctatttggttaatgcacatttttttccgcttcaaaatttttttggcattgttcatattcttgttcccaaactttctgtcctgctggtgcatcgattctctcatccgttgataaataacattcaaaaagtgccttcggccaaaatgccaatagaaagcagcactttggtgccacttttttttgttcgcccctacggcatggagtgaggaccacttcgttctctttcccagggggccactccattctttctatccaatgaaggatttttgagagcggacgaatgagccccaagaaagggactgaaaaattctctcctccatgagaaaaagctgttaaaaattttgtacatttatccgtctgctgcactttatgtaaagactcctataaatacatacgtcaatggatgaaaatccattagtggacaatacaatataattagggtgagaacccaatgcctgcgaacatttttttcaagaaagaaattaaatgagatttttcccatttacaggaattttttcaataattttcatataaaataacaattttattcatagcaactttgatttttttttaatttattaactttcgccatttttgctttattccatgtttttgactatttttgggaattttataagaaaattgcaataaaataaaacgaaaattacatcgcctttttgaaattttcaaaaaatataccatcaaaattcgaaagtttgagtttcatggaaggagacataaaaaatttcaaaatctataaatttaatatgacattttatggttgtttaaaatatgttttttaaaattatattttggttaatattggttatttttgtatttttattttatttcctttttttagtccacgcttaatccacatttggcgtttttttctatacatacaacgcattgcctttttgttttctgaaagtgtccaagaatttttaacacagcctgctattaagtatagtccttttcttcataatatactaagaaatggatataatgtaaagcctcgggtgggaattgaacccactcctccaccaaatccttgcgtaactctaccattgagctaatgatgcacttccggctttttctttgggatcttatcaacccaccgctttccgctttttaaccacccagtcagcttcttccttgcaatatctcgcatttttaataataaaaaaagaattttattgacggattatccgctgatccattttccggacatccccacacattaacgcgacttgtgatgttcgctgttcaatgtgtcaaatttcgctttcaacaaaccgcggatgggatggaacttttgaattacatttctctttctgctgaatgtacatttttatatgtgtgtgtatacatcaacaacaggaagcagcttaaaacccctcgggcgacaaaattaccaattgaattgccaacgcttttccgccgcccgcgaaaaatgtgccgccctccccgcggggcaaataaaatattttgtcgtatcttttcggcttttcttttttttttcccccgtcagcattattcattcttcacacgaggtcaataaagcttacacatgtccgtccatccaacccattgaaatagccacagaaaagcaaagcaaacaatgaatgaataggccggccatttggggaaagggccaaaacaaaattatttttatacgtgagacatttagtttagatttttaatttaacgtccatagtggtaaaattaagaaactatctaacaataatttttcccataaccaattttaataatattagttcatgtcacgtaggtttctctaccccataaatctcctaagttttcaaaaaagatataaacataaattttgaaaccttaagttttcgattttttgattataactttttttttagtttttacaatttgttggaattttataagtatcccagtttgagaattcctaaagatctattcgaatgataccaagaatataattggctttttatcctttatttgttagtggaattaatgatacgacctacacatttttcgctcaaaaactggccttaaattgtacagaaatgtgttcgttaaaaatgtgtcatcatcgcccggctcccggtaaattggacaccgaatattggacaccagaaaattggacacaaatggaaatttggagaccggaaaattggacattattggatataaaataaattaaaaataaataaacaaaaattttggttttgctaaaagattttattttagtctgcacatccctgtgtttttataagcctaataaaatggcaataaataaggtttttattattgtaacatcaggagaagaaagccaccataacattcataaagaaagaaacaaagttttattttagataagattgccattttttatgcaagtttagcacattgactaatcatcgcccattttcgtgcatgttttggcattttttgctgttgttaagctacttttcgagttattatgcctattttggggggttttttagagcctaaagcctacctatttaggcggtttttagagcctaaaaattggaaccctattgatcaatcatcgtgcatgttgaatgcctgatttagtctaagtgccttaattcattaatccatttacccttcataaatttatttttcaccccaattcctggctttattttaggaacttggtgtccagttttccggtgtccaattttccttcggtgtccaaaattccaacggtgtccagttttccgcttggtgtccaattttctggtgtccaatttaccggtcccctcatcgccctccctctgtcgcgaaagcgacgagagaaaaaggatgggctttggatggccgggattgttcccggcggactgaaggaagcagggggcccgatgccaaacagtgattaatttatgatcacccccaccatttttgcttccttttcccttccttttgcttctcagcatttctcatttgcatttttgttcccccgctcactttcatttcaaatgttttcctttgttgccccgccgcggggcatctgctctccgatcgcttctttgtcccaattttgcccgttttttctccccattcatttcaattcattttgtaccttgggtcccaatgtcatcgggcaagtgttcttcccaactttgtccccgtccaaaatgcccattcacgtgatttgcatttctcattgcccggcctatttaacccccgccggtaatctcccaggcgcgtcccttcttcagttggcccccttcattcgtcgcttcttcattcgttcctccttcggtcttcccccatttcattcgtccttcccttcacttcgtctctcccttctgtccactcttccgttttcttcggttgccttttttttgctccctcttatcacattttcttccaaatattgtgcccttcccttcggcaataaatatttgtgtgtttgtccatctcctttggacagaggaaaattgcccttccctttgggcaatcaccaaatatcggagtcgggactcatcccggcaggcaattgggaggttcactcactccttaactgagtggtggtgccgttacatcacccccattttgtcagccctccccattctcctttctcggccccccttgggcattcaattcggaaaggggtcgacaaagccgagaaggagggcaaaaggaaccggcgatcacccctccattgatcgccagctttttcgaca

SEQ ID NO: 193 - DNA, 1194 bp, Heterodera glycines
  unsure (1)..(1194): unsure at all n locations
tggtcgatggtccatccncggtttttccatcccaccccccccccccccccccttcattagagcctccaccctcctctgacaaatgagggggggggaggtttaaatagagggtctcgggggctctattagaaaaagacctatttttccacttttctcaataaaaaagcattcattttttgcccctgccgcttatcccaattcccagtggatatggatttgctgagatgataatatccaataccaataattttattttttcgttctcccactttccatcatggcattttccgtctttttcatattttctaataaataatgaaaataaattaataatcaaattaacaaaaatttgtttccgcaaaagtgcctcttttgtcttaatggataaaattttattctttttcatgaattttgttttccactccgtgcgccaatgaaataattaatggctttctcatctgctgcttctaccttttctatgccgtctttcgcgcgtctgttggcattttgccaagcgacaacagagacttaaggaataataaatttgctttttttcctttcgtctcctaaggcaacactaaatgagggcgatgaatggccgtcttggtaaccttgtccggtctccgctggcgcggaataagtacagaatttaaaaaaaaattaaacaaaaaattaagggcccggttcaggcaggctttcgttttagaaaaaaaaatttggatttatttgaattggtgtagccaggggcatggaatttaggggttctatagcgggattgccgcgagtcaagggaaaaacggtacgcgaatagaccgaacaagttcgggtcgggaaaaagctgggtttcaggtctcgggatcggacgacggcatcacatttctttagcctactctccaaccctgaaaatggaagactagttccctatgattatgggtattttgggaattttctgccgaaaagccgggatttaggtctcgggatcggacggcggcttcccttttctatagcctagccaccctccaaccctcaaaaatggacgattagttccatattattatgggcatttttttgaattttctgccgaatatatcatttgacagtatacatatttcagaaatagaacggaaggaaccccataataaaaaaaaacatattgttcagatatctgaataatgntgaagcaaaaatgcaacg

SEQ ID NO: 194 - DNA, 2531 bp, Heterodera glycines
  unsure (1)..(2531): unsure at all n locations
aaaattaatatttatgtttttaagtgtttttaaaaaggcttaattttcaaagtttaaaaaatttaaatatttttgtaaatattttatttataaaattccaaaaaatatattttttaatttatgaatattaacatttttgcatttctcattaaaataaaaatttaaataaataaaaatcctcaccctattcatttataataaatagagaataataaatcaaaatatttgttgctttttttcttttgtctgttcaattattggggctctcaatttgccacaaaaacttttccagtccatttcgctgctgtgtctctttttggcactgattgtggccacaattgctctgttcactgatctgtcctcgttctatcgtctgttgaatgtggtgccgttcaatgagttccctggccaaacaacagtggcattttctgccgaaacatcggcccgtgtgtacacatttgttggcctctattttggcacatttttattcgaatgctggtccatccgcattatttacaactgtaataggtcggttggcaccagggctgcacgcaagtggatttacaattacggaaatccgcaatccgcaattgcggcgattttctcagttgcggaaatccgcaatccgcaattacgggtgtccaaaaaccccgcaatttccgtaatttccgtaatccgcaatccgcaattaaaaaaaaatttttttaaataattttaaattttattttaaaaaatcctataaatcttttaaagcaatttaaaagcatattaaaaagcaaatttataaaagcaaaatcattcaattgagaaaccggttaaaagcaaattgtgatgaagaaacaaaagttttgcaagattttctggtaataaactctttcgcaagtcatctgaaattagaccggccgttgagaaaagcctctcactttctgaacttgttgcaggtggagaaagaaatttccgtacaacgtcaccaatcattggccatttttgtgaattgacttcccagtataatgatggatcggccctggatttaatttttggatcccgcaaatattcatttacttcaacttcggctttttgtcttgtctccaaggcagatggactgggggatgttgccttaaattaattattatgaggggtatataaagtttatttacagtattcagtatttgctcaaattctgcgtccttttcaaaacgagaaaaaatatccccagccgaacttgaaccactgcagtctcttacgtcaatttgtaaatcaatttcctaaaaaaattaagttacaaaaatagaaaaaataaaatcacatcagtctttgcatggtaactctcaacttcacttatcaaccagtctttgtactgattcagccgactgctgtcaaggtaaatggtcttaaaacgtgggtccaaaatagttgcaagaactaggtttttttgttcttcggcttgtttaagccgcaattcgatggcattcgcaattgttttcttaatatttgaaaaacgattgtccttgtcctcacgtagaccgaaagaaattgcctaaattttctaataaataggaaaaaaattaacgctaactttaaaaagtggaatgataattgagcatgaagaacttctgttttgtaaaagaatggttgcctcgtaaatgggagaaagtacgcttttaattgatgacaaaagcagccaatcatcagcgttaaattttggaagctcgcaatgatcaattgaaaacaaattcaccgcagatctgtttctgataaaacgttcaatcattttatacgaactattccagcgcacctgaaattgattgcctttataagaatggtgaaatatagaagaacagcacctcgacatttttaatcaaaactgttggtggtacttcctccttttgttggagttcagcgagttgttccgtcaatactcttgattttcgcacctttcgtacaaatcttttgacattttccaaaagattttttaaacgctcttcctcttcaattgacctcagtccctctttaatgcactaaaatccttgtttttaatatttaattaaattattttgtcagaccaattgcaaaacatgcgctgcgcaatccactgacacaaaacccaagtccttgccaacctttttcatcgtattttctgtatcacgcgtcaaggccgaaattttctcctcttgaatttgaaaatcatttaatgcttctctaataaatgccacaattgcttcagctgtgtgtcgccctgaaaaataaaatgttcgaactctgactatattaaaaaccttttattggtttggtgctcaaaacaaaaaattttggcttgaatttttggtccaaaaaatgcccagtaactgaaatcaaagaatggcgattatcctttgaagtccacccatcagagttaaagcgatttttttaactgacagaaattcatcagtgactattttctaaattttagaattatgaaagcgcaaatttgattattactttcatcgcttcaaaacaatttggcaattcatattgagcgaaantgattgcgc

SEQ ID NO: 195 - DNA, 3342 bp, Heterodera glycines
gaactattccagcgcacctgaaattgattgcctttatatagaatggtgaaatatagaagaacagcacctcgacatttttaatcaaaactgttggtggtacttcctccttttgttggagttcagcgagttgttccgtcaatactcttgattttcgcacctttcgtacaaatcttttgacattttccaaaagattttttaaacgctcttcctcttcaattgacctcagtccctctttaatgcactaaaatccttttttaatatttaattaaattattttgtcagaccaattgcaaaacatgcgctgcgcaatccactgacacaaaacccaagtccttgccaacctttttcatcgtattttctgtatcacgcgtcaaggccgaaattttctcctcttgaatttgaaaatcatttaatgcttctctaataaatgccacaattgcttcagctgtgtgtcgccctgaaaaataaaatgttcgaactctgactatattaaaaaccttttattggtttggtgctcaaaacaaaaaattttggcttgaatttttggtccaaaaaatgcccagtaactgaaatcaaagaatggcgattatcctttgaagtccacccatcagcagtcaaagcgattttgttaactgacagaaattcatcagttactattttctaaattttagaattatgaaagcgcaaatttgattattactttcatcgcttcaaaacaatttggcagttcatattgagcgaaatgattgcgccgaggaattttgtattttggctgtaattttccaacgaattgtcgaaatccaacaccgtcaacgagattaaatggcagtaattgagtggccagcatttccattagtgctcgatttgcgccaattgttgcgtctccgtccgtgctccactggccttaatcaaaatgtaataacgcatagaaaaaaaaatcagatcatactttttgcatttagcccaattaaaataggtgattttgatgaaatcggcgcttccttttcttcgtcatcagtaatttgttgacttgaaccacaaaatgcatttgcaaaagccctttttaatgggtttattccactttgtcccttcttttctgttttttgcttctctgcttgaacaaaatcttcacgctgtttgtaaagttcagggtggtgatttttgaggtgaaaagtcagtacagttgtactgagagaagcatttaatgtctttgagtaggaacatccatcggctttacatttagcagttgctttgccttgacgctcaaaataataccaccaattaccaggatttaagtttgacatttttaaattgctaaagaaataagaatttaaacaaatgtacatattttctttaaataaaaatagaaaaaaattcattttataaaaaataatcttacaagaaatcgtctcgaaaaataatccaatagtcaaattacggatcaaaattgcggataaatcccaaaaatccgcaacccgcaatccgcaattacgggggtccaaaaaccccgcaatttccgtaatccgcaatccgcaatccgcaattgcgtgcagccctggttggcacctctttttttattttggcgccgcgcaaaaaaaccaaagacgtcgccagattcttagcttcgatggatttttttgctctttggtttcacttagtttttctggcgctttttcacaacatgaagggatagttttgataggaaaatttttaaattcatagctcaccaagaaatcatcatttgtacatttttcaggccaagtttaaaaaatttaagccaatttgcacctccggcgaaaatttttgggaattctaacgaactttttaagaataacattttttattaaaaattttttcgaggaaaaatttttatggaattctcgcaacaccttttaaataaattcctataagatacacaaggaaagaaattatattttaaggtatttttatgagcggcggaggtacatggagtactgtctcgcctacagtactcctctaaaaactttgtacagtgcgcggtgacagacagcgaggaaaagcgacaaaaaaagtaccgggaaaattcggatttttgaacagggatttgttggccaaccaatcactcactgtgtgtaaattgtcattcttttgcatcatagaaaattttcatttctaaatttgtcttaatcacacataaaatttttccaattaggtaaattcatttatttttgtataggttaaattaattaaaacctcacgcttttttatgttttactcattttgccatccattttgataataaatttttttataccgaaatataaaagagaaaacgcttttataaaggaaatgtttaaattaataataataaagtcgcgaaaagtcaaaaatatgcattttcaaatcgcgataaatgagtcatagagcaatttctggcaaatgaaatacctattcggcataacaaagcccccctccccccccccaaaaaaaatagccttttgcctaaaattaccggctttgccactaataataaaattaactgtctatgcctgtttatgcaccgtctacaaaaatgtgagtgatatacagtatacatatgatatgattacacaaaaatttaaacatagtccttctttgtcggtctaagctcgcatgcttcaattatctaaaaaggcaaaaaaaaatcattgataaattgagaaatcaattggcaaaacgcggagtggacaaaatgccacctgacaaatagcaaaccaaaaaaaaaattattattcaaaagaggaccaaagcttttttttgccgccacatttgccatataaccttttttgtaattaacgaatcgttcgttcattgacatttgggggcagtgatatatatatttttttttgggtgggtaagtgaccggcactaattgacctccactaaaattgtccttgcccgtcgacgataccattgtctgttgagatgccgccgtcccattactgctgcttacattaccgccctcctcctcccgctccggccgtaattgtggcggcgtttgccgattgttgttgctgttttgttgtgccatgcccgccggcgtcgtcgccttttgtccaccaccgccgccgcgttcactgcgaacactgccgccgccagcggaggacgcgttgcggcgcattttgttgcgccgcaacaccaacacatttgcggtgcgtaaaaacaactctttgaaggtcggattgagccatgcgtacagaattgggttggccacgttggttgtcatcgccaagctgtaaaagggccagggaatgaatgaataatgccacttgaccagcaacagcagcagggggtcaacacacttacaaacgatattaggggggg

SEQ ID NO: 196 - DNA, 1777 bp, Heterodera glycines
  unsure (1)..(1777): unsure at all n locations
atcattcgaaagctctttagatgctctattagcctgcaaaattccaaaaaatttcgtcaagttcaaaaaaagttcgagccaaaaaagttggaaaatttggttttttgaattcttctggccataacttttttgaaccttaacgaaatttttcgaaattttgcaggctaatagaggatacatagggctatcgaatgacaccaacaatgttggatttggttggcaaagaaaaaaaaagttatagtccaaaaacatgtgttcgtacgaaaacggcccgtacgaaaacgaccccgacccataattaagggaggaaaacgacaattttttaaattatgattatagatatgtttcgggaatgcagtaaaaatgaaaattataaactcctaaaaattggaaaatttcaaaaattgatcccaattaaaaaattttaagtttttagatcagttacatattatttgatccttttttgtcactatttagtaaactatttgggattttttgtaacttaaacccgcactttggcaataattatttgccctttttaatttgattgacattttttttttaattttcacacctgtgagtgaccatcgataagaaatatgtgtagttgatcccgtccctatgcagcagttgctcgtcatattcgataaccatttcgcgaatctttaaggaaacttattttgatgaaatgcgcctaattatgttgtctaattagtatatctcggcattttgaaaaaaagcctagatcttgaaaagtgactaattaaaaataggcaattaaatttagttaaaaaatgaaattttaaattttaatggcagcggcaacaaatattggcatatgctttagaaataaataaaattaataaattatttaattagacaatttaaaattgtcacatttacattatggggaagccaagcaaagaagaagaatagcacaatggtgaccaagattaaggttgtccgacgttgttgtttgttcactgcattcacacgatgtgcccgattgtcggaccgggacggcacacagctcaaaccgtcgtcaacactttggcatttttctccattgcttcctccttccgaaaactgctaaataagaattaacttttttaaaaatctaattaaaaatgtatttttcatttaatttatggttttataggcagcgtgacgctatttgaaagtggctattttcgaattttataaaaaccatgggagggacactttttaaaagcaccagcggcggcgtcaattttataattaaattgttattattttaattaaaataaaagctgtcttgaatttgatttaaataattcaataattaaaaaatgatcaaacggaccacattcgatgagttgatcaacattttttggcgttcatttaattgttgaatttttgtgttggcacggcgcctaagcagcgcaaaaatggatgcataacagaaggacattgtgacaaatgggatcaaaaactgcaacaccaccacactgagtgaatagccgcgacgaatttgcatgcttggccattgttcagtacaaaacttaaaaattttaggacaatattaatgagaactttaaacacatgaattttaggggaaaaaaatccggacccattttattaatttgattaaataaaatttaatttttaaattcaggatttttcggaatcgatttcagcagttttttgaatttgttcaaaaaggtacattttaaaaaaattggattttccgaaactttagtagggcagttatttaatgaaaacccangattttataaga

SEQ ID NO: 197 - DNA, 3141 bp, Heterodera glycines
agattaaataaatttaaaaacacattattattattattaattagatatttttagaggtttataagcaattaattgaattttcaaacctttttttgattttaaaatgagtttcaaaaaatccaggtccaggcctggatccaggtcccgaggaacctggatttttcctggacctggattttcctggatttttgtccaggaaatccaggtccaggtccaacatggaatccaggtccaggtccaggtacaggcttttttcaaaatgtcgatctctagccattttccccgacccaaaatcaacgacggactaaaaggaacaggggcggggggggagggagaagttcaaggagtaagaacagtaaaatcggaaattaccgttactccggactcgtactttacttgtttccaagtgcgtactttattttctttcttttttttttgctttgaaaaatttcaagttactttatatttcaaatgaaaacggcggcacttggccccaaaaatttggcattctgtaagaactaatagtcaatgttaacctattttacgaattcttttttaaggagcaatttgtagggtccttttcttaaaaaagaagcaactaaaatgataattattagggctactcgagattctcggtctcagttcttgagtcaagaaatttctcggctttttgggctctaagtctcgtctctcggttttctcggtctcggtcctcgagaatcttggaaaatttgtactctcgatcagtcttaataattatttataaattacctgaaccatcggtaacagatggcaaatggccgagccaaacatcccactcccttgtaaatatatgagactggtgtgaacggcagtgacagcaggcacacaatgacgtcagagatggccaaattcaggatgaaaatgttttgaacactgcgcaactggcgacactgaaccgtgaccagaacaatggccaaattgccgagcaatccaagcacaaaaatgttgctgtacagccccagaaacagggcaattgcccactgcgaattgctggggtccggctgttggtcaacatagtgaaggcattgctgtcgctcctgtaggatggaataattaaaattaattggccaggaacctcctcgatctttcagtattgtttttttttgggcggaggacgacaggtgtcagggaaataaatgccttgaaaatagggaattgagggcgtgagacaatgatgccgagtcccactgtgaaaagccgggctctgagctagttaaaaagatcaaggtgccaatttgatccatgccagtttatttaggcacttttcggttatgggctcacagatttttttaaaaggcaagaaaaagggcgctgagtgtgcaaaaaaaaagagtcaatgggaactcgtacaaaagacaactcgtattttacaaaaatatagcccaagcttaagcttaggcccaagcctaagccttggtctagcctaagcaattgtacaagttgccttttgaagaagcggaacgtggaaccatttagtggaattttaacaccagatacaataattacttttatgcctcctaaatagattttttacgtttgcaccctcatttgtcagcgtcatttgttttctttttttttacaaattaatttttaaattcctatgtttattagttataaaatatttattaatttatttatatttttgtttcattttttaaataattttttattgcctgccgctgtggctgatcaacatttggccctattgtgtgttgaacagctatcaaagaaggcgataactgcgtggcatcgatattagaaaacatttccatgtctcctccactgatttgatttaatcttgaagaaacatgcataaattgtctctctcaattatggactcgaatttgcggacaattaaaattttatcagaaattaggaaaggttgtggaatttttttggaaattcatacaacagaaaattgtgacatgagaatgatgtcagcaaataattaaaattttttaaacaaatcatcttattaatttaaattttattgagagcatgcgaattgagagccatgaaaaaattgaagaaacattaataatctcattgtcagacagattattttggcaggtgaaacacatattatttgtcttattatttaataaaattgaataataactattttatggcacaaaatttttgagccaggaaatttccctaattaaaatgcttaatgaaatctcaattctgtttaatgaagcagctagagaagaattgagcacaaatatttgcctatgtggcaatttaagacaaaatctgtaatgaagattttgttgttttttaatgtagaaaatttttgaacatttaattcagaaggaagaagaaaatattatcgaaactatttttggggggcttttaggtcataaagcgaatgcataaaagcccataatgtttatgttctgtgctaatgaataaccgattatggcaaatgggggattaaaaatgcctttttcttaaaggaaatccatctttttggcgcaatatgagggaaaagagcttttactttaagtcatgagctcattaagtacgaacgaatcaatccttacaaaatttgggaattgagaaaaaaaaatggtgaggtaattaaatgttaaaccaaccttagttagaaatcatagcaaaaatttttacgcaatctaagaacaccataaaattggccttttccgtaaaaaataattatttttcatccaattttcttggaatttctaattaaatttggtgcaattctttgtgaattaatggtataaaattaatttcaaagtttaaatcaacaatatatcagcagaacagatatatttttatataaaattatttatatatttttttgttaatttatatattttttaaaatttttttaattaaagcataaattattggcttacgaatttttggcgctggtaaaattcatattttaccaattgtctttttacttttgtgagcagaaagccaatggacaacacaaattttcaaaagaaaaatttagaagaggacaaatttttgaagcgtaaacaaaattctttgctaaattatttttggaagcatttgctttaacaaaattagagtcagctcgctaggtttttaaaaattgaatgaattgtt

SEQ ID NO: 198 - DNA, 1073 bp, Heterodera glycines
agtatttttattaaatttcattttggccaaatgtataccgctttctaagaaattaatatttaggggccaggcaaataattgttagtgtttgcacaagggttaaatttcgtcacaaacataacaagattgcagacagaagggcagaggacagacattgtgaatgaaaatatttaagaaaatttggtttcccccccccccccccccataattatagcctagggcatgaaaaacaacttaattagtgccattatcataaacagactacggaatcatcactaatcgcttgtgttaatatatagaacatacctaaactaaaatttttcaatttcgatgcctttgcaaaatttggaaacatttcaggctttggatttgagaaaaaaaatattattaaaatgaaaaaaattgcctgttagaagtattagcagtaaattatgcttttttacgcttaaatttccatatcaaaattaaatgaaaaaatataaaaatttactaaaacatattttgataataaaaacataaaaattcaaatttatccttcaaaatgccaaaaattgtcataaatggttaaaatattacagcttaattaatcattagaaaattgcagcaaaaaattgtcatcttcgggacttcattaacatcattgttggcccacattgcgcaaaaatccctttttaatattgtgtgtgaattggggattaatcaatagaaaaagcccacgcaaatggcaaacaatgagtcaattatttttcctcttttttcaattcaaattttcaattgaagccaaaaattctaattctaaatgaaaaaagaaatatttattaacttgccaaaaaaattcaaaaaaaattttcaacctgctctaatttaaagttttttgttttcgaatattaattttaattaaaaaaagaaaatttcgccttattagggaggtaggttatatgcaaataattccgcaccggaaattaaatttctcaccaattcaattttgggtatgtgctttttttgttggcaccggctttcccgccactacgcggcacgacgccacttattcaaatcccttgaatttttttttt

SEQ ID NO: 199 - DNA, 1545 bp, Heterodera glycines
  unsure (1)..(1545): unsure at all n locations
agatttcaaaattatgcgtgcgtttttttacccccgaattttcaagtttttttatatttttctttttaaactgattntaataaacaatttaagctttttcctcctaaacaaattcattaaatatgtagttacgcaaatgctcaaacaaattcaaatataaaattggattttttgaactttttctttgcttattgtcaccaaaatgaaattcatacattagtgtcacacttctttgtgaatgtgatgacattttgtctgtttttttcggacaagaaaattaattttgtcacgcaaacaactaaaaagtcatttacgtcgtgtgtgacattctgcggcaatttgttgacacttttattttgcaatttccgggcaaaaaataaaagaaaaaataaattaaattaaattgggtgggtgagagggacaaaaaatcttttaaataaaaaaaattaatttgttttaaataaaaatgtcagtagagacattttgtcgaaagaccaattcaccactcataattatctgtcactaattagggcgtacactttatgtttgtgtattagtactgatattcatgagttggcacaagcaaaacaaacaattgcctggggcgacttaatcttcctctttcggacatgtatttttgtattttatggcagaattatgggtcaaccactcccccgccctcccggccccagcatcggataataattggtcaattaatggattaatgatgatggcgtcgatgagagagagagtgtgtattggcgagacggacgggttggagaagagagggattttgagtgcaattggcacagaaaaaagtggcaccggaaaaggtgccgtggcgaggaaggacggaatgggcatggacaaaccacataaaagcagcattgggggaactaacccatctccaagaagcccatcaaatgtaattaaggcatcacatagcaaaaataaaaaataaacaaaaaaaaatagaataaattgaaaatgatgaataaaatttaaaaagcggcttaaaattaattacttaaattttcaagtccaataaaaagaatttttcgaaattttaataaaatattaaagaggatataaaataaattttaaaattaattacttaattttagagaaatacaatttctatttaatttttcttagggtattaattttcaagtccaataaaaagaattttttcgaagaataaatggttgttctttaatacctttttgtacgatttgaaatggaagaaaacataatgccaaattagttccgctcaagtttgatttaaactgttcaattctcgccaattctcttccaatgcaaacaaattttagaaaattaagcctcctttgatcgaagaattttgccgaaataaaatttcttcttacatgattttactttttttttattttaaagatttatatgttaaaaatagagcctggcgagagcgggacggtgctatgacgatagtcaaaaaccatcataatgggcgttagtcaaaaacccaaacgagatgaaaattattttttgatataactttttcaaaag

SEQ ID NO: 200 - DNA, 3933 bp, Heterodera glycines
ttctattatcctacaaaatatcaaaatgtttcgttatcgatccaagaaagttaagactaaaaatgttcaaacaaacttggttttttgagcttctcaggtcataactttttttaaacttaaagaattttttaaaaattttgcaggataatataaaacacttagggctatcgaaaaatatctatattataaaatttgatccattttatgcgaaattatgaataattttctgtcaaaaatgattcatttgatggttttttgactaacgcccattttgatggtttttgactaacgtcccagcaccacatagactcccctcccccctcccgccggagttttgcgcgaatccaggtcccgttctccgaaaatttctgactcccgatcccactcccgcccgtcaatttttttaaaaactaaatctatatagtagtaaaaatatactgataagaattgaatttattcggtaaaattagcaataagacagttcttcaaaattcggattttatttgaaacaccccaccccactctatttttatgaactaattaattttttgtttgaaatacataccacccccccccctccccctgggactcccgttaaaaatctcgggctctacttaaaaacctacatacaaacatttattttatttttttattttattttaaatatcgagttttttggttttcacttttcagttgcagatgattgtttctcttcattactttcacatttttaccccttctattttttttaatttgaaaaagcaccttttttgatgtatgggtgggggtagaaaaactaaaactaggagattggcttttcattaaaaaacgcttattttattggccaatccatgtccatgtaaacagtatccaaatttttttatgttacattttaatgaaatgtccttaaattgctttataggtgtgttaataatattacatggattggcaaaaaaaaaatcaataaatttctggcaatttgcttaaaatctctgtctgctattcggcataaagaatttgccaatattttttgtttcccttttcttctgggcgtagcgtccccaattttcactggtcggaagcacaaaattggttccctaatgacaaattttacataaacccacataacatttaagcgaaaaatgacagctgctgtgccgtgccgtgccggcttttactgctggacaccaatttaaagaaaatgtttgtttacttgaggacgaaatttaaaaaagcgacaaaatggactattttttccaataataatttacattatttattattttatcgctcgctattctttatttattgatttttaatttattttaataataggcatttttggcattagagcagggatgtgtgatttgttatgatttatcagattttctgatttggagggttcaaatctgacaaaataaatgtcctgatttatctgataaaatattctgatttgggggtagtgactaaattttattttgatttcttaaacaggctcataattttgaaaatttatggcataatttcatttatctagaattttttaaattgaatgaaaatcggttttaagtgattttaaaaattttctgatttttgacccaaaaatctgatttttttgtagcccgaaattttgataaaataattccaatttttttaaatgaattttatatctaaaattaggtccaataagaaattttcttgtaatataaatgccattttgaaaggaaagaattaaacttttaaatgccatcaaattttcggcattttattttttgtttggtcccacattttttgttcagccggttcggctttgtcaatgcacatttggcggttagcaaaaatacgccatgcagcatgcagtcatcacaaagcaaaagcatcatggccgtactgctccaagactatgacaaagcatcgaacccaaccggtggagtcatagaggtgcaggcggaggtaaaatccaattgtttgggttactctttttgggcgcaggattatgggtgaaagaaaggcatgtcccaaggtcggcacatccgtttttaataaaagggccaaacatttaggatccaccagggtttggtcatctgctgattagattctgagggtcagatatgtcggaggcggataagttggtgtcgtggcttggcccaaaatttggtattctggagcgccctgggtaaaaccacagcaaggctgggcgaaatttcagattcgttacgtcagatttttaattttgaatttcgagttacaggttcgaaaatatttactttagtgtcgagtttgggttgctcgatgagttattttgatcagccctaatgaccagacagagaatgtgcctattcgggaattacttccgccctaataaaaatcaattaatctctctaatcccattgaacagataaccgtgcaggatattagctcattatccgagacgagttcctcctttgtcgttgatttgtggttctcccaaatttggtctgatcctcgtctcgtctactcccatctgtcgtgcaaatccaacctatcgcttgatgagtcgttggcacaacaattgtggaccccaaatttatgctttattaacagccatgacacttacatacactcgtgggtttttccagtcaattaattagcgcattgataacccaaaaatatggtattagttagctcttgggcaaatattttaaaaagcgtaacagctttcttgatcagtgtaaaagggaattgcagttttactgaatttgtatgtactccccaggaagtaaaccccatgaaaatgggaaatactacttcagggaaaggggggggggcggatacgaattcaggtaaatacggtatattatgactggggatgggatttttaggtaagaaaaatcccagaataggtacttaaataggtaaaaaaaaatctcaaaataggtattaaataggtacaaaaattccaaaataggtaccaaaataggtaaataaaattttttattaacgatttttagtggaaaaaagcaaacaaaaggggaaaatgttggttctatttctttgtaaacgaataatttaaatatttttaatatgttcttagaaaacattgacattttaaattaaaaattttgttacataaaaaaacaaataaatttttgggaaaaattttccaattcttaggggtgtattttttgattttattgcatttttgttaaggaattttctgaaaatccttaaataggtataataggtagaaaaactccaaaataggtaaaaataggtattataaaagtcatcgtagacacccaaaaccaagtggaaaatgcttttttcgtgcttatctgtgcgtattaaatgcgcaaaattttaggtatttaactaaaattcgcatccctaattatgactggggatgggatttttaggctctaaaaactgtcaaaataggtaggctctaggctctaaaaaaaccccaaaataggctctaaaaaatggaaaataggcactaaaaaccctcatttttagggggtgtaaaatgacaaaatgtattcaaaaaaaaaagtaaaaaaattaggccaaatcaatattgagataaataatttttaaatcacattcctgtcaagaaaataaataaataaataaattttggagatgaatttttgaaaatttttcatttcttaggggtgtatttttgaaaattttgggtcgattcttaggggtgtatttttcgtttttattgcactattattaacaaattttgggcaaaacgccaaaataggcaaaaataggttctttcaaaattttttaggctttttaggcgttaaaaataaacgcctagaaaataggcagtaataactcgaaaagtagcttaacaacagcccaaaaacacatgtttttcgtgcatttcaggccacggggagctcaggaaaaaatagccttttgcctaaaaatcccatccctaat

SEQ ID NO: 201 - DNA, 3982 bp, Heterodera glycines
ctggaggtcgtggaatgggcttgttattgggttttattgacaaaatctactgcgcgccggccagtacagaatgacgaaatccgtgcgacgctccgaagccacgacgacgggccaaacggcggacacaacggccaccgcatccggtggcatcgtacgtaattcgttttcggacgtcgtcgcaacggtagcggcggcggtaggggtcgtaccagcctaagccaacgaatgacctttaccataattatcgcttttaatcgccgcaaatcgacggcaagatcaaaagcgtgttttattttagcggagaaatagtggtttgaactcacaggttttggcttgtaaagtgaaaacttgaacaatagtaagtgatggaagcgagagttttcatgcttctgatacagtaccgataggtactgtaaaccaataattatcccgattttttcaccaaaaatcccgccggtccggtgcaaacagcgaaaaaatagaacaaaaccgcatacctaattagctaattaccaagtgatgcactttctaggaatggaccattcacaaacaataaaaatgattgtaatgatgaacatgcgctggacgccaatgtcggatattacacaacagtcaggactgaactggcgggccgatttcacgccggattggtgcgcaaaaaaactatttttattttcaaaatttattgtttcaagaaacaaattacctaatttcccgcctaattacccaccaggaaccgtcattcaatcgctacaaatatggcaaaatgggccacaaaattgacttcatttgtgccagagcattcccattaatttttgccggtttgaaaaaaaattctgttctattatacagtataccatttgttcagttttcaacgctgtttattgggcctactatctgagcagataaaattaagaatgatttgtttaataaaaaggcaataacattaataaattttaaataaatcaattaatttgtattatacttgcttcataagtgtccttatttctaagatagtaaattctggaaaagtattaataattttgtagcaaatttcaccaatcccattaataagtgaaatcatttttacaagttaagtgccctgttgaattttataaaattaacatgaaaatatatttgattaagatttttaattaaatttaatttttattaaaataaatctgttaaattttggcagaaaataaaatttgcatttacactttatacaactgatccattttctgacttttgtgtttgcgcttccatttcaatcaatcgtttgcttattgtcagcaagaacggggcttgcttaaaaaatgtttggcattatgttcccaaaattagtaggggtttttcttccataacttttccaccggtgccaaaataatcagcgatactcaaacactcattttccatacacacttgggcgagattttaaagtgctttgaatatcaaataaatgtgcaaaatataatgtctcggcgggtgggaatcgaacccatgccttccacctagcccgtggactgctctaccattgaactaccgaagcaaatcctcctttactctctcaagtagtctgtttacaaatcagcaccaaaactgctttttaccgaatctgttctagattgtggcacaaatgtgctggtgttgttgttgttgttgctgttgttgttcctgttggaactgctggcaacatcatggactgtcgttgtccgttgacattgtactggtacaatttcgtccatgcacgcatagattaggtcgtccaaaaaggcatcatcccccggtgccatgttgttctaatagcgtagaagattgggtattaaaatgaaaaaaaacataagaacaatgaaaatgaacgtcgctttacaatcactagaaatgtgtgggattcgcaattcatcgactcgagaatttcccgagtttttcggatcccagtctcggttcccgggatgatttcccggtattcgtttccgattcacgataagaatcaactataacgcccaatttagattagaaccttgtgatgctcaagctcaggttcaaaaaaatcgaaaaccaatcgttacgttatttcaaaaaaaacaccgtaccatcctctgcctatcattatactgctggtggtgctgctgctttaaactgttcattgctgctgccgctggtgttgtttgatgctgtttggctttgtgcattgacggaatttgttcgacaacgcccagcgcggcgagaaacgcgtccgccggcgcgcaactgtcttcactggccaacgagcgcgtgtctgaatcaacaatgcccgagtcgggcgctgaacgacgactcccattgccaatggttgccaggcgagaaggtgtccggtttggcacgttgacgtagttggacgcagcggaacgcgcggaggagggcactgcagaccgcgcatgatagtgaaagttgcttgacgtttcgcgcgcaggcttagcaccaggcggagacgttgtccgcttcacgtagctgaacagcccactttcaacggacggcgagaaaaatggcgctgcagatggtgcacctgcaccgttggtgttgcaatcagcagcactctcttttgtgtgccgttgaagttccctgaaaaagtgcataaagcagacccggaatcccggttcactttaaatttacctaaatgttaaaccgggtgcggaattccggcaccaaaaagtgcgtaatatggaaccggaatataggtcacttatacatttccggaatgcagtaagtgaatgcatgcagaattccggtgcgaaatgcggaaccggaattcggtttaattacataaatgcaaaaccgggtgcggaattccggtaccaaaaagtgcggaacactggtcacataaacttccggaataatgaaagtgaatgcagaattcaggtgcgaaatacggaaccggaatactgattaaatttccggaatgcggaaagtgaatgcagaattcggtgcgaaatgcggaaccggaattcggtttaatttactttacctaaatgcaaaaccgggtgcggaattctggtaccaaaaagtgcgtaatatggaaccggaatattggtcacttatacatttccggaatgcagtaagtgaatgcatgcagaattccggtgcgaaatgcggaaccggaattcggtttaattacttaaatgcaaaaccgggtgcggaattccggtaccaaaaagtgcggaacactggtcacataaacttccggaataatgaaagtgaatgcagaattcaggtgcgaaatatggaaccggaatactgattaaatttccggaatcggaaagagaatgcagaattccggtgcgaaattcggaaccggaatactggtcacttatacatttccggaatgcggaaagtgaatgcagaaattcggcacaaaatatgggaccggaacactggtcacataaatttccggaatgatgaaagtgaatgcagaattcggtgcgaaatgcggaaccggaatactggttacttagaaacccgataataatagagattaaattatttttttgtttgttaacatgcctgcatgtggccacgctaaacatccgcttttttggcgctgcagggcgtaaaaagttggaaatgcccgcgtttttggatgctgcggtgccttgagaacgcaaaagccgcgtgagtacgagcatagaaaggagacaaaagcacaggaaaagagttggaagcaccatcagactcaataggtcaaacgaactcaacaaggagtgatcatcaccagccaatgtcgggttgacagaagaaaagttgcccatctatgaggggatatgagaaaatagccagtcaacggaggtgccagttttggctgaaaaatccggcattatatctggactaatcgccggcaatttctttgacaatattattctgaaaattatatattttactttactaggaaaaaagctctaggaaagttagaaaacttaaaattttgaatttttttaaactttttacc

SEQ ID NO: 202 - DNA, 4324 bp, Heterodera glycines
ggggcgggtaacaaaaatttcggaaccaactcgataaaaaccttattgaaataaactcattaaatcaatttaaaaataaaattaaaactatttcatttctgtaagattgaccggaaaaataaagtcgaattattaattcattaaacaaaaagtgatttggtcattatttttatttttttattgacctcacattatattttattttttggggtctgagtgaaaaattagtgaagaaaattggagtcaaagggaaaaaaaaaaattaatatattctttaaaagtaacactgcccaagtgtgcaaatggcctaatggctagtctccttgactttcccttcttctttcccctggttcaatccctctacagaaattagattattttcaatttttttttttgtatacccatgggtttcctataaagaaaatatgattcctcatagttttttttaaattgatacatattttatcatttttaaatgaaaatcctaccaattgagcttaataatcgcaaaaaccaacctttttttgttgaaaatctgttaacaaattgcacccaaatttttaatatttccccccggcggcgcctatcggcaccgccggtccccctttcttcccaaaagttttttggaaaaagcgctccgaaaaaaagtgatgtgaaaagcaaatctgaatttctattaatattcgatgatttagtccaaaaatgattaattgtttgaaataattgaagaaaatttgtttgaaaattttcattaatttaatttattaaataaaaaaccaaataattttgtattattttcacttgatataaattaaaatttgaatttttttttaaatttttaaaatttttttgaatttttaaaatttcccggttggtcccggttcccggtttttcttgcggtcccggtcccggtcctgaaaaaaaatcgaggtcccggtcccggcttctcaggtcccggcaagtcccggtcccggttttggcaaaaattcccggtcccgtggcactctacttttttgtatgcaggatttattttgaatgacctccgaaaaagtctctcgcatgaaaatctcgaacggcttatttttattcatcataatattatcctttacaattttgtttattgataatatgggaattttctaattatgcttttacaaatgtgcgatccgcggcgttttttgcgcgatccgcgatccgcgaccgcggcaaattgaatccgcgatgcgcgatccgcgaccgcgggattttttttgcgcgatccgcgatccgcgaccgcggcaaattgaatccgcgatgcgcgatccgcgaccgcgggatttttctgtgcgcgccccacccctgcagtgcatgccatcattttggagatcaaatacgataattcaacccaaactttcatcaaatccgatccacatttgctgtccttcttttcagagatacttcccaatgtctttctacgacccttttgaacttgaagatgaacccgaggtttttgcggaggtggtcgttcgcatggtctggaggcttgtagtcaaccacggacttctgattgtattcgtctattgttgcttctctcttgggggcgttttgtttcgcaaaatttacctcgagggccttttttcctcatggagtgcgtttttctgaaaaacattcctccttcgttcgttttcagaagtgtggcaccaatactacgaaattctcagccaaatgaacgaacggcttgaggcgaattatgacgtcgaactgtgggagaacgcggaattctgtcgtaattacattaaggtgtctgtcgtttactatatgatatgtcggccaattcattcgctttcacccccccccccccccaattttattccttttcagtttttcgagtcctttcgtcgtttccgtgcgcgatgcgatcgcgaccataagggcgtttcgatcactgggaattggcgcaaagctaccgaagccgaaccattgcaggaattcttcgatgccgattacattttgcacgatcgtcttgtctatgcggttaaaggcgctgagggaattccacgggaaaacggtgaagaagcaaacggagaagagaaagaggaaaacaaggagggaaaagaagcaaacagagaagagaaagaggaaaacaaagaaggaaaagaagcgaatggagaggaaaaataagaggaaaagattttattctgtgactgcatgttatgtatgttaattttggcgctagttaaaaagttaccgattttgaattctatcaaaaacaaaacttcatgattgccaaacaaaagggggtaatactttggtttgttccccccccccctttttttttgagaaaataaattttttttaaagttgtataatatactttattatgggcttttcggggtcgctggtcacgacggatatgacattaatttcggtacttgtgggttatctgtgctcagattttcaaaattttttttttgagaataaacttgttttaggggtttccggggtcggaaaaaccgattctggcacctatattggcccaattcgaaccccaaacccggattcgaacaaaaaagtcaaaatccatttttcaaaaaaattcacattttatacacaaaattgagtcatggcctttttttggttatacgagtcgtcatcgtggcattttttggttatacgagtcgtcgtcgtggcattttttggttatacgagtcgtcgtcgtggcatgttttggttatacgagtcgtcgtcgtggcattttttggctatgcgagtcgtcttcgtggtatagtgaagcgattttgtgtataaaatgtgaattttttgaaaaatggatttttatttttttgttcgaatcctggttcggggttcgaattgggtgaaaatagatgtcagaatcggttttcccgaccctgaaacccttaaaacaagtatattttcaaaaaaatttttttttgaaaatctgtacaccgataaccgtaaagtaccaatgttcgtttctgacaacaaaaggctttatttatcatcccatgctcgctaagagggctttttttggattttttttataaatcctattcatatttccgtatttttttaaaaataaatccattttagcttttcatcgataaaattatatgatgaaaagcatagatttttgcagttttgaacataagcacaataaatacatacatattaatcaggaggaaattgggagtgtgttcagtatacaataagtgccgaaatgaatgcgtgggggtgaaaggacaaatggtgaattatatacaatataatgagcaaatagatcagcgtcatcggcacgatacaatataatgagtagggctgggatttttatgtgctaaaaatcctgaaatatgtaataaaatatgtgctaaaaaatgctgaaatatgtgctataagtaagcaaaaaaaaatgccaaaatatgtgcgaaaatatgtgctcaaaattggaaaaatcaagtgtatttttgcataaaaattccaaaaaactcattcttttcattttcgcccgcacaattgcaaataaaaaacatttggaggtgtttgggggtaaaattagtccttttttgataaattgttttaaagattatttttccatcagttgagtaagttccagcaagaaacttcgatatccagtaacgaattaatggagaatccgattttcggtacacgaaataaataaagaaaattttgaaagagcctataaaaatgtcaagaaagttgatttttaggggtgcatttttgaattttttgtgtttttcttagatatttttttcaaaaatgccaaaatatgtgcaaaatatgtgcgaaactccgaaatatgtgcgatatgtttttatgtgcgaaaacgccaaaatatgtgtttttatgtttttataagtcgctctaattcgaaaattgttcggagaaaatgttatttttgggcttctctcgccataactaagccgcagaaaaaatatgtaaaaacataaaaatcccagccctatttattacagtttgatcaacttcacctcatccatttgttgtttctctgctctattttgttgggcttcatctgtcaactttttaattggttttgtcaaaaatgccacttttttctcgttgttatgcgttgtagaagctttaagtgattttgaagatgacaattttcgcattggcacaatgcctaaaaggacaatatgcaaaattaaacatttaaaacaaggcaaagtttgataccattatttgtcatcggcaccgaagaatgcccccgaccaaatgcagttttatgaacgctggtgatggcacttggagaactgctgctggctgcattgccaatcagagttggcca

SEQ ID NO: 203 - DNA, 1257 bp, Heterodera glycines
attcgggttcggggttcgacataggtcaaaatttaatgtcgattaggatttctgatccttaaaacccctaatatgatattttctcttaaattttcgactttttttcatggttgccgaataaacaaaatatctaacgcaagaaatggaaattgcgaacattggacaattaaacacaacacaacaaatttatttttcggcggtgaaatttacagtatgatgagaacttacagtgtgtacaacacaatatacatacatatgtacaacagcgaatatacggcaacaacagattacaataattaatacaggcaaacatttaacatcaatcaatccaatttcctcataatatcacacatcggtacgccttgccggggtgaacgctgtcgatggcactacttcttcacaaaaatttccgcgtccaagttctgaagcgtcccgtagttcggatcggtcgctgaaaaggggattaaaaaggaattaaaatttgaaattttcgccatttttttcacttggtgtcagtgcctgtccgcctcctccatgtggcgccggtcccgcctttggtgccgctgccggttttgctggcgcgttcttcgtgaagatgtcggcgtccaagttcttgagggtcccgtagttcggatcagtcgctgaaatgggaaggaaaagcccgtaaaatttgaaaatgttcgccatttttttcacttggtgtcagtgcctgtccgccgcctccatgtggcgccggtcccgcctttggtgccgctgccggttttgctggcgcgttcttcgtgaagatgtcggcgtccaagttcttgagggtcccgtagttcggatcagtcgctgaaatgggaagtaaaagcccgtaaaattcgaaaatgttcgccatttttttcacttggtgtcagtgcctgtccgccgcctccatgtggcgccggtcccgcctttggtgccgctgccggttttgctggcgcattcttcgtgaagatgtcggcgtccaagttcttgagggtcccgtagttcggatcagtcgctgaaatgggaagtaaaagcccgtaaaattcgaaaatgttcgccatttttttcacttggtgtcagtgcctgtccgccgcctccatgtggcgccggtcccgcctttggtgccgctgccggttttgctggcgcgttcttcgtgaagatgtcggcgtccaagttcttgagggtcccgtagttcggatcagtcgctgaaatgggggggaaaggccaattaattgaaaatttcggcttttt

SEQ ID NO: 204 - DNA, 2845 bp, Heterodera glycines
gctgctgacttctgcgacatgtctcctccggcggctgacttctgcgacgcggtgctcagtgccgaggctcctccagcaggcgctgctgacttctgcgacatggctcctccggcggctgacttctgcgacgcggtgctcagtgccgaggctcctccagcaggcgctgctgacttctgcgacatggctcctccggcggctgacttctgcgacgcggctcctccagctgccggttttgctggcgcgttcttcgtgaagatgtcggcgtccaagttcttgagggtcacgtagttcgaatcagtcgctgaaaaggggatgaaaaagaattaaaattttaaaatttcgccattttttcacttggtgtctgtgccggtccgcctcctccatgtggcgcctgtcccgcctttggtgcctctgccggttttgctggcgcgttcttcgtgaagatgtcggcgtccaagttcttgagggtcccgtagttcgaatcagtagctgaaaggggatgaagaattaaaattttaaaatttcggcattttttcacttggtgtctgtgccggtccgcctcctccatgtggcgcctgtcccgcctttggtgccgctgccggttttgctggcgcgttcttcgtgaagatgtcggcgtccaagttcttgagggtcccgtagttcgaatcagtagctgaaaggggatgaagaattaaaattttaaaatttcgccattttttcacttggtgtctgtgccagtccgcctcctccatgtggcgcctgtcccgcctttggtgccgctgccggttttgctggcgcgttcttcgtgaagatgtcggcgtccaagttcttgagggtcccgtagttcgaatcagtagctgaaaggggatgaagaattaaaattttaaaatttcggcattttttcacttggtgtctgtgccggtccgcctcctccatgtggtgcctgtcccgcctttggtgccgctgccggctttaccggccgtccgcctccccactgcgaactcatgttcaggtaatccagaggaaaatcatatgtcaaattctgcgatgcggtgcccagtgccgatgttcctccagccggtgccgctgcggtcttctgcgatgcggtgctcagtgccgaggctcctccagcaggcgctgctgacttctgcgacatggctcctccggcggctgacttctgcgacgcggctcctccagctgccggttttgctggcgcgttcttcgtgaagatgtcggcgtccaagttcttgagggtcacgtagttcgaatcagtcgctgaaaaggggatgaaaaagaattaaaattttaaaatttcgccattttttcacttggtgtctgtgccggtccgcctcctccatgtggcgcctgtcccgcctttggtgccgctgccggttttgctggcgcgttcttcgtgaagatgtcggcgtccaagttcttgagggtcccgtagttcggatcagtcgctgaaatggggggaaaaggcaattaattgaagatttcagctttttcatttcacttggagtcattgccggtccgggcgcctgctgttgcggctgtggggctcccatcggtggcggtggcatgcctcctgaaatgggggaatttcaatggatttgcgattgcgccgtgccgttcgttcgtttccgacccccacctttcgcctgctgttccttcgcgaaaatttccttgtccaaaccgacaagcgttccgtagttcggctcggattctgaaatggggggaaaaagcaatgaatcatttgttcatttgtttacgtgggacgagttccttcgatgctgcgggaggcattggccccttcgccgaccctttgcccgatttcttctgcggtggcggcgcttttcctttgggcgacggcttcttagcggcggctgccggaggtcctgaaaaacaattagcattcttcttgaatcccaaaattgttcgcgttttgtgccacctttttttgcagcggcgcctttcttcggtgctggtccttaaagccggcaaatttgtttatttaaaaagtcgttcgttcgtccacctttttttgagccgccgcttttctctgacgatttcactgacgagggcgcttccgctgctcccggtggtccgcccactgccgatgtttgtggcgttggcaccgctgctccggctttgggctgaaaaaggaatgaattcatttgtgaaaaagggaggggtgatcaaaaaacggtggcacctttttcttcttggagccgccaccacagcattggctgaggatgatgaacacagcgccgatgacaaccagcagaagttgaacgggcagtaataagacgacggaggaggagaaagtcattattgttgggacgcaaattgtgttgggagggaggcaaaagtcaccgtttatatactcattttttgggcaattctgaagaatgggtgtctataattttcaaaaatttttttttaattttcggctcaaaaccagtttttaggggttttcgagggtgctgattacggatctgaactcggatttacctaattccgaataccggacactaattcgaacaaaaagttgaatgatttttttttcaagaatggatttattggggtaaaagcttctaattcatttaaataaaagttttgaatttttaagattatattatggattttaagggtcggagaatccggatctgacattaattttgatctatgtcgaaccccgaacccgaattcgagcaaaaagtctaaaattcaaattttactaattttgtatttttggtctaaaaatggcttacatacatattgagaaacaaacataaatggacaattcactaataaaaaatcatttcaaccatttagaccaaaa

SEQ ID NO: 205 - DNA, 5717 bp, Heterodera glycines
aatttttttagcgagaataccaatgaattttgaaaaaaatgttttctgaaacgaatgttttaatcttattttaacataatgactgaaattaaatttttctcacaaaacagtgccggattaattcttcccgatataatcaagttttttgttatttagcaaaaatgtcaaagtctttgaagggttgttaatggtgtcagtttaagaacatggcagccaattcacctatttttgaatcccggacccgaattcgaaccaaaagtcgaaattttgaagaaaaaatttgttgggacattaaagcagaaaagaaccatgaaaagacatttcgtttccgaatctaagctatcaaaaaatatttctcagccccagctacatcgactgaaagcgaacggcttttctccaccgctgggttgattgtgacagatctgaaaacgtttattgcctgagaatgtggacaaacttttatttttgcatcacaatctttaaatttatgattttgattatgaataaaatttttgggaaaaaattatttaaaaaaaatcggaatcgtaatcggaatcgcgattttgggccataatcgtaatcggttttaaaaccgtatcggatttttggccataatcggaatcggcgatttaatcggaatcggattttgtctggctcggcacatccctgttttgtaccattgccaactcatgcacccacacgttggactaccctatcaaaagtggtcagccggatgttagagaaatggcaccaattaaaagagctttttgcaatgccgaacaagccgcgtgttttacatgaattttttcaatcggaaaattctgaaccaatttgttactttttacaaaattgtgctcaactacattgatcgctggttccaactccaattactaccaaaaaatatttcatggacaaatttacaaaatcatcctttgaattatgcagaagttgtgcaacttgctgagcaaatttgtcccgaaatagcgcaattggatgaactgtttgatgaagtgtctgctgtgaaccaaacattggccgacattcccgaagaattttggctcaaatcagccgaatgcattcgtggaacgagttttttcactggcaagcattcaatggaccaaagaaagaaattcattggaagttgaatcggtgaaagcgctcttactggtgaaggtgaactttgatctctcgtgcgcggaaatgaggaaaatgatcagcggaaacaaaaaaatattggaaaaaatccattccggtgaaaaatacaaaccatttgaataaattaaccatttttcattgcatataatagaaattttaaatgtccttggatttcatgaattttccccactatgtccttgaaaatcggcatacccgtccttggaaacggaggatggacgatggcagccctgatttagaccaaaaataaaaaaattcgaattttgaattttcgactttttgctcgaattcgggttcggggttcgacataggtcaaaattaatgtcagattaggattctctgatccttaaaacccctaatatgatattttctcttaaattttcgactttttttcatggttgccgaataaacaaaatatctaacggaagaaatggaaattgcgaacattggacaattaaacacaacacaacaaatttatttttcggcggtgaaatttacagtatgatgagaacttacagtgtgtacaacacaatatacatacatatgtacaacagcgaatatacggcaacaacagattacaataattaatacaggcaaacatttaacatcaatcaatccaatttcctcataatatcacacatcggtacgccttgccggggtgaacgctgtcgatggcactacttcttcacaaaaatttccgcgtccaagttctgaagcgtcccgtagttcggatcggtcgctgaaaaggggattaaaaaggaattaaaatttgaaattttcgccatttttttcacttggtgtcagtgcctgtccgcctcctccatgtggcgccggtcccgcctttggtgccgctgccggttttgctggcgcgttcttcgtgaagatgtcggcgtccaagttcttgagggtcccgtagttcggatcagtcgctgaaatgggaaggaaaagcccgtaaaatttgaaaatgttcgccatttttttcacttggtgtcagtgcctgtccgccgcctccatgtggcgccggtcccgcctttggtgccgctgccggttttgctggcgcattcttcgtgaagatgtcggcgtccaaattcttaagcgttccatagttcggatcagttgctgaaatggggggaaaaggcaattaattgaagatttcagctttttcatttcacttggagtcattgccggtccgggcgcctgctgttgcggctgtggggctcccatcggtggcggtggcatgcctcctgaaatgggggaatttcaatggatttgcgattgcgccgtgccgttcgttcgtttccgacccccacctttcgcctgctgttccttcgcgaaaatttccttgtccaaaccgacaagcgttccgtagttcggctcggattctgaaatggggggaaaaagcaatgaatcatttgtctaagccatttcggattcatttgtttacgtgggacgagttccttcgatgctgcgggaggcattggccccttcgccgaccctttgcccgatttcttctgcggtggcggcgcttttcctttgggcgacggcttcttagcggcggctgccggaggtcctgaaaaacaattagcattcttcttgaatcccaaaattgttcgcgttttgtgccacctttttttgcagcggcgcctttcttcggtgctggtccttaaagccggcaaatttgtttatttaaaaagtcgttcgttcgtccacctttttttgagccgccgcttttctctgacgatttcactgacgagggcgcttccgctgctcccggtggtccgcccactgccgatgtttgtggcgttggcaccgctgctccggctttgggctgaaaaaggaatgaattcatttgtgaaaaagggaggggtgatcaaaaaacggtggcacctttttcttcttggagccgccaccacagcattggctgaggatgatgaacacagcgccgatgacaaccagcagaagttgaacgggcagtaataagacgacggaggaggagaaagtcattattgttgggacgcaaattgtgttgggagggaggcaaaagtcaccgtttatatactcattttttgggcaattctgaagaatgggtgtctataattttcaaaaatttttttttaattttcggctcaaaaccagtttttgggttttcgagggtgctgattacggatctgaactcggatttacctaattccgaataccggacactaattcgaacaaaaagttgaatgatttttttttcaagaatggatttattggggtaaaagcttctaattcatttaaataaaagttttgaatttttaagattatattatggattttaagggtcggagaatccggatctgacattaattttgatctatgtcgaaccccgaacccgaattcgagcaaaaagtctaaaattcaaattttactaattttttatttttggtctaaaaatggcttacatacatattgagaaacaaacataaatggacaattcactaataaaaaatcatttcaaccatttagaccaaaaataaaaaaattcgaattttgaattttcgactttttgctcgaattcgggttcggggttcgacataggtcaaaattaatgtcagattaggattctctgatccttaaaacccctaatatgatattttctcttaaattttcgactttttttcatggttgccgaataaacaaaatatctaacgcaagaaatggaaattgcgaacattggacaattaaacacaacacaacaaatttatttttcggcggtgaaatttacagtatgatgagaacttacagtgtgtacaacacaatatacatacatatgtacaacagcgaatatacggcaacaacagattacaataattaatacaggcaaacatttaacatcaatcaatccaatttcctcataatatcacacatcggtacgccttgccggggtgaacgctgtcgatggcactacttcttcacaaaaatttccgcgtccaagttctgaagcgtcccgtagttcggatcggtcgctgaaaaggggattaaaaaggaattaaaatttgaaattttcgccattttttcacttggtgtcagtgcctgtccgcctcctccatgtggcgccggtcccgcctttggtgccgctgccggttttgctggcgcattcttcgtgaagatgtcggcgtccaagttcttgagggtcccgtagttcggatcagtcgctgaaatgggaagtaaaagcccgtaaaattcgaaaaagttcgccatttttttcacttggtgtcagtgcctgtccgccgcctccatgtggcgccggtcccgcctttggtgccgctgccggttttgctggcgcgttcttcgtgaagatgtcggcgtccaagttcttgagggtcccgtagttcggatcagtcgctgaaatgggaagtaaaagcccgtaaaattcgaaaatgttcgccatttttttcacttggtgtcagtgcctgtccgccgcctccatgtggcgccggtcccgcctttggtgccgctgccggttttgctggcgcattcttcgtgaagatgtcggcgtccaagttcttgagggtcccgtagttcggatcagtcgctgaaatgggaagtaaaagcccgtaaaattcgaaaatgttcgccatttttttcacttggtgtcagtgcctgtccgccgcctccatgtggcgccggtcccgcctttggtgccgctgccggttttgctggcgcgttcttcgtgaagatgtcggcgtccaagttcttgagggtcccgtagttcggatcagtcgctgaaatggggggaaaaggcaattaattgaagatttcagctttttcatttcacttggagtcattgccggtccgggcgcctgctgttgcggctgtggggctcccatcggtggcggtggcatgcctcctgaaatgggggaatttcaatggatttgcgattgcgccgtgccgttcgttcgtttccgacccccacctttcgcctgctgttccttcgcgaaaatttccttgtccaaaccgacaagcgttccgtagttcggctcggattctgaaatggggggaaaaagcaatgaatcatttgtctaagccatttcggattcatttgtttacgtgggacgagttccttcgatgctgcgggaggcattggccccttcgccgaccctttgcccgatttcttctgcggtggcggcgcttttcctttgggcgacggcttcttagcggcggctgccggaggtcctgaaaaacaattagcattcttcttgaatcccaaaattgttcgcgttttgtgccacctttttttgcagcggcgcctttcttcggtgctggtccttaaagccggcaaatttgtttatttaaaaagtcgttcgttcgtccacctttttttgagccgccgcttttctctgacgatttcactgacgagggcgcttccgctgctcccggtggtccgcccactgccgatgtttgtggcgttggcaccgctgctccggctttgggctgaaaaaggaatgaattcatttgtgaaaaaagggaggggggatcaaaaaccgggggaccctttttct

SEQ ID NO: 206 - DNA, 4576 bp, Heterodera glycines
tcattcttttatttcttgctgatcgccttcattttatttcattttctccatctatctgccggagaatggattaatgttgagctgagtgtggacccaccaaattcttttgaccgttcattccgcaccatttccaagacttcacctgcgcaacattggttcggctataatcgggacacagcatgtcatgttgagctggagaggaatatcaatcggctgtacaccaacccggatacgtggaacattgccctgacagatgtggataatttaatgagcctgggacggacaacaattgagataccgtcaaccgccttaccatgggcatgttttgggcatggcggccatagttttgtaattttcaacctccaaaatgctgcgggtgaggtgaccgtactgcgtggacaccaacaaaaaatagcacggcaattgagcgcgtatggccgcattttgtttgatcatattgccgcccgattgtacattgtggacaagagcgaacgcagaatcaatgagttgctcattgccgatttggagcggtggtggactctgaataatacggacgatgcgctgaacaggacgtcacatgttctgagaagcaattttgttggctttttgccggagcaaaaaacggattatttcattgcagctgatcatgtgtacctgatttggcgaaggcgagtgtacaagttccgcattggacactatttcaacgatccttcgtcacagctccagtttctgaccaactcaagcgacatacgcttcaacttcctcttatttgaagcaggtgcagaaaggctgggtgaaggcggcggcgatcgtagaaatagcagatcagctgttgttgtgccagcggtgtcgtcgaacggaattgaacgtctcttgctcgcgttgacttacctattcgatcttgtcgtcatattgattgccatttgtgcattccgccagttccgccgattgggaggtggtgcagccgcacgaaatggggatgacgcgattgaactaaatgaatacgatcttttccattcactttcgttgcaaaacaacaacaatgggggcggagcctatgacgtatctgctgcatacaatccaacgaatacagcaccaaggaccgcccaccagctgagatcttgtgcaactatttaaacggctcacttttttttttttgaattttccaacacacacttgcataaatttactgttattttatgacagccaaaaaataattatattgggtatttgctgcggctatttcatgcaaagagcgataaaacattttcaagaatccttggcactagacaccgttgaacagctgtatgcgcattttaaagaggaaattttgagcgcacctggtgaatattatccaaatcctctttgtgggcttggttgtgtacacattgtcaacgacgatcatcctgatctgccggtgttcgtcgaaggaacgcttgatttgatcgcgggacttgaactgtactccacatgttatccgaggacggaagcagggacaatcaactggtcagcaagcagagcaatcacaatcatagattataaaattttcaatttaggagcaaagtcctgtacgtggagctgaaggacatgatgatttgcccgggcgagtcgccttgctgtcgctgcgcacaacccatcaacaacaacctgtcacactaccagctgatcgtggacgagctggaccgttggtgggtggacaaccaccaacacaatcgggggcacgtcgtcgaacgagaagaagaggaaagcgtcgaccactcaacctggtgaaggcactgtgtcgtttcaacggaggctgcatgccatcagttttgccccagatgattcagaggagacgaatagaaaatttgtgctttcttcgtgatctcaggctgcgaacagtgcacctgaagaataacattatgatttccgccaactcattgtcatttcacagtgcaggcagtttgcttgcctaccgtggctatttgtccataacggtagagcagcacttgtacgttcgccatcgtgttcgtcttaggttccccttcctgccctgcgttgtgcaatatgggggaaatcaccatcactattattttccattagaactgcttgaaatatgttctcgtccaactgacgaatcctcctaatctacacaccttccgaatactgttttattgttgctgttgctattgtgaaaaataaatgtttgttaacacaagtgccgatttggggttattattttggggtgagcacttttcctctattccaactttcttccctcctgtgcgttattctggactatttagtttgccgccgcctcctcctcatcatcatcaccgctatcgtcatcagtgacttcggcttcagactcagttgaagaactctgggccccttctcgatgagagtcgatagctattttttaattttgtaataatcatcatcatcatctgattaccattggaacaatgcgcggcctcccaatcacgaaccttttcctcagaacgttcaaccctacacaaaaaaaaaaaaaaaattggttgatcgagtcaacgcagtttatttttgctaatacttttttagtatggtgtccaaagagtcttccccaaaatcgaccacgtccgaggcattgtcgtccacacccatttcttcctccagtttggagtattttttttccaacgcatccagcctgtttttaataggaggcatctatgttatgccactttcacaatttaccattcggcacgtgcttcgccctgtgccttgatcattgcgcccaacattgaggtagcggacccatcaaatgaatgacgtcgttttcggctatcaccactgctcgtggaaggcggtagctccttcttttcatccttgggcgtttcgtttatcgtcatgccgagaaaaacaatttcttcttcgcccttttcctctccatgtcctttttcctccggtttcagatccatttccttttcagttttgcattcactgttgtccatgttgtcactgctaatttcttgtccttcaattgctctttaaaggttgttgattagtcattaatgaaataaacattgccaaaaaaaccaattgaaaacggaattatgaaattcttaaaattttatctacggcgattaaataggtatgtgataggttcattatcgcttattcattgataaccaaaaggaagaacatcaagctcatcagtgataattcccttctggcagacgggcagatatcgcttgcgctgctcacgtgtcacaatctgactcgcacgagtcggttgaattttatcataatggaacacggctggctcctctccttgacgtccatagttcaacactttctgacgaaaatgctcaaactgtagggtctgactgttttgcacgtcaaaagttattcctctaattttttgcacatatcggatttcgccagttcgctcatcaaccatttttagtgcatattgttttgctcctaagcggaaagaaatatgtctattacaaatctatacgccgctatgtacctccacaaacgaagttttttatggaaaatccggtgtattcttctgacatttggacaaggaattcgccggtttgaagtggcgccaaatcacgactatgcttcacaatgacactgtcagtgtcctaaacaacggggtgctaattgtgttacaaaacacaagacaaactaccgtataaagcaattctgctccttcggtgttgtacacttgctgcatataatcgagtaacttcaaccttgcacgaccttaaaataataatgggagcaatgctagtgttgacaaaactaactagtggtccacagactgagcacgatattgctggacgaatgttcatcgataaaatttttttggtcctgtacgaaacacgaatgacttcatcggaaaggggaattatggcataaatttcctgcgttggaaaatttccataataaattaaggcgagcattcaaatactactactactacttacgactttatggtcaaggatgagcttgtaaaattcctgaggctttgtgatcacacgatttgcgcccaactcattgcgcatgctgaattttcccctaaattttgggttacttttttttttttttttttttttttttttttttttatcgttcctaaaacataccacaaactgttcagcattaacttaaaaatgaatcggagtccaggatttttgttaatgcgtgccaaatccagctggacgttgtaccttcgcatgtattcatcggcaaaaatttttctgtcctggtctgtttcaacgccatccgggaagccgcttgcctccacctatatgacaattgtgaaacaaaatgagtgcaaattgtacgtattgtacaaattacctttagctttatcataaggcgaacatattctttgaaaattttgtcactcctaaatgtagctgatggatgttaggcggcaattcatacactcttaccattgctcataatgccaagctctccagaatcggtccacccggtagccgcactctaacgcacgtgccagctcaatatgagtgtaggttccggtgtaggctcgctgctcggctgtgtgttcacattggtgtgcacgccttgtgcccatatg

SEQ ID NO: 207 - DNA, 11126 bp, Heterodera glycines
  unsure (1)..(11126): unsure at all n locations
aatcagggtgtcgtgtccgccacttaccaatcaaccattatttcttcaacgcttgggtgaataattttcggtataccgacagggtaatttgtgtcgtagttgacctataatcaatataaaatcgatccctccctntaatcacaaaatttattgtctgtctaatagacacaacatacccacggatacaagctcacaatatcataaacgctgattttttcatcgtcagaagcctctgcaaacagcttcagtggaccagttcgacctgttaggcaaacattaacgaggaaaaaaaactgggtccacttcacctccacagtaagcggcacgtgggtcgattggccccctttcattgcccaaatcgtcaaaaaattcgcgcatctgcctgttacgggggtctgatagcagagcgttgatctcgcattcctcaaaaaaaagaagagcagttagatttataaattgcgctgtgttttaacccaaatttcttccacttcaatgcatcttcgatactcgtctggctcacggagtttggtcagacggtcctgggttgattcgttcagctctctgcacgtttttccgtccaccagcttatcaccaggatcatagcaacgctcacatccatgccaataactgtagtagcaatagcacccgcacggaatgaatcacacttaccatccaagcacttcaatgcatttgttctgttcagcaatccatccgtcaattttgtaattttttatgcgtttttctcttccattgcctgcgtgttgtacttgtactccttcacttttggctctccagtccaaatatttaattgcctaaatgtcaaaataaattttaaaatcgccccgaaagctccaataccagaacactagctctgtcgtttctctcgtaccctgtctctgggacgatggccaactgattctctgtcatgaacattgtacgaaaaatgttcatacagacgctattttgcaaattgaactcataattatcggtcatttcctcccttcccgtcatcctacctcgcaattgtacaactaattgggagaacatctaacccgttggttatgtcgcgcaacaaaatttggcgaaatttcagaattgcaagcatcagaatttctgtgtcattttcacaataatcgcgcaactcttcaggaagaaagaatggcgtgtgtcggttctcttcgtacctttttttagttcaaaaaatttattgtatgccatatagcgtgtgtaaacaaaattaccattgttcaaatttttcaagttttgccggcttcattgaaccgggaaaatatgcttcttttggtggtagatgcgggagccgaatttcataattttcccttaaaacatcgatgacaagtggtatctgtgtttgagagatgtgtcttctacctccgattgaatccgtagggaaaaaaaggtttatcgggacagtcgagatcaaaggtgcttttcagtccatccaaacgtatcgggaacagcaggcatgagtcgcgccaaattaggaaggagttcaccgccgaatgttgtaaacgaaactcaaaaattttaagtccgttcatcacaacgtccggtctccttctggtctcgcccagataacgaagaacaaaatgtccgtcaaatctggacgcgttatgggccttttaaaggggcgttatggccaaaagcatgacttaattcactccttgttcttacccaaatgtaagtgtcgaatttttcactccatgctgtcattatccattcaacaaaaccagcaacgggctcatctccctcggtctcgctcctttttgagcgtcattgcgttaaagggtggcccgcccccacaaaaacataccagtatttgattcgctccactgctccgtcctcattcttgcatatttcacaatccccattttcaatttggtggggcaaatcggcgcaatcggtgcagctcacacgcgcagacaaaaagtttactttatgaacttgttggtgcccgccccccattggctcaagccgcgtttctgtgtcccaacagacgatacggtaacgctgtttttccaatggaatccgctgttttttaataaaacaaccagtgtctttgccgtgatagacctgaaaataacaataacaacactgtttggttcccgcaaaaaaaaaaaaaaaaaacggcagttactttgcaacgggtgcaatatttggtgaaacatttatgtggccgttttgggtctcgctgatacacgcgccaacaacaattgcaccgcttcagcagtgaacatgtctgcccctgatggtcgtgatagcaacgttgcgagaagaagaatcgattgcatgccgaacaaaggatttttacaccaggttcctttgcacacgggtgctccggcccaactgaagcaacaatgataagcgaaaaaaaaaactgcgtgtactttttgcacattgcggacaacggcgaatgcattccagcgtgtgcttcaatgggcgcccgtacgagcattcgcaatcaacgcaataaaaattgccaagcttgaagaagcagttaatttttctgattccatcatagtgagcgttggacaaaaagagcacgacatcgaaacgacgccctgatggacctttccaaattggtttaggcaactcctctggatggtcctcgaacagtacaatgcgatacagagcgggaaagcgctggtcctgttttggaaaagagaaattcacgtgttataagttgttgtttgtcactgaacccaatagtgttgaacggtttgcaaatggtccatgccatatgcgtgttggccttcgggtacgccagctgcatgcattaggcggtgcactgaggaactcatcaactctcgattgatgataagacggcgaaaagcttctttggtttcacaaaaatcctgcatcagcatcagtcgtgccaaattctgctgttgtggctgttgatcagctaacatccagtcgttgaacagcatagggtcgtggtacgctcgagcaccaataagcgcgtggaacatacaataattgtcttcccaatctctgatccttatgcgatgcgcctcattgtagccccaatgctgatacgggtagaagcgcggtcggcccgccccggtaggtggagttaaacaggtcacagtgatttgcaccggttcgctgagtagcaatgatcgtttgtcgagcgcttcaccactattctctccaacaccaattcctccgtcttcaccatcactttggccaagcttgtccagctcagccatcagcgtgtcacagctgttttgttctggcggtcgaagcggcaatacgattgggtcatgtaagcctatttaataggtaaggaataaaagggctaccagccgaccaatcaaacctcttccctgtagcgtaacaccaattttgagaactttccggccactttgctgctctgcattttggattgcccgttccataaggatttggaatgcaccgcgcaagacttcgtccggttcctcaacgttggcattcagcacaaactctgtgatgtgtcgtgacaccgaaaagcgctccagtctgtgcactgagtgtgagacctgttgaaaaaggtcgtttccggtcgattggctgccgccttccgctctagtcccgcgtccctcgccctgctggtgttcatcattatcgtcatctgtttgttgctgttgtgatgttgacaaagccgacgactgttcaggtgggctgggctgctcaaaaaagctcattgaacgaaagtcccagcgccttttcattgtgctgttatttaaggtgaaaaacaaatttttttttcagagtgtttcaaataatttggcaatttctctatgcctttttttttttgtcggctgttacaagtgcaaacatttttttaacaattgttttttctatgctaaatgcaacatcaatatcatttaagataggttcatcattactcagcactcttgtcaattcttttttgcctttttcacggcctcggtgctggtcgatttcgtctccccaaccagctgaatttcatctccatcgtcatcctccgactcttccttcagttctccatcctctttcttcacctttttcttggccttctcttcctcctctttttcgacatctttgttgtccgcgcacatggacatgattatccaatcgaaatcctggccttcgaaatggcctttggactcctgattaaacacaaagtttaaaaacaaatttagcggcacacactcaaccgaccttgatttgcactttgacgaccacctctttgtccaattttgcctccaaaatttctgcgagcttttcgggctctttttcgctcaattcgtcaacatcaagcgcatttattcccaggtatttttcgcccacgtacgagaacatcgtggtgaccacactgctctccggctgaacacgatcggcgatttcgacgcgcaggaacaggcttttcatgggcgatttcacaatgtgatcgcatgaagtgcatctcatttcgtcatccaacttttttcggcagaagaagcccctatttttcagggggcaggccttgaaaattcaaaattaaaaaaaagcgctaaaaacacaaaactcaaccttataaattttatattgcaaattcacgacttttgccgtgacgtgaaaaactccggcgcttttgaagtccaacacttccttcagagttttcgtttttgctggggcgccatcgcttttacgcttttgctggccagcagtagcagtggagagttgaaatcgggagaggccgctcatttttggcgataatgttcaaaaatattgatataatctaaagtattattattattattatttctatttttatcaagcaagttaaatgaataaatttgttgaaaaaacgttattaaatacaattcgatgaaagattagaatcacatcgctggttaaaataagtaaattttaaatggacacataaatgcctaaaagaacagttaacaagaatatttttaaacatttttaaattatcaagcctttctgacttagtccaaataaaaaattttaaaaaatattggttcaatagtgccgacaagactgtcgccggaacgaatctgagtgaattgttggcaggttttacgcaaatgtgacaaattttgtggcttttcgtggccaaaaatgaaaattagtggaatttgggttggcgcggtgccgacaaggttatcatcggaacgaatctgagtgaattgttggcaaaatttgtggcttttagtggccaaaatgaaaattagtggaatttgggttggctcggtgccgacaaggttgtcgccggaacgaatctgagtgaattgttggcaggttttacgcaaatgtgacaaattttgtggcttttcgtggccaaaaatgaaaattagtggaatttgggttggcgcggtgccgacaaggttgtcatcggaacgaatctgagtgaattgttggcaaaatttatggcttttagtggccaaaatgaaaattagtggaatttgggttggctcggtgccgacaaggttgtcgccggaacgaatctgagtgaattgttggcaggttttacgcaaatgtgacaaattttgtggcttttcgtggccaaaaatgaaaattagtggaatttgggttggcgcggtgccgacaaggttgtcatcggaacgaatctgagtgaattgttggcaaaatttgtggcttttagtggccaaaatgaaaattagtggaatttgggttggctcggtgccgacaaggttgtcgccggtaaaaatttttagactttaattcatttttaaaaattaattgaaaatttaaatacaatattgctggaaaatttttaattatttttaaggggagattccccttccctggctaggtaaaacgtaaagactaaattgttataagtttaatataatcaattttttgaagaaaaatccataaaccattttttacctttcatacaaggaatgtatgaataagacgctcaccaaaaatcggtatggaaagcggaattccgctgtccaaaatttgggacaatatgcaaacagaattccgccggctaaaacgccattaggcaaacggaattccgacagctcaaaaatgaggcaatcggcaatcagaactttgccacaaaaaatttcaacaatcggatccctaaatggaaaacgaacctgaaatcgacatgccgacacatcgtttattcatacccataagactaaaaattgtattaaatggctaaataaatgtctttaatccgtttttggaaagtagtcatttttgggggtaaattataaaagttttaaaaatgtattcggatatggaagagatgttcgaatacccgttgacgcttataataacacaaaaagtaaagttttcataaacagatgagatgccctgaaaaagccagttcagaaatatcagtcctgaaaaatccagttgaaaatataaaaattgtttgcctcggaagctgaatattggatttaattaaatgcataatttttcgattgaaaaggtcacgtataagcaacctcccacataagtggtaattgtggacgcatataatttagctatgcttgaaatgctagagcactttagggatcggatttttagcggagcaataattggcaaacaaaaaatgctgtaattaaaataggcaggagaatcggtgattagggatggctgcgttggtcgtttgtcttttccttcctcatttcatttttctgtaaaggtcaatcctgtaaattgggtaaacattggtgcatcaggtcaatcacgtaaaaattgacgttaaattaaaatgagaaaatgaatacttaattagctgaaaatttaaggtccgataattaatatgtgatcggtgagcaattaagtacattcttttctttttaattagctgaaaatttaaggtccgataattaatatgtgatcggtgagcaattaagtacattcttttctttttacacacatttaataattgtagttatcaattgggcaagtaaatatcggcaaaatatacaatgttattttaattcacattatgtagcatttatctgataaaattaaggctataaactgtatgcactaatagccaaatatgcatttcttaaagtctagaaatttgtctaaagataaatatacgcaaaaattttaaatgttaaactacttttgagctcgttttcataggatatgggtagaaaattttcaaaagtcgtaatatttatagccttaataatcaaaatatcatattcattcaatgcgaacttcgttggcatgaatttgtttaatatgtttttgtaagtcaatctatgtaaattagaataaatcttcaaaaaatgtgatgtgttacatactttcctgttaaatccactttgacagtattggcatagatatgcaaatccgccatgtatttgtttaaaatgggacttaaacaaatataattagggctatgcattgtatggactacaattaagtcttctaatttgcctaaaatccttaatatgcgctaaataaacaccataatgccagaaatagatttaaattgaaagtcaaataatttttgtaaatttaaaaaaatcattaaattactaaaacgaatttgacggaaaaaatttttggccaaaaatcctctcacaaaaactctgaaacattaaattagcaaaaatacaaataataaatttatagcgaaattcgcatttttctcgaaaacacaatattctttaataggctctaaaagattcaaccaaaagttaattttgatgcagaaatgctaataagctaaaattttaagcatatgcctagaaagacaatcaaatgcatagccctaatactaacttttaaattacttacaaccatattgtttgctgcagagaattttttatgacaaatgcggcactcaaattgcttttctgaaaattaaattaaaattatttttcaaaaatatttttctttgatttcgatttcttgaaaacaaagggtaaaatcatttcattttatttagttgcctactatacctccatgaagtttttggtgttttctaagagatttgttcgatttaaatcccttttggcacaaattgcaacgaaacatggcacttaataagaaagaacaaaaagttcaatttattatgaattttttacttctgcctgttatgtatttgcatatgaacaccgaggccttttttgtttaaaaaacgtctgtcacagaattggcaatgttccatttcatctagaaatattttaattataaattttgaaaagaaaaaaaaaagttggcaaaagtccacgatttcgtaaaatgtagtttgagtaactaatgtcagaggaaaatggtcgtaattgcctctcaaaactttgaaatgggtaaaaagcgttatgtgcttaagtttgttaattatcactatacatgtagtttctgattaaaagaatttaaattattaaatagaaaataaaaatccacatattttttaaatttgaatgcctatcacaggccaaggtcttagtcattagaattgcctgcaatccgctgattcggtattggctgaggctcctgtgccgctatttggggttccatgtttctggcgcctaccgcttgctgaattacatttaattagttaaatcattaaattaaattatttaaatctcaaattttaattttcaaatcagcctgaatttctgcaattgcttcctgcactttttgcgcaaatactcgattgacagcatctctaacatgttgaggctgttaatacataataaaagaaaaagtttacattaaaattttcttacaaaattcgttaacaaattgccgatcgcctctgcgttcgcaattaatggacgcttgaattcaaaataatttatttttaatattattgtataaaacatactgtgcttgcttccaaattggtaattgagtcgcgcagcggttgaattatttggtaaacaattgggcccttaagcttatacatttaaatattttaattaaaaattacaaggtgtgccattatcggtggtaccaaaagacggaaatcaatcggtctcaacattatatgttgcattttaaattgtttaaatatttttaatattaaattattgtattttattttttaaatgaagatttttcattggtcttagagcctttaaatgcaagccattttcagtccgaattccgccgtacgttccaattaagtcataaaaatttttccgtaaacggtggcagtgaatttaatcctcattcacccgcgcacccttaggatattttggtctttgcgatttatgactgtggcagcgaagtgtatgtgtttgcactcaaatcggaaaatacgaaaaataaataggaaaagattaaggcaaagccaaaatttggtgaaatcctagtgatctttgactcctgatcaaattttaattcaaataaattatataatttattcaaggcctttgctgatctttggtatttggcgagtataaaagggcttttctcggttttggctttcatttttcataattaaaatgagaccccgttcaaaatcgctattccaccctaattctaatcacaaaaataaagaaacgtcaatatgtcgactttatttaaaattaattgatgctgttcacggaaaaagacgattgccaacgccgcataggagcttctttccgtgccagattcatataggttttcacaaaaatattttattaattatcccaaataattcaaaattacttttttttgcatatagaaaaaaaacacgaccatattgtgcttaagaaaatgcgaaaaaatttttggcaagtgatccggcgggtatgatcatcagacaaaatttcttttttaaaaatatttttaaagtcaaaacgtttggcaaacaaaagaatgtgccgtgctgagaacaacaaaaaaattatgcaaaataattgtgtgatttgctaataaattgtgataagtcattgtaaactatttatttttcttttaatttcatttattcataaaaatatgtaagtaaaagaaacgtgaaaaatacaatcgcaataatgcacaaatgattaatgttttttgtccaggtttgtagttgaattccgcttcaaatattcgtccattccgctcgaatattcgttcaatgttaaagtaataaatttagcattagacatggaattaaaaccatatttaatcatatttaaaattaacgtttaaacattaagtaatgcgcatttgctttatgcgttgatagcctaatggttagtgtgaattaaaaccatatttaatcatatttaaaattaacgtttaaacattaagtaatgcgcatttgctttatgcgttgatagcctaatggttagtgtgatgggctgacctgtcgaaggttcggatccgctagatggataatgaattaaaagcaatataataaggttgggacaaatggtcgacaaaatggtcgacacttaggacaaatggtcgacagggatgggggcgggccatttgagcgccagtcactggtgttcaaatgggaccgcagttttccatggcgctcaaatggccggctgagcgctgggactgaaatgtcccggcgctcagatggccccagttacctgaccttacactactcaggggtattattttgtaaagtctttttttccccaataaacttttcataccccatttttcgcaccgtgaatgttatttttattgaattctgaaccgttttgagtagattagactagaaaaaattgaaaattttgaaatcatgtttcccactcccttctcccaggggtattattttgtaaagtctttttttcaaaataaacttttcaaaccccatttttcgcaccgtgaatgttatttttatcgaattctgaaccgttttgagtagattagactagaaaaaattgaaaattttgaaatcatgtttcccactcccttctcccaggggtattattttgtaaagtcttttttccccaataaacttgtcaaaccccatttttcgcaccgtgaatgttatttttattgaattctgaaccggtttgagtagattagactagaaaaaattgaaaattttgaaatcatgtttcccactcccttctcccaggggtattattttgtaaagtcttttttccccnaataaacttgtcaaaccccatttttcgcaccgtgaatgttatagaagttgaattctgagccgttttgagtagattagactagaa

SEQ ID NO: 208 - DNA, 1296 bp, Heterodera glycines
ttgtagcaatgatgcacgtggtccttggaaattcctcttttattaatccctgaatttcttctattttcttatcactcacttatcactgggggaaaattaagatgattctgatgattagcgttcttgttcgattttggcgctagtgcgatatttattctcatggttcttggaaagtactcaggaagtatttcgatttttgtaaataaaccatcagctgatataaagaaaagcattgttgtctgtccttttccaattatattgccatttcggcatcggtctaacaaagctgcgcatggctttgggaaattcctcaggaattaattttcgttgtctaaagaaatgcgctagtgtcgggcattttgacattaaaatgccattaaggcaccgttgtagcaatgatgcacgtggtccttggaaattcctcaggaattaatccctgaatttcttctattttcttatcactcacaaatcactgggggaaaattaagatgatactgatgattagcgttcttgttcgattttggcgctagtgcgatatttattctcatggttcttggaaagtactcaggaagtatttcgatttttgtaataaaccatcagctgatataaagaaaagcattgttgtctgtccttttccaattatattgccatttcggcatcggtctaacaaagctgcgcatggctttgggaaattcctcaggaattaattttcgttgtctaaagaaatgcgctagtgtcgggcattttgacattaaaaagccattaaggcaccgttgtagcaatgatgcacgtggtccttggaaattcctcaggaattaatccctgaatttcttctattttcttatcactcacaaatcactgggggaaaattaagatgatactgatgattagcgttcttgttcgattttggcgctagtgcgatatttattctcatggttcttggaaagtactcaggaagtatttcgatttttgtaaaccatcagctgatataaagaaaagcattgttgtctgtccttttccaattatattgccatttcggcatcggtctaacaaagctgcgcatggctttgggaaattcctcaggaattaattttcgttgtctaaagaaatgcgctagtgtcgggcattttgacattaaaaagccattaaggcaccgttgtagcaatgatgcacgtggtccttggaaattcctctggaattaatccctgaatttcttctattttcttatcactcacaaatcactgggggaaaattaagatgattgtgatgattagcgttcttgttcgatttggcgct

SEQ ID NO: 209 - DNA, 2983 bp, Heterodera glycines
  unsure (1)..(2983): unsure at all n locations
ggcattttgacattaaaatgccattaaggcaccgtgtagcnaatgatgcacgtggtccttggaaattcctcaggaattaatccctgaatttcttctattttcttatcactcacaaatcactgggggaaaattaagatgatactgatgattagcgttcttgttcgattttggcgctagtgcgatatttattctcatggttcttggaaagtactcaggaagtatttcgatttttgtaaataaaccatcagctgatataaagaaaagcattcttgtctgtccttttccaattatattgccatttcggcatcggtctaacaaagctgcgcatggctttgggaaattcctcaggaattaattttcgttgtctaaagaaatgcactagtgtcgggcattttgacattaaaatgccattaaggcaccgttgtagcaatgatgcacgtggtccttggaaattcctcaggaattaatccctgaatttcttctattttcttatcactcacaaatcactgggggaaaattaagatgatactgatgattagcgttcttgttcgattttggcgctagtgcgatatttattctcatggttcttggaaagtaatcaggaagtatttcgatttttgtaaataaaccatcagctgatataaagaaaagcattgttgtctgtccttttccaattatattgccatttcggcatcggtctaacaaagctgcgcatggctttgggaaattcctcaggaattaattttcgttgtctaaagaaatgcgctagtgtcgggcattttgacactaaaatgccattaaggcaccgttgtagcaatgatgcacgtggtccttggaaattcctcaggaattaatccctgaatttcttctattttcttatcactcacaaatcactgggggaaaattaagatgattctgatgattagcgttcttgttcgattttggcgctagtgcgatatttattctcatggttcttggaaagtaatcaggaagtatttcgatttttgtaaataaaccatcagctgatataaagaaaagcattgttgtctgtccttttccaattatattgccatttcggcatcggtctaacaaagctgcgcatggctttgggaaattcctcaggaattaattttcgttgtctaaagaaatgcgctagtgtcgggcattcatctgctgcaccggccgaagaagcgatggagccgccgccaccaactccaggaccagtgccaacgccagaaatggacgaggaaattttggaattttgcttttcgctgccatcggcatctgtcacaccaatcggcgatttggtgccgttttcgacaacaccaactgcgccaatggacaccggagagacgaccccgccaccgctggccattgacgagcgatcagagcgcatcgaacaactggagaagcagctcaaggaccgggacgacaccatcaaatttctgcgcaagcaggtccgaaaccgagaagcgctgatcagtgatctgcgtcgtcagctggagcaatgtgcggcaccaccaacggcgacaccaacccattcaatgaaaaattcattacggaacatggacattgaatcatcaaaattctcgaaatccttcaattttcctgaatgttcttcaatttgaagaccgatccccgtcaccaggccatggatttatttcaccattgttgttgcatttcgcgtccgccaaaattctcataatgacggcgtcctggaggatgtatcgtttgtgtcgcttgtgaatgaaatggcgagcagatcgggcagcgtccacctgtctgtcgatgctttcattgactccacagatgaagtcagagagtgccgggtggtgacagagacctttctaaatatatttttaaaaatttgcccgtagtaaattaaaaaccataaaatgcagatggataattttttattaaatataaacgaaagaatcgtgaaaaaatatatgcctgaaggcgttgttttgaagtcgatagcgagctcaaagaatattgaacaagctgttcttgtggagtcacggtggtggccatgtaagaaagagttgatggcgccggtgagccaatgccgaattgtattggagtagccgcgtagctgtgttctgagatgatggtcgaaattgttgtcactggttcagctttaaaataattaaacttttggaaatcgatgcaaaaatacgaaaaaaacattggtcggcgctggacaaaaaactcatttgattggctccaaatgccttagcaccatccaacaactggcgctgcgtcaagccgatgtatgttcgagaggtaaaggaaaaactcatgcattcctgcaggagcagacgccacaataattgagaaagccattctgacaacgctggaagccaagtggcaaagaaagaacacttgtgaaaaggaataatttttctattttttttgtcgcttcaaacataccattgagccataggcaatgtcccccaaaatatgtttttccgcgctcaaagttcattattaagacttcagcctcgttcaaagtctatcaacgttgtcgaaaattatcacggcattcggttcgctaagctccactcccaaattcaggcatcttcatttgtgtttgaaatgtctgaaattaacgcttctctcgacttttttgtagaatttcaagcttattacgaatcatttggtccaaatgaatagaaaaatctaaagtcgtcagtacaacacacatttaaaataattcttgaacttatttcatgttcgggtggatcaagggatagacaaggggcaatgtaaatgtcatattcgtactcagcgactccaaaaaccctaaattagatccgttttccgggtttttatgtactttttagacttttggacatttcgtgtttttacccttatggacatttcgaggcttggacatttcgtggcttggacatttcgaggttggtcagcggtagggagtccaaaaatatggatataaaatcgcgaaatatggccataaaat

SEQ ID NO: 210 - DNA, 1465 bp, Heterodera glycines
tctttttttgattgttttgtcttggatacttccattttctttccctttttaaccaagtgcagtattttggcatgtctatgtacttgaattttaatgttggattttgttggcaaaacttaaaataagccgttaatgttgtatcttttactgatgcttcttctatttgttcttcagaagcattttttataaaaaattctttgcatattttcgaggtgtacatctaataagtcgacagaatgagattttccttgcattggatattttaaaattcgccagcaggcttcacatgggcttaaataacgcgcctcaagataggctcccacttcatcatattttaatattttttttgtgccattttcttcgatttgaatacattcaacggtcgcagaatcattctctctatatttatatgagcattaaatgttttactcaaaaaaggattatacggaacaacatattgatttgttaatttttgtccttttctataaataaaacgtccattatcaggccttttgtagagtggataaccatcttcattaagctcagtattttcacgaaaagtttttggaaattttttaccacattttttctttagtttattccaacacattgatttttcattgcatggtccatgcatcatgcagtttgtaattattttaaaaagaacaggatcttctttttcgcttggtatttcagcgcaactaaatttatctatatctgcggtcgaatgccacttattttttggatgcaacgtaactaataaatgtaaatgtggaagacctcttttttgatattctattacccagcaattggctataacttctccaaaaatatgcttattcaaaattaagtctaataaatgtgttttctttaaataaaaaactcgtgttacaatgtcgggtctatcagatggagtttgacctggtaaaagacattttaaaatatccgggtcattcgggttacatgtaaacgtaataaataaatctggtttgccagattcgtttactatagccatcgcattcataaaatgttcatgcatactgcggggtcctccagaaaaagttgacggaagtataactttcttccttatttctgccccggtttttgaagctctatttttaagaaaatcctcaacatttaaataattgctactccatagtttggcttgatgtgttcttatatattctaaacggtcccactcgattttagctgcttgatctactaaccattgtcgaaatagtttgcttgcataaaaatgagggaaaaacttttcattttctcgaaaaaacaaaaaatttactgtagtcacataacgacaccttttttcctgatgtctctttaatgttaacattatatccttcgatatttgacggataaagcaaaggataacacattggatcaacacatttatctaatgcgtaaatttctttttattctttttgtccctttcggatatacaactatt

SEQ ID NO: 211 - DNA, 913 bp, Heterodera glycines
tcaaaaaatttttattttcgaatatacttttaattaaccacaacttttaaaaaaccaggtatatttaggctggggtaggctgcgaagtaaaagaatttttacttttttttctaaattagttattgattttaaaaaatttgagtccaaaaatatttgaaacggaactggctcttttaccactaagacggaactggcgagacggaactggccagacggaactggcccaagatggaaccggcccaagacggaactggccagacggaactgacccctacggcgcccccaccgctgcccgtcaaaatgtccctgcgtcataatgtccccgcgtcataatgtccccgcgtcataatgtcccccaagctaaaatcagtcaaaatgtccccgcgtcataatgtcccccaagctaaaatcagtcaaaatgtccccaattaaaattagcgaaaaaaccgaaataaacgatgccgaaattcattccctcttagtcatcatatcgagggacacccagaaaaaataaaggaccatgaaaaaattagtttcaaccatgcatgtcctttaaaatttgtccatttctgttttttgttatcttttcaattaattggaagtatttcattgtctttttagcagcttttattgtttttttatgattgataaattttctaaggtatttcgtatttttaaaccttaggggacattatgacgcagggacattttgacagcgcgccgcccccacaaagtgtccaagccacgaattgtccaaagccacgaattgtccaagccacgaattgtccaaaagagtgaaaacccacaaattgctaaaagacaaagaagttcctaaaaagacggaaaatgtgtcgatgttacggttgtcgggatcattgaatacaaatcctgcatatatatattcccttgccta

SEQ ID NO: 212 - DNA, 3208 bp, Heterodera glycines
  unsure (1)..(3208): unsure at all n locations
attctttttgtcctttcggatatacaactattcttgccgggggaacatcatcattagcatcacttaccattatagcgcaaacttcgttactcagtggtatattatacctcctttggtcataattctcctttaagctaaaaagtaactttatgttaggcattttatggcctctttctttacactttttttcttcttgctcatacacttctttcatcattaaatatgactgtgcgaatggattattttttcgtaaatatttttcaatatattccaataaatccgggagacattccttatcaatttcacaacgtatatttatagcctcttccgaatcaatgaaataaagttggccgtttgtaggaagatctttttcattttttggcatcgcacttggattgaatttatggtaaatttgcccttgaattttataacagggcggacccggtgttggaaatttaaatttaaagcaactaatagatgcacaggcaaaaatactattataccttctaatatttttaataaaattcttataaaaaggattattccagacatttaatattaaacttgccaagttgataaaattcggtattttgatgttctgtcgcggcgagatagtgtaacgaacaaaattcccttttgcgttttctggtattttcttgtaaagctaaatttgttgttttttggttttttaattcttgatcagtcatttgcattcgctttaaggcatgcctaacacggccattttttctcacataagaaatttcttcttcagtcattttagccctttttagtccaattctaaatctattttcaaaaagttctttttctttttcatcgttatccattagctttctttgttttgcttttctttgcgccacatatgatttcatagtatgttcttcatcagaagtataagaaaaatcattcatttcatcgagatttatgctttctttgttaccatttttttcatttgttaagttcgtttctgaccgcttttgttttccggagctttgaaccggttcaatccgcttttgttttccggagctttgaaccggttcggcgtctaaatactggagagaagaagagcaacaggcagaatcttttggaaaattttgtttagtgcggaccattattatctgtgttaaaaattaaataaataggacaatataattgataattaattaaattgaacaattacaaataattttttttgattttattgcactttaggtctgtgtttaacgaccgataaggggatataatgatttggttctacatgacaatcaattttagacaatccaccaaataaacaattcaccagtggataatccgttattaatggaaaaatgccatcaattttttaaaagataacatttttcgttttagagagcccgaaaaaataataaaaacttttctaagttgtaaaattttttgtgatgatgaaaattagtctattactaaacccttatttgattaaaaaccaattccatggtattttggaaggttttaaatgaatttgaatttattcatattcaggtcccggctgaaataaaaaaaaatttgaatttaattcctattaccattttaggaaaagttttcttatttcctaaaactcagctacaaattatgtgttcgaaaaattattgattaattcaccaaaaaaataaaattactgttgaattgtccattgaaggtttttccgctgacggattagccactggtaaatgtcgacggattatcattgaaaattgtccgaatattatggattgtccattaacattaacaatatcaataaatttaattgttattgaaataattaataagtaaaaaaaattattaaaacttttctaaaaggggtaatatgataaaggcgcaacaatcaactgttttttaaaaaaatgtaattaaattaaatgttgaaaaaactaaaaagtttatatgggaatttaaaacaaaagtgattcttactattacaaaagttaaaattaattgttgtttctaaacataaaaaaccatagtttaattaagaatatgaaagcaaaaagaaaaggatcaaatttcacaatgtttgtttttttcacaaagcagccatcattactttctattttgttttcaacacattaaactgctgccctttctccgtttttgctctctaatctttaccttttctctcgcaaaaatttaataaaagttttcgtttcaataaatattccgtttaaaatgtgacatacggaatgacggtgctgtaacatttcgacagtggctgatttcgacagtgaccgatttcgacagtggatttcgacagtggctgatttcgacagtgaccgatttcgacagtgaactattttcatttattttactgttttccgacatttccgacagtggctgattacgacagtgaccgatttcgacaatgaacaaaattttaactttgccaattctaacatttgaaaacttcaaattgatatcgaaaataacgacaaaattgtgtaaaacgacaatgctaaaatcctataaatgtttaaaagtgcagatgataagcgcaagcgcgaagaaattggatcggatcacgattgaaaaaatcctgcacaagtgcttccaagttttggtcttgacgatgaggccctttaatgccgtcagccggtgcaatctgataatctgcaacccgaattctccacagttcatcttcctcgatcattttccgagcaaatgaactcggtcgttggttccccctaaggtgcacattccaagttgaatgccaaccctgaagaaaagacatgaaaaaatggtcacatcccaccacacttcaagcgaattgtttgttcttccaagcccttctgctactctgtccaccacattccacaattcaattggaaaaagagcgtcgagtctgtgccaaattaagcgcctcaattctccctcgaatccaattatcacctactccgcctgcatcgtgaaccaaaacttcttcattttgcatgattcggcgaggcccgatccacgtgttaatgaaatagatgatcagctcttgaagctcaggagtcggctcaagccttgaaaaggcgntgccncctttgttgtnggcgccgtcgncggggncnttagcctgcgcttgtagaggccgcaaggataggtgacccccccatcnncncaatatcncnngacccccagtagagatcgctgaattcttcgcctaaattacttgtcc

SEQ ID NO: 213 - DNA, 3804 bp, Heterodera glycines
  unsure (1)..(3804): unsure at all n locations
ggcttttgcaaactctcaagaatttcgcgaacagttagcatttcttaatataatctgaatagaaaaaaaacaaattctaaaaatttggcataaaaaatagaaagaatgatatatttgatatcagaacagattcatttcctcttatttactattccttaataattcttttttatcagttggcgaaatgtcagattttggttgagttggcgaaatgaatgtttttgactgagttggcgaaatgaatgtttttggctgagttggcgaaatgtcagttggcgagatgtcagttggcgagatgtcaagttggcgaaatgtatgcacacctacataaatattaaagcaaattttagtttcaaacgaattagtcagtggacattttcgtcagtgaattaatgtttttaaaaattacttaagacaatttaaaagaacaaatggtaatcacaggtcacacagaacacattcaagagtaccactcactatttcctatgtcctggaaaagaggatttaattattgtcttgcctaacaattctatacggtctatcacattggtgctgtaacatttcgacagtggctgatttcgacagtgaccgatttcgacagtggatttcgacagtggctgatttcgacagtgaccgatttcgacagtgaactattttcatttattttactgttttccgacatttccgacagtggctgattacgacagtgaccgatttcgacaatgaacaaaattttaactttgccaattctaacatttgaaaacttcaaattgatatcgaaaataacgacaaaattgtgtaaaacgacaatgctaaaatcctataaatgtttaaaagtgcagatgataagcgcaagcgcgaagaaattggatcggatcacgattgaaaaaatcctgcacaagtgcttccaagttttggtcttgacgaatgtatttggcctttctcgtttcatgaggccctttaatgccgtcagccggtgcaatctgataatctgcaacccgaattctccacagttcatcttcctcgatcattttccgagcaaataaactcggtcgttggttccccctaaggtgcacattccaagttgaatgccaaccctgaagaaaagacatgaaaaaatggtcacatcccaccacacttcaagcgaattgtttgttcttccaagcccttctgctactctgtccaccacattccacaattcaattggaaaaagagcgtcagtctgtgccaaattaagcgcctcaattctccctcgaatccaattatcagctactccgcctgcatcgtgaaccaaaacttcttcattttgcatgattcggcgaggcccgatccacgtgttaatgaaatagatgatcagctcttgaagctcaggagtcggctcaagaattgacatggcaatgcaaaaatagttgtagacaaagtcgacggggacaaaagccagcgcttgtagagaccgcaaggatgttctgacaacttcatcgtcacgatatcgcgtgagcaaatttggcaatcgctgaattcttcgccaaattgcttgtccaaagtgaaacaagcatccggttcttatggaatttggaaagacgttgccagctgcagtgatcgctcccgattcgaaatcgctcataatacggtacgggaaccaattattgccaacagactgacgaattgtttcgaagaatcttgtgtatgtggcgagagttttgctgggcagtaaaccataaactgccggaactgcacaatgatcgatgacaactgccattgtgtagacttgagtaaatccccttgggcatgtctaagataaaaacaattttacttattttgtggtatattggtagcggcacattttatatgcctctcgccactatcagctaaaagtgccctttagttattcacctcaaaagtgccatcgattgccacttcattctgataattcgccaaaagatcaaggccaaaacgagaacaaaaaatgatcattttttctccattaacagtttgatcataaatcgtacgatcacgcaatctgtccggtatgatgatttgagatgcgggtaagacatccaatccaacatcgccgacctaaccatttatttttaaaattatttttgcttattaaatttatatttttaattatctaattatcatttgcctcttcctgatgcttccgtttctgataattatatgttcgcctcatatcagctgcagagggtgcactgattgcccgaatctcatcactaaggttcgaccgaacttctctgatgatgttacggcttgtggtcgggaattcgctttgcgcctcttgtcggagacgttcagatgcttgtctcacctaattagctacttaacacccgttacattttaaatttctaccatatgaccccccaaaacgggtggatggttatgctgtccggtagtgcgtccaattttatatcgcgatccatcggcatcgacttcccaacggcactgtacacaagcacgccctgggcaataaggtggacggtttgggcaacgccaatactccattccgtcttcagttttcgaaacagccttagaatttttcgtttaacattttcacgaaattaaattagccttttaacctcgaaagtgtagtcatatccgctacgagatagaagaattttcccacgatttgttttggtctctgcgaatcggagtagagccattggtcaatgaattcggaaaaaaacgaatagagggaacagcaaatgatgaacaccagcaatgacaagtcgagaatgaccatcagcattcgggaacaccaaaacaattcctctcaaaattctcttatcaaattgacctccaagaaaattgacctcccaatataaagtgaacgaccggcccttccactatcaacggcctacggccaaagtacagtacaactgagttttacctcattgaaaataaaagaaaaatgctttattttactacatcatatataaatttcacccattaaatagtgacttttttaaataaaaatgactaatacacaaatataattttgttcattgtcgaaatcggtcactgtcgtaatcagccactgtcggaaatgtcggaaaacagtaaaataaatgaaaatagttcactgtcgaaatcggtcactgtcgaaatcagccactgtcgaaatccactgtcgaaatcggtcactgtcgaaatcaggcactgtcgaatattaaagaggcgaaagaattcacagtatcgtttctaatagggaaatattgacaggatattcggctaaaaacgggtttgatcatttttagcgcatttttaggtatacatttgagacaattgggcaggacaagaaaagaatgaagttgatgcctcatgaaactcggaattggttatgtttagtcgaaaatatgcttacataatactcataaaaaatacaaataattcaacccacctattctatgaccacattctgaaaaaaatcccagaaatacgaggaaagatatgcttggtcacaataaaataaaaaatggctagtatgtaaaaatttgcggtcactaataaaataaaaaatggctaatatgtaaaattggcgtccagaaatttttagactaatccgaagcaaagcacgaatgaattaaagaggcgaaagaattcacagtatcgtttctaatagggaaatattgacagtatattcggctaaaaacgggtttgatcatttttagcgcatttttaggtatacatttgagacaattgggcaggacaagaaaagaatgaagttgatgcctcatgaaactcggaattggttatgttttgtcgaaaatatccttanncnataatact

SEQ ID NO: 214 - DNA, 836 bp, Heterodera glycines
  unsure (1)..(836): unsure at all n locations
cttttcgccgccaggattaaaaaatctcgaagttttttgaaattatgttaaaaaacgctannattctggtacgattgctgaatttgtttggaatctacgtatggctgattattttgaagctagtaagaatctcggccatatttgtgcatcagagattgataaaaaatttagacttattaattttttttaggcccggaactcaacccctcctttatattcggtaacattttgacgaaatttttgtttaaaccaatcggcttcgcctttttcaatcgatccttcttttgtattcatcgccagaattttatcctaatataatatatacagtaatttgcccaaaataaagagaaacgtaggtggccgatcatttcgtcactgatcgtttcgtcactgttcagttcgtcactgagaaataatttttttaaatgttggcaaaatgtcattatttaaattattttcattaaataaaatattttttatttcagaaaaggttattaaataattatgttgaaactaaaatctgcatttaatttttttttaaatatattttttaaaattgtttgttacatgcgatggaaaatatgcacaaaaagagttcgaattgaccgatacattttgatttgggctaatggatcgttatcttaaatctacacatttgttgtttacttttaccaaccttccaacgaattggacgggttcttggttgagtttgtcgtcgattaactttctgatgagcgcaattgtacctgttcagttgaaattgaacccaagatccattttaagactttttttggcactaaagggaggataccatccatacaatttttcgaatttta

SEQ ID NO: 215 - DNA, 1762 bp, Heterodera glycines
ataacaacagttgatcgcagcggacttcctgtgaagcggcatatcaaagggggccggcacatcaaaggtggcgccagacgccgtctggcattcgtcaaaaatctaattcatgagaaatgtttgattaaggtggtgcttccagctttctttatcatatgaacaacttgtaaatttaagatcaaaacggtaacgttatgccaaaaatataataaaaatgaaggctatattatattcgtttaaatatttttttcggtttattggattcaagactgtaagcatcaaaggaagaagaaattgaattcccaagtgccaactaaggaagcagaaaattaggaaaattacaatttgaaattaaaatgtacactatattttcaataataattatataaatcatatattcatcaaatattttggtgtcagatcgatttgaaaaataaatatattagttatttttaaattattaataataaataaatagatttttcaaaatgaaagtggatgcgataaaagagtgaaatacaaagctatccaattaaataaaaaataatttccaagtaactacaaaatttaaaataaaattattttatgtcaagaaaaaagttcactaatatgacaaagaaaatgaaaatttaatttaaatacaaaataaaattcatttagtttgaaaaataaaatagtcataaaaacttaattcatatcttatttgaaaaaagccataattgaaaaatataagttcagagaaaacaaaaatagaatgaaaacttctttatttgaacataaaaataaaagaacttacaattagatggcattttggataatttgctttaattattttaaaaggaatttacattgttcaataaaatgataatttttcttatttattctagaaaacatgaaattttacttaaaatgttattaaagatactaataaaatatattacatcaacttaaaaaaatcaaaaaattcgaccaaaatcagaaaatatgacatttgctttattaaaaactataagacaaatgcaaataaaatggtgtgtaaaaacataaaaaatagtgtaatgtaggcattaactcgggataaaaccgattgcattgcacgtgatttgaattaaattgcatcttgacaactaaagtattaaacgaaaaagaaactataacacaatttatctgaattttcaaattaaaatatttgtgtttataaattttgctttttttagaccctataaatatgtatgtcaacacagtggaaagtgaatccgtgacacgacagctgggtcatggtaggaataatttaattaaatcaagaaaaacaaaaaaaatgctataataatttttaaagagtatataaattcaagtatcagaaacaaataattttaatttctttctttgaaaaaatatcataaatgaaatcgcgtgttattttctatgaaaaagtttattaattgcttgacaattaatcccaaataatttagctaaacaaaaggaggagtgattcatttaaacataattttgtataaaaaatcactttatgaaattgtaacaaaaaaaattattatatatataatccaattttataaacaagaacaaatgaattgcatagttaacaattaaaataaatgagctagccctaatataaatacatatttataataatgctttttttcggccatagttacactctttaaatattgattcttatttatttaggctctaattttttccatgagatgaattaagaattttttgttaattatctcataag

SEQ ID NO: 216 - DNA, 5381 bp, Heterodera glycines
cagctttcatttattcattaattttaaagtatttaacaggaaaaatgattaatcaccgcccgtctgaactgaaaatgtatataaatgacaaaggcaaattacaaattgcaaaaaataaaaatgtttattgccccattcactctaattctgtcaggggccactgggagcggtaaaacccaatggctaatgaaattgctgagaagctacgctgaacttatcgatcctccgcctgctaaagtattgtattgctactctgagatgaaccaatcagtcattgagctgatgaagcgcggaatcgagacacataatggcgttccggatcaagcactgatccagagtcagccgaaaccattgcttcttgtgcttgatgatttgatgcttaatgtagggaatgattttttggatttgctgttcacacgcggttcccataattggaatgtcagcgttatttttgtcacccaaagcctgtacggacgtaatattaagaccgcaagggcgaacagtcattatctggtactgacaagaaacccgtcgggccaacttcaagtcagaacggtcggctcacaactttttccaaaacgattaaattactttatggaggcttacaatgaagcgaccagtcagccgttcagttatttggtgataaatatgcacccaaatgctcctgaaaatgagcggctgaccagcaaaatatttcctggagagaaccgtgaggtgtatttgcctatagaacagtaatatacgcgtgcatgtgcgtgttgtaagcaataaactatttaagaaacagaattttcccatcaaaagtagaatagtccatacattcgcgataactcggattttcttaaaaaattacttccaccaaatcggcaaaaagaaaaacgatttgcttcgcggtgcttcagcagaacaaatactaggcttggtggaaatttgtgctaatattctgaagtttaatttccgactaaacaggcgtcagaggaggcggttggccgtgtacgcagactactaccgagcaatcgcacgttcacgcagtgagcccacagccagacagcggctacaacaaggcagcggaattgctttaggagctattttggcaccaataattagcgttttggctgagcagttgatccaaaaaattgttacagccgcaccggcgtcaacaacaaaaacaacatgaagcacactaaaaaaatggtccttgtaccggagagtgaatatctggcgcttattaacatgttgaaaggaggcgccggcagatctgactcacttctgaatgagaaagctgctctcgatgcccaaatacaaagcaaccttagcgacagcaaagcgggtgcagatgtcaaaatcaagcgacattcttggttgtacaaacaaaggcatcagttgaaggatatgattgagaacaagccacaaaaggtgatagtggaaaatgcaacgggcacagcgccagcaaacattgccccgtatatgggcatacaaaaacccacggtcaacaaactcgacgcagtggacagtcaagatgatgacaaaaaaattaagggccctaaaaaggtcagacggaaagcgatgaatgctgctacttccagaatacgaatgtccgccggcggcattacaagttacggagaagaaactgatgattacacatctgcgccagagaccgatctgttgccgatgagcaaaaagagacaacaaaaatttcttgaactgaagacaagcaaggaacattacgctaaaatgatgagtatgatcgcaaaagaccctgacaaatttggtgtcgacaaaggaacaggcgaaatcttaactaattttaaaaggccaatcctacgttccaattatatggattctttgttgtatattacgggacagagaagtgaagcgcccaaaggtcaccgcttctttgcacaaaaactggctgctgatccgcggatgatgaaattttttgaaaccaatcaaaaaggagaaggtaaaggcactaataggaagcgagaccgtacaatgaaaaagaagattgttcttgtgagagcaaacgctataaaaacggatggactcagtcgtgtggtggcacaaccagacaaagggttggctactcgtaaatttaagccgactttatgggcaaaactttagctgcggaaaagttgttggaacaagtgtattatgaccttcggtcgccagcgagttacgctggcattcaaaaagtgttggcggaagcgcagaggcgaaacccgagcattacttataaggatgttcatcaatttttgcataagcagcgcacctacacgttgtttaaacctagaaaaaaccgtttccgtagactaaaaacagtgcccagcgggcttcatacggactggcaatgcgatttgtgtatcatggatgcactgaaagagcataatgacggatttcgttacatcctagtgtgtattgatgtgctgagtcggaaaattctcactgccgaggttgagtcaaaaaaaagtgagcacatgattgaggcttttgagaagatttttaaaaaggcgggcgtgttgcccaacaagctgtacagtgatgcgggtcttgagtttcaggcgaagaaaatgaaggactactggattcaaaaacaaatcatcaaacacgtgatgtatagcccacatttgcacgcaggagtcgttgaacgtgctaaccgtacgatcaaagagcgactttacaaatattttagcgaaaagaacacaaagcgatgggttgatgtcttggaccgcattgtacacaatctgaacatctccgcgaaccgaacaacaggaataaggcctgtggacgtgaactttaaaaatgctgccgcactacgcaatcgcctatataagcatagtgaagtggataaaaattctgcaaatagctcaaaattacaactgggtgacattgtgcgaattagcaaggaaaaaggtgacttttccaaaggttattttccaaattttacggacgaactgtttcgcatttctaaagttaacccaaccgacccaccttcatatagaatccgcgacctcgacggagaggacatcaaaggaattttttacgagcaagagctggtaaaaacggttgcagaaacatcacatagggctgaggtgttgaaaactcgacgacgaaacggtgccaaagaacattttgttaggtggattggctactcagacaaacacaatcgttggattcgagacgaagaccttgtgcgaaattagcagacaaaaatggacgaattttatattgtacttccgtccaacacaccgggctctgctaacacgacatcaaattttacggtcaggcttccacacacgctggagctggactcaaattggactgtatctctatcatccataatctacccgtattcatttccttcagttggaattgatgaggatgacatcattaatattaagcttgtcaatccgaactacaggtttctggatgataaaaaatttgtgcatgttgaactaaaggttccaagcatgcaattttccagtgtcgagcatttacggctgaccctgaacagtctaatacgggaagcatatcatcaacaaatacctaaccttggtgaagccagccgaacgaaacggcaggcaaatgtgacagatttattcttcctagaaaacccagtggattactgggaaaagattggagaacagcggacaaaatatgaacagttagaatgggaagtgaaacaggaggagaatgaactttctgctcaaaatacagacgcggaaaggaaaaagcaattacaagaagagcttccaatcaaacggctccgcatgcggaggaaaatggaggagcttgaagagcttgaaggagctgcgggacgacgtgatcaggaaagcccagaaaatgagcagcgaaagatcagcgagtttttccaacaccatcccgaagattacaataaaaagctgaacgaggcaagactggtattcacaaaacacctgtcagggttgcaagacgtgatgagcaaatacattggtgaaaagaatgtagataaaattcgtgagctcaacaaagaggttgggaggttgcgtgaaaagatcaaatacctacagcgtaacttgaccatcttcgagaatgctgtgcttcagcgtgaacaccagaaatcgttgtccgaatacgagagtcaaagccatcagcagaatggcgcttttgttaccgaattctttgacaaataccccacaaattattggcaaattattcacaacaattataagggtctcacggaacattttcagaagattgaagaactgcaaaaaaaagcagtaggattaaaggacgatgcctcgttccagaagaagatcgagcaagcaaaaaaactgattgagtacaggcgtaagagatttgctgcgcttgaatttgaggcaaaaaagcgtgatgaacaaaaacaacaacaacatcaattttcttcgactgctgctgctagtgcaattccagggccgaccgcatctgcattgattgcaagagagtcattaaaaccgcgtacgggtaccaccatcaatgtggttggtgctgacgataaagttgatgacagtcaacaaacaacaaaaccaataagcacgcatggcgaggcattaagagaaaaaatatcgcagaagaaaaagaatgatggtgatagtgataaagctgatgccagaccacaaacagcaacaacaacaacaacaacaacaacaacaacaacaacacatggtgaggcgttaatagagaaaatagtgaagcagaaaacgaatggcgatgttgacgatcaagcagatgacggtccacaaacaacaacggcgatagcaaaaacgcatggtgaggcgttaaaagagaaaatattgcagacgaaaaagcagcatacggatgacgctaagcaaactgcgaccaatgtagagcaggacaatgctggtggtgatgttaaaatgacgcgtggtcaaacgctaatagtcggacttaaacagagtgatgaccagaaaaaagaatggagacctcccaaggatgatgatgctgatactgatgatgatgatgatgatgatggattagctctgaagcatggagaagtgctgtggaaactgttgctgtcgacggcgccgcctaataagccgcaaacgggcaatacccacagccaattggttgatgttgaacatactcgcggacaggtgctgatggatctgctgaaaaacatcgtagaagaaaaaactgatgcacaaaaaaaacaaaaacatcatcatcatcaccattatcataaacaatctgcccaagttttccagaaagtaagcagaggtgaagcgctgaaagaactggtcaaaaaaacgaaaaatgaacagctgccacaatcttcggctaaaacgcggggagaaattttacaggtgatgttggagcatatgaagttttctagggaggaagag

SEQ ID NO: 217 - DNA, 8550 bp, Heterodera glycines
catggcgaacaggcgcgctatatgccggatttgtcgggcggcgttaaacagttgtatgtgtatgcaccgaagcttatagaggagtgtattataggtgaccggatggcccctctgcttcgggtggtcaatgtctccgccgtacctgcaagcggaggcgggaccgacgtgcctgaggttatatataccaatgaaatttttcattcacttcaaaacaaacgcatttccgaaatttgcattgaaattcagaacgcgtttggacgctacgtgaaatttaattggggaacctgtattgtgacactccatttcaaacgaaaattgttctaaggcatcgctatcaacaacaacaaccacaaccacagaaatgacccacgttacgtttaacccggacaccataaattgggcacctcttcttgccctacaacaggagggaaggggagaaatgcaatattttgtaggctcgcgctatcagcgtggcgctggccttttgaaaaatgttgcacgattcctgatgccggttgcctctaatgtgctaagagcagtgtcacgagagggtttgacagccggaagccggatagcggaggatctttcgcaaggcaaggccctgaaggaatccattcaagcacacgctaaacaggggatggaaaacttggcggaaaaattgaaacaatgtgggaaaggtgcggccacatcaagaatgagaaagagagcggtaaaattgacgacgaaaacatcgaagggactgccagtgcgttcgcccatgagaggcaaaagacaaattatcgatcagcttactttcgcaccttaaaacgacatgggggtgtgccaacacacgcacgcgcacacaaaaagcctataaatagacagcgcatacctgttctaactcactttgcaaaacatttagcacataataacataaaatgagcgtaatcaaaaaaattgacaaagacagtgttgaaggcttggagggtagtctgtcactgttttcgcttccgccaacaaatgtagccataaacaaaaccagcgttcgagagttgctgccactgtccgcgttgaatcagaccgggccatatttgttccgattgttctcggacagtcaatactgtgacttgagcaaaacatacatgtacctgctcagttcaattgagcgcaagaatgccgcgggcgaatgggtaccgatcagtgacgctgaaccggatgataagcgtgtgagtgtagtgcagaactatggcagcagttttgtccgcgcgttgaaggtcaacatctcgggcattgaggtgtttgacagctccatctattatcattacagggactacataatgaatgagctgggctactcccatgaaattcgcaaagctttccacgaggcggcctgttactatgccgatgaggatgatggtcaagacagtgccactaacgagggcttcatcgcccgggcatcccgattttcaaacggaaagcagtgtgagacgatggtgaagctgaactttgaccttgctcatcagagtgcactgatgctgaacaaccaagacgtagtgttcacgattcaccgcaacaacgatgccttcctcctgctcacgccccattggaagaaagcggacggtacaatgcaggaaaatacgaaggaatatcgtgttcgtgtgcacgatatgcggctctatgttcgcacggtggacgttacgccaagccttaacctggcaataagtcgtcagttggagtccgcctcggccaaataccctctgcgcaagattgagatgagctccatttttttgggaaaaggaagaactgagctggcccataacgtgttcacttcaacactgccgcgtcgtctgatttgctgttttgtttcaactgacgcttattcaggcaaccgaaaactgtcacccttcaaatttgagcatgcaaatgtgcgagcaattagtgccgaggcgaacggtcaatcttttcccagcaccccgtacctgctgtcgtttgatgctgcgcagcaacgttttatgcgcgcgtttgtggacatgtatgccggtcttgggttggatgactcggacacaaaaacggtgtccattggactccaacgtttcctaaacggatgggctttcttcgtcatcccaatgacctcaacgctggatgatacagatgggtttgagctgatccgacagggtacgtgcacgcttaaagtccaatttgagaagcctataaaagatgacggttacgaaatgttgatcctcggcgagtttgattccgtcctttccattaacgctgaccgtgtgttgagcacagacggaagtgtttaaacaaagagagatagagagagagagagaaaatgaattctgcacaaattgacacgttgctgagaagattgcatgcaacaagaggtaagttcatcggtgtctacccgtcaaacaaagtgccgctgattcacgacagacagagacgactgcagcgctaaccaaaccctgatctgtctgcctatctcaacaattttcgccatgttcaagtgaacacgcagcaaattcagttcccctcatcggacgcttgcggccacttttgtgtctatttcttggccagccgttgttccggtgtcccgttttgcgtggtggttgagacgttacgcaaaacgcgcgggatggcggactggttggtcaaatggtatgtacgcatgttagtccatcatgtataaaagggtgactaaaagagagggatgccacacaaatgcccgctcgctataaggcggataggcactagaaaaaatggcgttattttccatactactaatgctgctgctactcctgctccatctgtccggcggagaatggatcaacgtagagctgagcgttgacccacccaatttctttgaccgcacctttcgctccctttccaagacatcacccatccaacattggttcggctacaaccggaacaccgcgtgtcacgttgagcgggaaacaaacataaatcgactgtacaacagtgctgatatgtggaacattgccctcactgatgtggacaacttcatgagcatggggcggcaaactatcgagttgttgtccagcgccttgccgtgggcgtgttttggacatgaccgccacagttttgtgatttttgaccttcgaaatgacgcaaatgaagtggcagttgtgcgcggtcatcagcacaagatagcacgaaatttgagtgcatatggacgcattttgttcgaccatatttccggccggttgtacatggtggacaagcacgagcgccggatccatgagctgctcatcaccgattttgtgcgatggtggactctgaataacactgacggaggtggtggtggtggtggtcataacggcggcggtgagaacagcacggcaacacactcgttgaggagcaactttgtcgggtttttaccagaacaaaaaacggattttttcattgcggccgaccatgtgtacctgatttggcgtagacgtgtatacaagttccgtgttgggcactacttcaatgatccttcctcgcagctacagtttttgaccaactccagtgacattcgcttcaacttcctcatattcgagagagatgatgacgccaaattggaagacagcactgatcgtagaaacagcagagcagcagcagaagcatccgcaggactaacaccatcatcacagatgatgaacagcattgagcggctcctgctcgctttgatgtacctctttgatgtggcagtcatctgcattgccgtttgtgtgatccgaatactgcgccgtacaacatcaaattcgggcccggacaacaccagccaagctcgcagcaacgatgtagtacacactacggaaatgatggcactgacaagtggtgaatatggtctgatccagtcactttcgttacctaactcggggggcggagctttcgcctctgtctacaaataatccagtgtacactgtgacgcttttgtcgacagcgaagctatgtctaaccagtcaaccactatttaagccgagcattttgtaccattgacttgctggcttgtttgatgattgttagtatttgttctgttgttattatttttgttgcctttctttctattgctgccgcggctgctatttaatgcaaagagcaataaagcattttctacaaacatttgcgctccaaactgttgaagagctgtacgcatattttaaagaggaaattttgagctccccgggcgaatattacccgaacccgctcgcagagttcgtttgtgtgcacattgccaacgaggatcacgctgaccaaccggtgcttgtgaacggcacacttgacctgatcgaaggcgtagaactctactccacatgttatccgagaacggaaacggggaccatcgattggtaagtttgtgggagcgcacgtgtgcgtctgtgttttaactgaagcgtaaccaaccagccaaccatttaaacttcttctaactattcaggagcgagccgatgtacgtggagctgaaagacctgcgcatttgtccagccaattcgccgcgatgtcattgcgtacaaccagcgagcaacaacaaccaacagcagaagctgccgcaggaacagtatttgaccctttggatgggggaagtggacgaggtggacgaccatcaccctcacatcaatcgccgcctgaatttatgctggcgcgacaacgtcgacgacacagaaggcggcagcgaaaactgagcaatttggtgaccgcgctgtgtgatttcaacaaatgcggaccggcccgactgccgatgttgctccgaaagcgacgagcggaaaacctggattttctctcgcgtctctgtctgcagactgtgcacttaaagggcgacagaaacgtgcatttttcggccgccgcattgtccaattatggtgctaatcgcacgtttgcctaccgcggccttctgtccataacggttgagcagcatttgttcactcggcaccgtgtccgcctcaggcacccatttctgccctgtgttgtacaagctggaggcaacaatcactgttatttctaccctcttgagctggtccgcgtttgccagtcgccttcgtctgggtcacataccgacaataacaaaaacaacatcagcaacaacaacaacaacaaaacaatgaggaggatgccaatgcagaggaatcaacggctctcgcgggatcgtcttcatcaacagccgaagcgttctagtgtttgtttgagagatgtgtacgatccataatgatttttatttttttcgcgcacacataaacacaccttatataaatgattgttaaaccgtgttgttgagaaataaatattcatttttttgtttcaatgagtttttctgcatgccaaatagcgcaacaatttatttttggttaacaaagctgcctgcatgcacatcagcagcaacaacagaagaacagataagttgccttatttttccacatcaacgcattcttttgcagtgttttccacttctccacactgtttctcctcttccacctcccccttcggctcctcacctgccttctcctccttctctccgccctgttccaccaccgccactccttcatctaccttaacaacttctacgtactcctcctcctcattttctttttcctttttttccttctgcatctcttccaacaattttttctcttcccaggcacgaacctttgctgcagaacgttcaaccctgtttgagatgagcatgtatgcacgaaaaatttttagtttagttaaaataagtcgcacttgctaacaacagtctccagtgaatctcgtgcaaagtccaccacagcatcatcatcatcatcttcagcacccaattcccgctccattctcgaatatttggcctccagcgcttcaagcctgccaataaatcaatattaaaatctaacgggcagcagagcaataatcgtagtaagcactgtagcttttattatagaaagaggcgcgcgcgcctgctcaccattcacagcgctgtcgctctcgcgccttcatagcccccagcagccaggacgctgacacaacaccaggtggcgggccatatcgtctcttcctacttccgctgcttgtggacggttgatctgggccaccgctggaagacgaggaggaggaggagacggaaggggatgaagttttcagagcatcaccagcgtcttcatcagcccgacctactccagcatcgcctccgccctctttgccgcctcccttctccatttcatttgaacgccccccgtttttattatcctcactttcctgattgtccgagcggtgcattttgggcaaaaatctattcggtttgggctgctttctttatgcttattattattatattcaaggcattgtcacatattatggatggatggatgtacacgggttgcgtgttttaaaaaaaaacattgggcgactcctgtgcttttgatcaccaatagaaaacaacactttattattattgagaaccaaaatttgcttatgatcgatatgaactacggctgctgctgctgattctgccttatcggtagccaaagggtaaaacttccagctgttcgttgattatgcccttctgacaaacgggcagatagtgctttctttgcttgcgtgtgataattcggctctcccttgtcggttgtattttgtcatatgtgaacacagctgcactttgctgcacggcgacatcaccgtcctcatcatcatcatcatcatcatctcctccgccgcgatcggcacgtcttccttctactcctccgtagctgagcactttgttgcggaagcactcaaattgtagcgattgactgttccgcacatcgaaggtgatgccgcgaattttttgaacatatttcacttcaccgctccgcacatttgtcatacgaaaggcgtactgctttgcacctaagtggcaaacagttaacacatccccacgccgttcgatggtactaattggcatagcgcatacctccgcatatgaaggtttgtatttcaaatcccgcgtactcttcggacatttgtccaagatattcgcccgtgaggattggcacccgatcacgtttgtgcaaaacaatcacgctgtcggtatcctggagacacaacgggaaaaggtaactcttatgccaaccactgtgacaaatgcatatgttcgcctacgataactgactgtataaagaagctcggctccatccgtattctgcacttgcatcatgtactcaaacagcttcaatcgagcacgacctggagtagaaaaaaacaaacaaacatttttttttgtttgttatacagaatcctggttgctgaatgaattgacaatttacttgttgtccataagctgagcactatgttgcttgacgaatgctcctccacgaaactttttttgtgccggtacatcactcgaatggctgtgtcggatagcggaatgatggcagaaatttcgactttatggtcgagcaccaatgagtagaattcctgcggtcttgtgatgaccttgtttgttcctagttcatttctcatgctaaattttcccctgaaaacagattgattgattgattggagatggatgcgatcatagtggccaaaaaaagaatgaggcgactgtttgcataatttttttttttgcttaccaaagactgttcaacattagtttagcgatgaagcgaagccctggattcttatgcacacggtcccacgtccagagtgacggcatacacggtggcatatgcatcaataaattggtgcctttgtgcctcagttgtaatcccatctgggaagccgctagcctcaatctgcgtaacatatatgtatgtgcaatgtgcttgtttggataatggttcgggaaacgggtgaaaacacgaaagaacaagaaacctgcagccaaccaaccaaccaaccttcagcttgagtaaaagacgtacgtattccttgaagatttggtcgctcctgaaaagcacagtttttgtttccaatttgagaagaattgctcagtaaggcagaccactgctcatagtgccacgctctccagaaacggtccacacggtagccgtaccgaagggccattgccagctcaatgtgagtgtaattgccggtgtatgctcgctgagcatccgaatgtgcgcactcgtgccggcatcgcgtgttcaacgtacggaactgagacgcacaacgatgacagcagctgaacaatagacgttcatccaacttcatgggcagcacagggatgcgtagccctcgtggcggaatcacacgaacgcggtaaattcctttgtactccagctgatcaggcgagctcctggttattagtgcgtgcgtttgattggttctaccagtaacagtgtgtttgataaatattaccaattaaccagcatctgtacagcagacgggtatataattttaggtactccgattggatactcggtgtcgtagtttacctaaaacagacattcagaataagcatatcataatgctgattcggatgacaacctacccacggataaagactgacaatatcgtataccgatatcttttcatcctcttttggttcggcaaacagcttcaacggtcctgtccgacctgaattgttttgtgaacatcaaacgaccg

SEQ ID NO: 218 - DNA, 7183 bp, Heterodera glycines
gagcatccgaatgtgcgcacacgtgctggcatcgcgtgttcagcgtacggaactgagacgcacaacgatgacagcagctgaacaatagacgttcatccaacttcatgggcagcacagggatgcgtagccctcgtggcggaatcacacgaacgcggtaaattcctttgtactccagctgatcaggcgagctcctggttattagtgcgtgcgtttgattggttctaccaggaacagtgtgtttgataaatattaccaattaaccaacatctgtacagcagacgggtatataattttaggtactccgattggatactcggtatcgtagtttacctaaaacagaacattcagaaaaagcatatcataatgctgattcggatgacaacctacccacggataaagactgacaatatcgtataccgatatcttttcatcctcttttggttcggcaaacagcttcaacggtcctgtccgacctgaattgttttgtgaacatcaaacgaccgacccactgaccgaccgatcgacatgagagcacctcagcaaatgtgtaccacacctacctccaaaatatgccgatctgggatcaattgggcctcgctcgttgcctatgtcgccgaagaaggctctcatttgatgattggctgcatcagacagcaaggcgttaatttcacactccttaattcacttttttttttggtttgcacacggtgaaatgaatcattattagaattgatattgttgggtcatcaaccatcacaacatacccaaatctcttcaaccgtcatgcactctcccgtgcaatccggttctcggagctggtgtagtcgatcttgggtggcctcattaagctctcgacatgttttgccatcgaccagcttatcctaagggtcaaaacaccgctcgcaaccgtgccaatagcttggaacatttattgttattattattatagcagcacccttatttaacgtaccatccgagcacttcaatacacttattttgtgattgaatccagccgtccagcttgtggttacgaattcgtttttcacccccatttccggcatgttggatctggagcccttcactttttgcgcgccagtcaaggtacttaatggcctggaaatgcggtaacatttcttatttcttgatattttcaattttaataaacagaaccatgacgctggcccgatcgtttcgctcatagcccgcctctggcactatggccaattgcttctccttcatgaaccgggcacgaaataggttcatgcatgcgcttaatgggaaaacagattactatgcttcggcgcccgtgtatgcttaaaaaacctcgcaatcgtacagctgaccggtagcacatcgtacccgctcgtcaccttacacatcagaaggctacgaaatttgagtattgcttttagcaaaatttcagtgtcattctgacagtacacccgcagctcgtcgggtaggtggaatggcgtgtgttgattttcctcgtacctggagaggttgtttgtttgtatgtttgtttggtgctgcaaaaaaattcaagtgcagcgtgagaacagacacactaccatgccatgaacttctccattttgtctttgctcattgaaccgggacagtagtcgaccaacggaggaagatttggcagatgaacattgtaattttccctacagcaaaaaaaaacaatacaaacagcgcatagtcagcggtgcccatcacacatccaaccttttgttgaacgcgtaaggaaaaaatggtttgtcagcgcagttgaggtcaaaggtgtttttcaggctttcgagacgtattggcatcatcaggcacgagtcacgccaaatcagcattgagtgcacgcgcgaaccttgtagccgaatttcgaatattttcagtccgttcatcacaacatcgggtcgcctccgtgtttcgccaagatatttgagcacaaaatgaccatcaaaacgggacgcgttgtgggcctggaacacacacacacacacacacactttactacggttattgtgttttacccaaacataggtcgtaaagcgcttgtcccaagcgtaaagaatccattccacgaactcggaaaccggctcatgcccgtccacttcggacctgagagagagagagagcataaattatggtttagttgtttttgttgttgttgatcagataatgaatgagcttagattatgttgacatagtaataacataaatatgattctaactcttagcgctgtgctaaccaatctttcgctcgttccaccacgccgtcaatatttttgcatatttcacaatcctccgctggcaaccgatggtcctcaggctgacctatcgcaccggcgtcggcatcagcgcagtcggtgcacagcacacgcgcggatagataattgactttgtgcacgcgatgaccgcgatcgtccagcggctccagccgcgtttctgtatcccagcagacaattcgatatcgatttcgctcttccggaacattcagctttcggatgaaacatgaccccgctttgttctcgtggtaaacctatcgatgacaaataaaagaacatacgaaaagtaaacacagagcaatgaagagagaaagagaacagagaggctggaatttttgaataaaattggctaccttgcatcttctacaatattttgtgcgacatttgtgctgttccttcgggtcacactggtacactcgttggcagaatttgcatcgtttgagcagcgcacatgtcgagccctggtggtcgttgaagcattgaagggagaaaaagtagcgattgcattccgcacaatgaatctttacgccatcatgcttcgcacagggcctattgggtccaactgtgcgggagtggtatagattaattgaatagggtaaacaacaacaacaaatgagttatgaatattaccttttgtgcactgtgggcacctgaccttacagtgcagcgtatgtttattgtccaccgtataagcacactcacactctacgcaatacttccttgccagtttgaagaaacagttgatcttcgtcagtgcgtcatagtggctgttggacaggaaaagtggtacgtcaaaatggcgtcccatcggccccttccagattggccttggcagttcctccggacggtcttcaaacagtacaatgcggtacagaccaggaaaacgttcatcctgagcaacaacagtacatataacaacaaaaaaaattttttgagcaaacccaataggcctggacttgctgcagatgatccatgccatatgccggcaggtcggcagtgatgcccgtatctctcatcagacgcgtggcagccatccgcattgcctcgtcactggcaaccagacggttgaacagctcatgtgttcggcaaaaatcgggcattagcagcgccatttggatgatcatgttgttgttcatgttgttgtcgttgttcagtccaataaacagagtccgatcatggtaggcacgccccgcaacaagtgcatagaacatgcaaaagcgacgctccgcttcaccagtgttccggatccggatccgataccggtcgttgtagccccagtgctggtatggatgaaagcggggcccactgccctgcggaggcgccacacaagtgatggtcatctgtactggttcggacaacagcagtgtacgcttgtccatgatgccggcgtccgggtccgctccacctccaccttggtcgtcatcgccgccgccgtctgtgccgctctggcccaatttatcaagctcgcccatcaaaacgtcggcattgttttgctcaggtgggcgcagtgggagaacaatcggatcataaaggcctgaacgcgcaaatcatgtaaagctatatagcatccgtgccgcgtgcacgcacgcacctttcccatgcaacgcaatgcctattttttgcaccgagcgcccgtccaattgctgctgagcatttctgagtgctcgccgaatcagttggctgaacgcgttgcgtagctgctcgtccggctcctcgtgctcaacgttcagctcaaattcgctgatgtgacgtgtcattgagaaacggtccagcttgtggacgtaatttgctgtctcacggaacattttctgctgctgatgctgctcatcatcatcatcatcatcatcatcacgttcatgatcggattcatcaattggtgctgccacggtagtggggccggctccaaattggacatgttttgtgcgatggcgatgctgctgctgagtgccaaaatttgaagccaaagaagcagcctcaaatgaggaggtcggaggagaaggaggaggcggcggtatgtattgttcaaagtaggccatggagcggaaatcccaacgaccgggcgttgctgtgacaggagcagcagcagctgcagtatcatcatccgcatcaccgattttccggcgttgctgctttctttggcccccgctcgaagctgtgccagcctgtgtcacccctcttttggatgatgatgatgatgatgatgatggctgcatactgtcaattcaaactgttcataaatgcgcattttaataaataatgcaatgcaatattagcaataccatatcggttcaagcgtttgacaaaaaatgaaagcggaagcattattataccatttttcaacaaatttcgcttccaattaatgaaagtgaacattttggatgtctaaaactagcaaacaacaacaacatcgtcttgacagcaggccaatcgacgggcaattattttgttttttcactatttggtttctcctttccctcctgctcgtccacagcagaggtggatggagcagtgacggcggtcttttgatcgacaacaacaatttcgtcttcatcttcttctcgttcagcctcaacaattctggcttttttagcggtctgtgagctgccttcagcttcgtcatcagaggcaaacacctttgaaatcagccaatcgaattggccttcgaagtcttcggcagtggcttccttcatacaaaaaaacatattccgtacatcgttgtataataataataataataataataatcacacatttttttgtaccttaatagtcatttttacgactaactccttttcaagttttgcttcaagcagtttctccaatttgtccgggttttggtcacgcatgtcgagcatcgatgccgctttgataccgatgtacttctcagcaacgtagctgaacatggtggcacactgcgtaacttccggattctcgatgtctttgagctccactcggcagtacatgcaaactagcggttttttggcacggtgatcacacgacggacatcgaagctcagaatccagcttacgtctgcagaacagtccgccagaaaattttaacgggcatgcctgtgaccggatggaaccatcagcaacaacaacgcaacgaaaaatttaattaaaaattgatgaaaactgacattgtaaaggctgtattggaggttgacgagtttggcgcgtacataaaacacgcctaccgagccgaaatcaacgacttcggcgagccccttcagatttgcgggcagctcttcggcggatgacccacgccgtttccccgcggcgccggtggatgacgaaatttcgaagcgagacaggcctttggcaccgcttttgctcattttgatagataatgttaaaaattcaaaattcctgaatgcccattagaattaactatgacccttatatcttgttaatatagtttattttttacaataaattgtttattagttttatgagttagtttttgattaatagggtgtgtgaattgaatagtaaacaaatttgcataatcatttgaacaaatattttgaaaattttgtgtcagagacaccgaaaaacgccaacccaacaaagaccaataacacagattcaatagtatttcaaatactaataatttccaaatttattatcgaaattctgtcactgtcaaaaacaacgctcgatacctaaagcactgtatatcaagtggacattagcaccataatttatgttataattaaaaatacgaaattaagaaatattctattattattatttcattatgttttcatttttctgtatacaatatggtcttgcgtttttcgtcttatccaaattgtttttaatattttagcatttttttcacagaatcaaacgcaactgttttcttcgaaaattttaattagcatttaatgaagtatttttaaaattaaatgaaaaaaattggtttgggtatgtcaccaaaaagtatcgccatgtgaatatttttgtaaataaattcatttttgttaacagatttttggcttaaaagtttgttattttaatagaaaatcattaaataattatttatctgtacgcgcttaatttgatacagcagcgcgcaaaaggggtagaattccgagttcacaaactatccggaagccgaaatttaggctcaaaaaatagttacatgaaaatgaaacttggaattccgaaccctcaatagtttctcggcataaaaactgttttatggaactgtacattttttaaattttgaaaaaaatcttacggtaccactctcagtaatttttgactcaagaaaatgttgcttaaaataataataataataataatatatttaatataatttaatccattttaaataatattaatatttatccatttttctttttttatttaattttgcgttttttgtttacttcttttttgttgcggtaaattttacttgttcaacacaattcggtgacaagattaattaccaaaagaggcaaaaaaaaagggggggggagggagggagggagggagggacacaatgggttaagagggaggagcaaatgccgaaagtgcaaattgccttattcattgccattcagttatttcctctccgatctcctaattcgctattctgcaatttatttttcctttatttattttctattaaagtatttggttagctatttatgaggtagaagtttttgaccacacttcaaaatgattgtggcacaggtagtatgtcgtagatagaaaactgaatttgaaacaaatttatttatcattaataatattcaaagccatgaagggctttgttaagtgaaccctttttacaatttaaaacacagcaataattgtatgaaggtttcacttagctgaaccctgaaggattatgaagaaatttgaatgaaaactggaaaaatgagaatgagttag

SEQ ID NO: 219 - DNA, 1604 bp, Heterodera glycines
  unsure (1)..(1604): unsure at all n locations
tctagagtcaaaaaataaaaacaaagggttttcagttgttcaatagctcattcgaaagctctttttcagttctacaacaccttttatgagttttttacgccctaaacttatttttcgtcgggaccacaattctacccaattgccgtgtttgataatatttgttattttagccaatgggctgtctaaacaaatggtggacgaacttcttacccaaacattgaagcgccattaacacggttttgcagtcattgatgagatgtgtgacaaacagtaaattgtaattggaaatggatattgccttctttcatctgtctgtgtttattataataactcatatattatgttgtttttgggttgtttaacctctgccagtcccattagttttccttccttttccactaatattgttagacaatttgttcaagtcaattcttcaacctcactgatggaaagtgacaccgaattaaaaccaaggaacactttgtcaccattgatggtgaatattttcttttccgttgttgtaatatgatctgtatttttgacataaatgaaatcatttgatagttatgtacaacaaataaattatttgaaacttttctctaaaactcactattattttattttgacgactgaaatggacaattatgctgaaaaaagagtcaaaatattcaattttgaaaaacaaaaacgacgtgagcgtcggattcggcgtcgggcgccggagaattgctgcgaaagcgggcgggntgaagaatgtacggacttaggtacgagttgggcggcctttgaatgagtcagtttcatttctttaggtagaagcaagtcggtccccctacaactgtgtggttgtcttacttcaaaaaggtgctcaataacatcggcctgcgaatgctcgaacggttgttgagggttgattaccacggagcactgatgagagtcggagacgcaccgaacaaaacgcaggtggatggagaaaacatggggaaaaggtaatgaaaattccaaaacagattgggttgcatggcattgtgctccacgagtccaaatccacttttcaaatgatcaccaaacggaaccgactcatcggcaagtccattcattttttaagataaaattgattattttacgctgtccatttagtaatcgccaaggagaatgccatatttcaatttgtggtcgatgggaaattgtttactctctttggcaatgccatgcgacaaagaacgcatttgagaggaaggaaagcgaaggtgcccaccacgattcctttcttgttggattgatttatgaaaccgatttattcaaaataagataattatgaaattaaattgtcattctcctccccccacccctcattcatcgatcattttccatttccaaatccgcctgttgacccaaaaccgtttgccccacgttctgtcacttccaaattgtcaacctctatgaacttaggccgtgtgtaaaactcgcagatcaactgggcaattctatctccgacattcacctggatagggattataggggaaattattgtttctgtcactctaaacaccttgaagtccttttctccgaagttaaataggagtaccttgaatgatattttg

SEQ ID NO: 220 - DNA, 21602 bp, Heterodera glycines
  unsure (1)..(21602): unsure at all n locations
tccggggattcaaaaatgggtcagaaattaatgtcagaactcatatgattcagcggacccagaaaaaacccccaaaatatgttttaacaacttttaaaaaagaaaattttttaatttatttttcgccgggacaccaaatttctcagttatttcccacaaagcaatataagttcaccctcaattctccgcgataatccgagtcaatgacaccggcgccaacatcgattgaatgtttaactgccaatcccgaacgaggtgccactcgtccgtagtgcccctccggaatggccacactgagtccggttgagattagcacttggccttaattaggtagtttggtcatgtgtcatacaattataaaatttagtaccttttgctggcaccacataactttcggcactatagaggtcagctccagcagaattttcagacccgaaagttggcggatgagcctaaactcaaaaacattaaaaatttttaatttatctaatattttgtttggactggccttatcggaaattctaacaaagcgtaagaccgtttcctgggccatcgtcaaaaccctagcaaatttaaacgaagaatgaaaaatattggcgaaattagaaaaggtagcaatggaaagttcaatatcttattttttcgctttatatttgtatttgtaatttcccgcttcaaaatatttaaaatatgccacacatgtcaattttctattgtcaattccgtaccgcgctttgtctgggtcccttattcccgaccccgtccaggcctctatctgcgactaacgaatgtgaaaaattgtaatttatatatttctggttgtattttttttacagattataattcattttatcgccaaaatcacaaatgagctcatccgctttggtaaagataaagttggatcaggaagtgtgtgctgatgctgagaaattagtgcgcctttacactgaattggcagatgttcaccggaccagnaatttgtatcttttaaaattcctttttttccctacaatcctaaggaattgtgtccttaatttaatttttttattattattaaacctgatcattcattttcaatgaaactgcacaaaaataccaaaaaaaaaaaattaaaataagagaactggatccgcaaatttgatttttgtgcgggatccggcctgatccgctttaggtaaaacaaaaaaggtttaaattaggggatcacaccccccgccccgctcattctttacaattgtcatttccatttaagcaaaattatattcggcgcatgatcctcaaatcgtatggaacggaaatccttacaaagggatgccagaaattgaaacattttggcggaatttacccgaaacttcgcatgagtaagcaatatttgcctttgttagttaatcaaaaacgagtagcaagtttaagcgtcgcttgtttggatgctcatcgaattgacccaaccagcgatgacatgtcattggtcgtgttggcgatgggcacagtcataatcgggtttggtgttttcctaatatgtctgcataaactttcccgcactttttcttagcgatttatttttggaattatgcacttttattgattaaactcttccatttgtgcctacgcctcaaaatttaaaaaaggcaacaaaggtgctcgttcctttggcgcaaggactgcaagagacgcaatcttcacccatttgttggagttttagcgtcgattgtcgtcttaacgagttaccggcacatttttttggtaccaaaaaatttcctgatgaatcattaggtatattcaaaaaaaatacatttggcaaaaacagtgaaggaagtgcgggaatttttatcgcgctctgtattgctaacaatatcacgttttttaaccaatttcagcggattgagccacgcctacaatcagtcccttttgctagttcttgaaggaagtacttacaaaatcaaaagtgacaattacagggtgatcgactgaatttaccacattgataatttgttcaaatctctatcaaagcgagtaaagcaaagaatgcattcattttactttgtatttcattgagattttccggattaacataaaacaatacacacttgacagctaatgtccggggaagtgggaacgcaccaaaaacctatttttcaaatatgggtctatgattcccttctttcacgacaacgaatattattaatgatataaaatcgaacatgggttgtcaacgattcttttatttcaaaaaatccgcaacaatataacgcaacaaaaaacagccatttactcagtccggatcctttctccatctatcactcctcactctccacattgaccgttgtcaaccttttgaacgaagtaacaggcacatgcgtcacctaaacaaaacagatttaactagtgtaattgttcttccattagtcaccaaagtgtataatttgtgcggagagtcttcgtcgtcattgcgtctgcgtgaaagtcggacgcgaacgcggaatggaacattactacaggcataggtagaaaaaagcataaaacagtgcttttgcaattttgtatgtcattttctacaacttgtatttgtagagttaattataaatacataccgaacgcctcgagaccagagaaatttattcagacgcgtgtcaacgcgtacgtcgggtgtgcccatctgctgctcagcgaactttttcacttctttgatcgctcgcggagctcgatttttgaagcctctaaatcattttcattaggaagacggaatatgagatgctttctcctatttctccactccctttctaatcatctaagggataattgcttaaataatctcagcctcacattccgtggatgcgtttgtgcaaatggatggtatattcccgagtgaccactttgttgagcgcactttttcctttcttttcacccttttgtttagccatttgtgagataagttggtatttcgaactaaaaaaaatcaaagttagtggcgcagttgtacagacaaaaagaggaatctacaaatgcagaaagtaatttagcagaatttcagttttacatttttatttttatgaaaattttggcgtgatgttcattatttaaaaaagggtttgtatctgtgggatcgagccaattccctaccgtcaattccctaccagccaattccctaccgtcaattccctaccagccaattccctaccagccaattccctaccagccaattccctaccagccaattccctaccgccaattccctactaaggcatttgatttccataccaaaagtgttgaatattgataaacattgagattaaaacacacaagaaaatttattcactgccttttagacagctcgtcaagagctttcggatgataccaaatttatcaagattcgatcgttttaaaaaagttagaagtgtcaaatctctcaaaatacggatagaggaaataaagccggaatattttacagaaatgacttcgacttctgctgatatttcaagtgattttgatcagacgaatcaaaaacaagacccagatgactccggagaatttcaacgtgatcctgatgaatttgttgagtatattcagaatgaattaacgcaatggcttgacgaattacggcgaatcaaaaaacccggcgaaagggatggacgaaaactcggcccacttgagaagtctctaggtaaatgatttgcagggtgcagtacgacatttgaagcagaacattgaaataccagaagttgtgcttgaattcgattccaatattcaacagattgtggatgtggcaagaaaggaaaacagaaaaccatttcctcaacaatctgcagaatcatatcaatatttggattaaagcaattcaaaaaatgacgaaattagaccgagacccgacgtcaggcacagcacttcaagaagtgacattttgggtcaatttggagcgtgcgttgttgcaaattcaagagatttgcgaatctgacgaatttattgtcacaatggaagcgttgaaactcggaaagcgttttcatgcaactgttgcattcgaatcaaacacaggtttttttgtgtaattttacagttttttaaatttgattatttaaagggctgaaagagatgctggttactgcccaggattacaaccaaatgatgaaggatgttcaaatcaatgaccttctgtgtgctttcgatttggctgcagttaaaacggccgtttcaacaattttgggaagtatcaaaaaaatgcgaagcaccaaatacccattgaaacgtgcttatggctttattacgacaatttcaacggacctttgcgaaaggcttgttcaggttattcgtggaggagcaaaaaaaaaccacgcttattttatacttttagcttttgaagccacgtcttttgatgcatgcgcctatgtccgaattggaggaaataatggatcagtgcaaaaaaatttttactgcttgggacgaagaagcggacaaagtgatgatgatgtttcgtgaccttgccaagaaacagcggccagcagatgcgaagccaatgttgcgaatgatatatcgacacaaattactggaacttcggctcgaacaactctaccgatttcgaacgcaacatgaacagctcagcaatatgatatcccgcgttttgcgctttgctggtccaacttcgcttgaaagttttggtgtcatcgattcagacccggagaaggaggttgaagataatggaataaattgttcttttaaaatattttgcagattggaaaagcctatgatgcagtgaaagagctggattatttggacatgggtcagcagggccagcaagcgtgggaaagtgccatgcaatactacagggaccacatcagtcgagtggaggcggaactcgcgtcccgactgcgtgaccagctcggaggtgccaaaaacgcagatgaaatgttcaccatattctcgcgatacaacgcccttttggtccggccgcacattcactcagcaattcgagaatatcaaaccgcactgattgacggagtgaaggcggacattgtcgagttgcaagagaccattttggacacaaagaagagagagctggcgatcagatgtgctgaccggtatgagaagaattaagcaattcacagttttaaatcgaatcagatatgacattcctgctttctcggcttcaatgatgtgggtcagacagattgagtctcaactgaacatgaacatcaaacggattgaaaatgttcttggagagggatgggccaatcatttggaaggtaataccgacaacagtccattcaagcattcaattattagaaaaacgacggacaaattggagttttttaggcaaagaattgagcaaagagtgtgaactgcttcgacaaaaattggacacatcgcatttgcacaaggaatggaccgataaaatgttggcaaaatgtgaagtccaaaacgacagactgttcattgttgacaaacttcaacgtgatgggaaaataatacatcgaattcgcgttaattactcgccggactcaattcgcatcactaaggaggtaaaaatggataaataatagctgtcatgcgacttcgaacataaaatgaaattatgtttttaatccactttgtgtcccttttaggtccgtaacttgaaaaacttgggttatcggatcccattcaaaattatgagccactctcatacgattagcacatactacccaaatgcgatttccctcatcgagtcaatgcgtatttacgagtcgacaaatgaaattgttttgaatcgccagtcgatcgatcaactcattgcaagctatcgaaacatcattcataatctgttgaatgaggtgacgaattctcaaaatacaaaaagtaatttcgtcaccaataaattccagggtgtcaaaactgaatggacaaactttaaattggaatcatttgttgtcaaattggccgatgctgtcggaaattatcaagagaaagtctcagatctgattgaatggctggacaaaattgagctggaaatgtcatcaatggacaagtgtcaattcaagcaagaaatcatcgcccaaattctcggctccattcaaaagattgttgaccaaatggccttgaacaattattcaaacttgaaaaaatggattgaaaatttggataaaacggtcaacctttgatttcactaatttttaagccaatcgttttctcatttcagctggaaaacaaaatggctcgtcgtcttgaagaagcaattcgtgtttggattaagctgcttaaacaaagtcgggatgagctggaggatgaaagggaagtcagcattgtgcccgaaattcacccaattccactggaaatccgaatcatatcgcaatgcattgtggttgtccctacactggaaaaggcgcgccttagcctgttcaaccagttttcgtcgtggcatggaattgtgacaaaccagacaagaatttcatgcaatcgtttccaggtttttttcctcgtactatggttcactatcacttcgggttggtttaaggtccttcaaaacaacgccgacacacaaacatacaaaagtgttttgttgaaaatgccacacagtcagcagataatacaagaaactcactttgcaatcgaagacatcatgatgaaattaggcgactatgtcagccaatggacgcgttaccaggcactttgggactttcaacaggaaatgttttttgagcgacttggaacggacttgtgcaattggatgaaggtgcttttggacatcaaaaaagctcgaacaatggtcgactctccggaaacgcgccacaatatttttccgtttgtggtcgacttcactcgggtccaatcaaaagtgtccataaaatacgacttctggcaacgtgaagttctcaataaatttggaagcgcattgggtattgtatttcttttcatacattttcaaaatttaacccctcacttgtcaggctcatcaatgcagcagtttttttccgacatctcaaaagacagacatgagttggagtcgcaaagcattgattcgaccaacaccagttccaccgtggctttgattatgcacgtgcaatcattgaaaaagcgaataaaagcctctcaagaacaggtaatagcttgtttagttggcctatattttaatattttgacaatttgaatgggtgcaacagattttcttaaaaacaggttgacactttcttgtccggacaaaagcttctgactgtgcatcgttatccgtttcctcaatcatggctatatgctgaaaatgtcgagggtgaatggtctgcacttttggacgtcttaaatcgaaaggatgtcgcgattcaatctcaagtaatcaattacttatttttatcccgttttaaaatgcattttaaggttgccaatcttcaaacgcgcattttggaggaagacaagttgctggagaagcacatcaacgatttagttgctgaatggaacaaatcaaaaccggttcatggcgctcagagaccaaaagaggcgttgattttgctgagtggcttcgaagacaaatttaagcgcctcagagatgaacgatctaatgttttgaatgcaaaaaacacattggaaatcagcgattcgctgattcacatttccaaccaaacaacaaacaaattggaaattgccattgaagagctgaacgacttgactggttttatttattttttgttttctttgcatttatttaatcaaaaggtgtttgggattctcttttgcccgtgtacaacaacatcgacgaattgaaggagatcccctggctttcggtccagtcgagaaaattgcgtcaaaaccttgaagagcttttggcaaaactgaagagtcttccctcacagtaccggtcttacgagtcatacgattacgctaagcgattgctgcagaactatttgaaggcaattgtttatgatcctgtttcatattatcttatgtttttaagatgaacagtttgatcattgagttgaagtcggattcattgaaggagagacattggagaagtgactttttattcatttttaacgtattacgtttaattcactcaagatttgactcgggaaatgcatgttaattgggtgctcagcgaactcactttgggccaagtgtgggacatcgatttgtcacgacatgaagagaccatcaagaaaattatgattgtggcacatggcgaaagagtgctggaagattatttgcgccaagtcaaagaatactggacggattatgcagttgacttagtcaactaccaacaaaaagcaaagctgatcagaggatgggacgacctttttaacaaactcaaggagcacatgagcagtttgggtcagatgaagctgtcactctattacaagcaattcgaggaggacgcgctttcgtgggaagagaagctcaacaaaatgaacacgatttttgactcttggattgatgtgcagcgaagatgggtctacttggagggattgttcaccggttctgctgacatcgcccatttattaccatccgagtcaaaccgtttcaacatggtctccaacgagttcttgggattgatgagaaaggtgcttatattacttaatttcgattaatctttagtaaatttactttccctttgttgttaaggtttccacttcaccccgaattcttgatgtcatccacattcaaggcgtccagaaaatccttgagcgtcttgcagacatgctgtcgaagatacaaaaggcacttggggagtacttggagcgtgaacgcaattccttcccgcggttttactttgtcggtgatgaagacctgcttgagattctggggaactcaaaggatttgatgcgtgttcaaaaacatctcaagaaaatgttcgccggaattatggccgttgagttcaatgaacaaagccgcacaatttctgcgattatttcacgagagggcgaatccgtcacattgaaatgtccggtggacctaaagcaactaccaaaaattgatgaatggctgcgtgggctcgagcgcgaaatgcaatcaaccttggccactctcttgggcgagtcactctcgtctttctccaaattggtcatcgaaaacattcaacatgaagaacttatggagttgatggatctttatccggtattaatcaaactattttatttttgattttttgttaatttaggctcaaatcatcgggatttgtgttgatgtgtggtggagcagtgcagttgaatcttgtctgtcaaagcatggaagtgcggaaaatgtgctgcagactgttgaaaaatggttgtccatgctttgtgaaagtgttctgcgtgaccaaacggcaattagacgcaaaaaaatatcgaatttggtgattccagactaaatagtttttttattgcgttttctttttagataactgaatttgtgcacaaaaagaatgtctgccgacaacttgtcaaaaacaatgtgaaaaacagtcaagacttttggtggcttcaggtttaccgaacacatttgctcctaacaattctgatttatttttagaatttgcgcatttacttcaattccaacgagaaagatccacgcaaatcctgcttcatcaaaatggccaatgccgaatttttttacggtttcgaatatttggggattcaagagaagcttgtccaaacccctctcaccgatcgttgttatctcaccatgacgcacgcattgcactgtcgtcttggagggagtccttttggcccagctggaacaggaaaaacggaatcggtgaaggcacttggccaccaacttggtcgttttgttttggtgttcaattgcgacgagactttcgattttcaagtgctccaaattttttttcgtttataaaattcatgacttaacaggctgttggacggattcttgccggtctctgccaagttggagcttggggatgttttgatgagttcaatcgtctcgaggaacgcatgttgtctgctgtttctcagcaaatccaaatgatccaggaaacagtgcgtgcagactctgacatgaaggtggaccttgtcggcaaaagcctcactgttaatccgaacatggccatcttcatcacaatgaatccggggtattctggacggtccaacttaccggacaatctcaagcaactgttccgttctcttgcgatgacatctcctgatcgtgggctaatcgctgaagtcatgcttttttctcaaggatttcaatctgccgagatactcgcaaacaaaattgtcccattatttacgtaatattcatttttcaacttaaattgcatggttgctttagtctctgcaaggaacagctttcgaaccaatgtcattacgactttggcttacgtgctttgaaatatgtgcttgtttcggccgggaatatcaaacgcgatgcgattcaacgttcttacgatgaaccaagccaaagcggggatggagctggagaacaggcagtggcaagccaaatgtctgaacaacaaatgctcatccaatccgtgtgcgagactttgacaccgaagcttgtctctgaggatatcactcttcttcaatcacttttgcatgacgttttccctgacatcagttacagcccaaaacaagtggaaaggtgcaaatttctgggttttttaagaaaaaaattgtttgttttattttcagcctcaagaacgaagttttgaacatttgcaaaaccgaacacttctcatgttcacctatcactggggagaagggaaatctttggctggagaaagttcttcaggtttaccaaatcaccaatctcaatcatggcctgatgcttgtcggcgcgagtggatcgggcaaaaccactgcgtggaagacacttttgaaggcgttggaaaatcatgagctcgttgaaggcgtgtctcatgttattgatgccaaatctatcagcaaagacacgctctacggcactctcgacccgaacacacgtgaatggactgatggattatttacgcatattattcgaaagtcaatttattattaatttttaataggttgacacaattgtttagaatcattgacaatgttcgtggagaattggataagcggcaatggatcatctttgatggagatgttgatccggaatgggttgaaaatctgaattccgtacttgatgacaacaaattgcttactctgcctaacggggaacggctttctattccaccaaatgtgaggcaatattaatttcaaacttatttcttttatattaggttcggatcattttcgaagttgctgatctcaaatttgctacgatggcaacagtttcgcgttgtggcatggtctggttcagcgaggatgttgtcacccccgaaatgcttttcgaaagctttttgctccgaattaaaaatgagccgcttatctccgggaatgcgaatcgactgctgaatattcaaatcatttgtgaaaacacgctttccatgcacatggacgcaaatgggctcgttccgctctgtttggaattcgctgttgagcaattggaacacattatggagccaacccgacaacgccttctgctgacctttttctcaatgcttaatttctctgtcaaacaattgctgcaatacgattcagatcaccctgattttccaccatctgtaagttattatgttgtgaatcaactatgaaaaaatttcaaggaggaacaaattgccaatttcatcagccgttcattgcttgtcaatttgatttgggcttttgctggtgatgggagttggaagaaccgaaaaagcttgagcgattttgtccgcgcttccactacaattcagctaccgccggaccaatcggtattttgatttatattttaaaaattgccttctttgtcctagctcccaattactgattactttgtgaccacggatggcgattgggaatcttggctgacaaaagtgccacaaattgaaattgaaccgcaacggatcactgatacacttaccgtaattcccactctcgacacagtccgccacgagatgctgctgaacacttggctcaacgaacggaagccacttgtgctgtgtgggcctccgggatcaggaaaaacaatgacattgttggcggcattgcggttgatttacttttctatttgttttcatatgatgaattttttttatttgttaggtcactgcctgacatggacgtcattaatgtcaatttttcttcatctactacccccgaattactgatgaagaacttcgaccattactgcgaataccggaaaacaccgaccggcgtcgtacttgccccagtacagatcacgcgatggcttgtgattttctgtgacgaaataaatttgccacagccggacaaatacggaacacagagggtcatttcctttatgcgacagttggttgaacaggttcaacgccgacgttgtgcaatgcttttactcttgttttttagaacggcttctaccgcacgaccgaccgcacttgggtgacacttgagcgtatccaattcgtcggggcatgcaatccgccaactgatccgggcagaaacccattgtctgcacgttttcttcgccatgtgccagtcatttacgttgactaccctggacgtacatcgctcaaccaaatttacggcacttttgctcgagcaatgcttcgtcaaacaatgcaaatacgaggaatggctgaaccgctcactgaagcgatgactgatttttacctgcagagccaggcattacatatttcatctatttgtaaattacagtaaatatttaggagcattttactcaagatgatcaaccccattacgtgtactcacctcgagaattgactagatgggtgcgagggataagcgaggcgattatgcccctggattccgtttctcatgaagagcttgttcggctttgggctcatgaagcacttcgtctgttccatgacaggcttgtgcgggacgacgaacgagtttggaccaatgaactggtggatcaagtcgcgcacaaatattttgctgcttcctgtaatttggacgcggcactcgaaagaccattgttgtattcatgctggttgaagaaggtttagtccgtctttttcagcattaaaaattgtttggtttagcattattcgccagtgtccagtaaagaattggaggactatgtcatgcacagaatgcgacagtttgctgaagaggaattggatgtgaagctcgttcttttcgaccaaatattggaccatgtgttgcgcattgatcgcgtattccgacagccacagggccatcttctgttaatcggagtgtccgggtcgggcaaaacaactctgtctcgtttcgtcgcttggttgaatggattcacgacaatgcaggtagtttttttttggtttactgttcgttttcaattttactttatattattatttttcagcttaaagtgcattccaaatacaaagctgccgactttgatgaggacattcgacacgttcttcgccgagctggctgcagaaatgaaaagatatgctttatcatggacgaatcgaatatgatggagactggctttttggagcggttaaacacgttattggcaaatggaaaagtgcccgggcttttcgaaggcgacgatttcaatacacttctcagtcaaatcaaagaaggagcacagcgccaagggtttatgcttgactcacacgaggagctatacaaatggttcacggcacaggttttaaatttaaaactttgctgtatatatatcaaatataaaaagatcgttcaaaacctgcacgtcgttttcacgatgaatccctctggagatggactccgtgaacgggcttcaacatcgcccgcactgttcaacagatgcgtccttgactggttcggcgactggtccaactcggcactcttccaggttggccatgaactgaccagcatgtgcgagatcgacaagtccgactacactccgcctgccgcgctggagcattgttgcgatcgtttgcccactgaaattgcctatcgcgacgcggtggtgaattcattcgtgcacattcataacattgtccggaagacaaatgttaccgagtcgcgcaaaggtcaccgcgtgatggccattactccccgtcatttcctcgacttgatcaaacattatgtgacaatgagcaaggagaagcgtgatgtgattctgcatttagtttaatttgtatcataacaaatatttaggaacttgcggatgaacaaatccatctgaacaacggattgagaaaaattaacgagacggagcagcaagtcaaggagttgcagaagtcgctgaatgagaaagaagtcgacctcaggaagaaacaaggggaagccaatgcgaagttgcaactaatgctgggggaccaacgcgaggcggaaaacgagaaacgcacctccgaaacgttgcagaagcaaatccgagaggaaaaacaatgcattgatcgaaaaaaggacgaagtgaaacgggaattggccgaggtttgttcagttaacaataaaaaaacttattcattgaatggacacgaggggagggtgaaaaaccttcctaaaaattccaggttaaacctgccgttgaggaagcgaagagcgcggtttcgggaatcaaaaaagctcaattggtagaagtgcgctcaatggcatcgcctccaaatgcggtgaaaattgccatggaagccatctgtttgttgttgggcgaaaaacaaacggaatggaagtcaatccgcgcaatattggttaaagacgacttcatcccgcacattcttcaattcaacacggattcaataacaccggaaataacggagaaaatgaagcagtatgaaggcaaccctgactgggaatttgagaaggtccgttattacaatatattaataaaataagaaatccaacaattcaaggtcaatcgggcatctgtcgcttgtggaccaatggttaaatgggcaagggctcaactttcctacgcaaaaatgctgaacaaaatcgaaccgttgaacaatgaattgaagcgtctggagaaagatgcggaagaaaaaacagtgaaaggcgaagaattgaagcacaaaatagaagcgctcgagaaccgaattcaggaactgaaggtaactgccaactgaattacaggtacaaaatattttcttaattgcaggatgaatacgcacaactcatcggagaagcggaacacatcaaacaggacctgcaagttgtgcaggaaaaagtcaacaggagcatccatctgttgaaatctttgcgggtggaatgcgatcgttgggagacaggcagagaacgatttgctcagcaaaatgagacattggtgggcgatgttcttctttctgccgcctttctttcctactctggctactatgatcaactgctgcgcgacacaattttccaaaaatggatgggaatattggattcctcacaaattatgttccgtcatgagcttgctcgcattgagtatctgtcaactgcggacgagcgcttacaatggaacaataatggaatgccgaaggacgaattatgcacggagaatgccattatgctcaggcggttcaaccgtttcccattgatcatcgaccccagcggacaatccatcgaattcatttgcaaagaattttccacagcatctggcaaggaacatcaaaagggaggctcggtggcaacaacggttcaactgactagttttaatgataattcgttcaggtataaagtgagaaaaataccaaattctttattttaaattttagaaagaatcttgagtcagcgcttcggtttggcacaactttgcttgtgcaagatgttgagtcctatgatccgatcctcaatcctgtgttgaataaggaggttaagcgaactggcggacgtgtactgatcacaattggtgaccaagacattgacttgtctccagctttcaaaatatttctctttacgcgcgattcttcggtaatttaaaatttcgttaaaacaattgaatttttcacctaaaccccaaaggttgaattcccggcggatgtgtgctcacgtgtaacttttgtgaactttacgataactcgtgctagtcttgagacgcaatgccttcaccaagtgctgcgcagtgaacggccggacatcgacaagaaacgaaatgatcttctgaaattgcaaggagaatttgcagttcgactgcgacatcttgaaaaggctttgctaaacgcactgaacgagtccaagggtaaaatactggacgatgactccgtgatcgcgacgctggaaaaactgaagaatgaagcacaggaagtagcaaagaaatctgccgaaactgaccaagtcatgaaagaggtatagacgttttttaatgatcgtttcgaatcgattcttctaaattctaccgccaattcccataggtcgaaattgtctcacaaaaatactacaagttggctaatgcgtgttcgctcatctatctcatgttgcatcgtttggacgagattcatttgctctacaattattctctggactttttgctggacattttcacaactgttctcaagtcaccacaacttgggaatgtgaaagactacgatgctcgcctgtcaatcattcttcaaaatctcttttcggtcttttttctttactttactgctacaatagttcctcttgcttaaggtgatgtactctcgtgtttccataggaatgcttcacaatgatcaaattctgctcgcttctcttttgctccggatctattctcgctgttgcggtgcagagaatgcctacgagcaggaattggagcagctcacagcccttcctcctgagcaggtgctttcctcggcacacatgcttatgacgaaggcgtttggttcggaattcatgcaacaggacaaagtggttaacctccgtgaaataattttgaatgaggtcagacaaaatgtaagataccacttgcttataaaacatctcttattaaaggttcaatgtaaagtgcccgttttgttgtgttcagcgacaggctatgacgtctctaatcgcgtggaggaccttgcatttgagctgaaaatggacattttgtcaattgcacttgggtcagccgaaggatttgaacaagcggacaaagcgttgcaatcgacaagccgatcaggaagatggattctgctgaaaaatgtgcatttggcaaccgaatggttgactcaacttgagaagaaatttcgccttcacaatccacacccacattttcgtctgattttgacagctgaaattggctccgctctgccaatttctatgatccaggtgtataatttaaaaatttacttttttcaagttccaactattttttcaggcttcacgtgtacttattttcgaaccatccacagggctgaaggcgaatctgttgcgttctctttcctccatttccccggcacgaattgcgaaggcaccagcggagcgagctcgtctgtacttcattatttgctggttccatgccattgtgcaagaacggctccgctatcagccactcgggtgggccaattcgtacgagttcaccgacgcagacttccgagtcgcgtgcgatactctcgattccactgttgacatggtcgcacaggtcattctttgtttttcgtgatgatggttttctttttctatttagaacagggcgaatgttaagccggataaattaccatggctggctctccggactctgctctctcagtgcatttacggaggaaaaatcgacaatgattttgatcaggcaagtatacagtgggtttataagggaaagaaataatataaattttcatagtattataaatgtttgggtttgaaaatcttttcgccattttctcacctatctcgctagatgcattatttcacatttaatataatttaggtgcttctcgatactcttctcgacaaactgttcacatcaaattcatttgacgctgactttattctcattgaaaacatcggagtgaacgccttgaacatgccagacgaaactaactcaaaggatggtttgatcaactgggttattaacatcaaagccttacaaaagcctaattggattggacttccaaacaacgcagaaaaagtgcttatcgccgaaagaggtactgctttcacaaaccgaaatgccatcatgaagaaatcatttatttatcaattatagggcaagaatttatacggaagatgatcaaaatgtcggacgatgaacttgcatacgaagcggatgatttggaacgtaacaagcaagcccctacctggatggttcaattttctggacagtgcaaatcttggctcgatgctttgccacaagtataccttctttccctctgaaaagaattgacattcatttaattgttttcgtttattgtttcctattctatttttttagcaactacagcgtcttcgacggactaaagaaaatgtgcgcgatccgttgttccgattctttgaacgtgaaatcaacttgggcgccagacttttgtccgatattcgacgtgacctcaacgaattgttgtccatttgtcatggggatcagaagcagaacaatcacagccgtgaattaatagctgcattggtcaagagaaaacgtgtgccagacaattggctccaattttccgtgccaaaagacgtaacagcacttgaatggatgcgagactttgtgcaaaggatggaacaactaaagcgcttgtcactttcggaaaatctgagatatgaggaagtctggctgggtgggatgttctttcctgaagcgtatataacggctacgcgtcagctgatagcccaaacgaatggctggtcgctcgaacagatgtacatgcatatcacaaaaacggaggaaggacaattaaaatcaacagcattcacattgacaggtggttgatgatgatgaacttcgttttcatcgcacatttatttatagaccttcgcgcaattggcgttctttgtgaggccgacgaaattaagctgacagatgaagtgcatgttggagtgccacggcttcagttcacgtggaccttggaaggacattctccagcgagtgttgtggtgcctgtttatctgtactccaacagggccaaatttttgttcggacttaatttgttaccaattggatttgatcattctatgctaagccagcgaggggtcgcctttgtctccaattgttcgctttgattgacttttgtaccctttgtctcaaagaatatttatttatctgtctattgtttttaatttgtttccaatgaataaattttgaattgcattttttgcagactaaattagggaaagggatttttatttttcccttatacttccatgatttatgaatagtaatcgaattaattgccttgtctaatgcactgcttcagagccttattcgtcatataaaacaaatttggaatgaatttaaatttacacacaacatatggaggacctaaacctgggaccccccccccccctttggtgacattcacaaaccaccgactgtgagaaaaaccccttatttgcaatgggagcccaaaactgaaaagctgtgagcattaagtcgccaagttactttatggccatgtcttttatggtcctgtaaattgcaacgaagccgcttattttgcactcagcagctcataattctacagtcatggtcatatgtagggttggtaattatatgcacatgcatatttttttcctggactgtgggaggcctgaaacgcacgaaaaacatgtttttagcttgttttgaagcttctaggatgactttccatatgcatatttgtgcatatttcgcgatttatgtgcatatttgcatatttgtgcatatttcggcatttcatgcatattttatgtgcatatttgggcattttttcaataaatcctctattaaaacggccccctttattgaagcggccatttgggctctaatgaccgaaaatttttcaaaaaaatcacatttttgggtatattttctggtaaaaaagtaattttttaaaaaattggaattttatgccaaaaatagtcagaaaatagaaaattctcctttttttgctcaattttcttcaaaataaataaatattaaaatttgaaaatttgccctcaatttggaaaaatttatgtgcatatttttcactttttatgtgcatattttgcaatttttggtgcatattttatgcgcatattttgcgattttatgtgcatataattaccatccctagttattttacccttgattttatgaattttttttagcttataactttttcaataatagaccaaataaaaccattttatgctcattttgaagggaaaattctgaagaatatttctcaattagtcaaaagtttaaaaaaattgtttattggcaaaaaaatgaaccatgtgttatcttatatgttagagacatggaaatagtgcgtcaaaatgagagaaaaagaaaaaactttgccctgggaaaagattttttcctgtgggtaacttttcttaaaattttgtataggctacatattttaacccaacctataggatgatgctttgttttttatcaaaatgctttttaactcgagatcggctcttccgtttttacaagggaaaatccccaaaaaatgttcagttttgcaaagttttggcgttctgattactaaataaataataaacttatttgtacttggagcccaaaattgaatcgccgtgttcaaaaatactccccacatattgaccaaataaatccaaaaaagtcataattttatggtgccaattgaaataccaattctgtgaaaaggccagggtcactttcaatcaaacaccaatttcctgcttcgttggtcattaaaatttagaataggtaaataatatatgctctaaatgtgttagaaagataaagttatcgtccgaaaacttggctggcgccaaaacgacctagtcccaaaaagtgataggtaagtgaagaaaaagttaagtttaaatagcagaagggagagagaaaaagtacaaatgacaatatttttttggcacagtaatacctaatgcagtttgtccccccattctctgaaaaaattaaattttaaaaagccctgaaacacactttcctagggtttttggggtcgatgatcgcgaatcacatttaatggccggtcattcgttgatgtcattcgtctctccaattcaaaatctgttgacatttgtcgctttttctgcccaccattctttgctttcgttcgttagatgtaagcagaatccaccgatgctgacatggcacggtgtgtattggcgatgaacctcctcaaaaccctgtcaatatcgaaacgccggagccagaattctccgccttttcatgcttattttttcctgttcaactatccaatttcccttggtttttcgaattcgcgcgggtaacttttctgtttacaatcatcaattaagtcattttttcgatgttctttattcaatgacttggacaaaaattgacagaataatttatattattaaatctttttttttgatggagtgaaatcatcccaacaaaaaaaagataaaaagaaaaaagggcatttcaacaacaagaaaatgcgatgaaattggacaaaaagaggttatgtatatggttagttatcctgccgaaggagaacaacaataaatggataaatganaatatgcgaattttgtgaatgttttgtgagggatgaaaccgttgngattaatctgaagggactgctggngattacagggaccaaattttaaacagctaaaattagcaaatccctgcat

SEQ ID NO: 221 - DNA, 1767 bp, Heterodera glycines
tttctttctttctctcagttcattcctctctttttctttcgtacctcatcactccctctttttctttctctctacttatttctctctctgcctttctttctctctctctctcttactatccccatctccattttcttctatcctttcttctcttcctctcttcacctttctctctccatctctatttctttctttctttctctctccctctctctcttactatatcccccccccctccatcttctcttctctctccatctctatttctttctttctctcagttcaattcctctctttttctttcgtacctcatcactcactctctttctttctctctacttatttctctatgcctttcattctctctctctctctctcttactatccccatctccatttttcttctattctttcttctcttcctctcttcacctttctctctctatctcatttcttcttttctctccctcctcttttaattgactctctctctttatctccacactttctttctctctctcggtacctcttctctttcctcattctttctctctcacattgacgtaaacaactgaaaaataattctctcttttttgttttgtttacctgtcactgtcatgggaagttattgcaaaattttctttttttctttttctaacgctcttttttgatttttcattcttttttattaatgaacaaatcgccacaaatcaaagctttttacgccaatttaactcgaccaaaaaaaggggcggagcttcgtctcgattagtatagagtaagggataagggatatgtataaaaacctaaaatatgtacgaaaatatgtaaataaaaattttttaaacagttatttttgaaaaaaattttgctaaagggttcatggggaatccaggaaaaaaatatgtatttacattaaattgacatccctagtgattttcgttaaaaaagattgttttccgctttgtttctcattatattaaaataaagtttccaacgcaattacctaattattctgctatatatttgtgtgacatcattcgaaattcaacagcaaattgtgctaattaccaaaaaatgaactggcaaaagcgaattgacaatttggagacaaatcgtaattagcaaggacaaaggaccagaaacggaactatctgtgtggatggatgacaaatttgtggaatttccattgccggacgaccgtccgttgcccagcaaaatccgttttaaatggcttcggattgagtaattaaaaaacagttttatggcaataaaagcggctctattgcagttcacaggaccataaaaaaagacacgaccataaattatttttgtcaactttagtgcaccctttttcaagaagcatccaaattaaacattattagtatcattcgatagccgtagctctccagttgcggaaatgccaaaaaaccggtttgaacctgtttaaaactcgaaaaattgagtgaaaaagggggccactgaccctttaaaacagtcaaattcggacaaattaggtatcactcgaaagctctggatcagctaagtctaaaaaacaaggtataaattcgaaccgatgccatctaggcactgggtcaactgagtcccagtgaaaatggacacttcagtaccaaaagaaataaacgggaaataacaatttaaaagcaaaatttcgcaaaagggagtatgcgaagacggagcaagtagtggggcgagacggagggcggtggaagcagtctgacgagcgccacaggcggttgactgcgg

SEQ ID NO: 222 - DNA, 10247 bp, Heterodera glycines
  unsure (1)..(10247): unsure at all n locations
ctacgtccctcgtgaagttatgcctcnggaggacaataactacacgaaactatgaacactagacaagcctcagagggtcttgtctaggctctctaatttgcttttcccttccccctttgtcaccgggatccgtcgatttcagtccgtggttcacagcaaatccacccaggagcgccaatttgtcccgacttgctctggggtcgggccaaatgaattccacggtgcggggttcagggacaggcagggacgagacacagaatgaataaaaaatttattccgggaaatgacctcaaacttgggtaattaaacaaaaattttgaaatggtgaacgaattatcacaaattgatcacagaaatgccatcaccggggaattatcacaaatggaattgggcaccgggatgggacaggaaatggagggcactggggccacagaacaaaaatcaataaccgggggtcaaagaatgatcacgaatggggttatcacagttaaaggcaaatggaagggaggggagagaaacggcaaaaatgcctaatgaattttggttgtgaaattgggggcatttttggccgcttaaataacaataaagttaaataaaaagtggcaaatgtgagcagaacgaaaatgggccgaaaattgggcacgaaatgaaaaacgggggacaaaatgaacagatgaacaaaatgggcggaaaacgggaaatttgggggttcatcgttctttggagtctcattcgccgaattggggacggcggcagaaaagttgcggttttgacaaattggtcattaattgtgcgcgaggcatggaaggaacgcagaaaaacaattaacaatttggagggaaatgggggcagaggagtggaacggggtgtgacgcatgtgaaagggagggggaagggtcgccacttcctttcttcaattctgctgatcaattgatcggcagtcggaatcccagagttccgacattccggcgtgaaaaagatgggcccgtcagaattcttttcgtctgggcctcccaaagggcgagtcttctgtgaggtcgagatggctctgtgttcgtggttgttggtaccgagccgttctggcgatcatgtccaatttgattggtgacatggatcggtgctctgccctgcgcgctggtggtttgggggttcgtggcatttcacgcagcggcattccctcttcgatcccgagtggtttggaaacggtgggtcggaatgtcggatgcgggcgtactccaacgaggctgagaagagtcactcggatgggattgagcaaatacgccagagtgcatgggagaacaatgtcgcgcagcatgaggaaggttgaataaacgcaggcgactcgaatccaccatgtgattgcttcgtcgatcaggccttttagccagcgcatggtgaatccttctattccgcccttcaacgcgcccaaagcttcagtccttgccgtaatgtgctgttccagcttgtccttgaactgctccgagttgatgaattcgttgatgtgcgggaagcgtgtcgcttcagactcattgtcgagttgccatgcgtggaagatcaatggatgaagttccaaattgctattcgtttggttgatcgttgttttgtacaattcgtggacgtagtccttcggcattcgtcgtgctgtgccggttcgagagacaatccataaccagatgttgggattgcttcgcagttgaagatgatggaaccggtagctattacagcttgcatgttgtgctgtcagcgagaggatgcgaagttccggatccaggaaagctgcgatagctcggtcgggaaagtgcgcagtcacgggaatgtagaggcgacagtcaatcattggcctccattgtcgtttcgccgatccaacgagcttggacgtttggttgccgtagtaagcgtctggcctggagagtcgggttggctgccctcgtgtttcgctgatttaacgccacgcttgttgccacttgggatgccgagagctgtgatgcgagctgttctggtcggatgcctcttccatcttgtcgtggtgctgacaatgtcgtcgtattgctccttggcaattccgaagttctgttcggacatgacgatgcgtgtgccatcgcaggcgatgagttctggcgcatttttggcgaaagttaatgccttttggtgatcttcggagatccaaatggccattgattctccgtaggccgcagtgaattttccgttgatgacttccgccttctcgtagtcgcatgtttggcattcgttgccattgcaggttgatttccaaatcagagttgagttgtcgggcagttggcagaattcggttgcgtattgacagttctgaacttggtggactggcgaaaacatctgcagattgtgccgttttacgaaaagtgttgctggttgagcaaagcagtttgtcgccgtgctgatttgttcgcctttgaaaagtccggcgattggtccagggaagttgacttccaattcgtcattcgttgaccacaattgtgcttcgtgattcgtcatttcagacttggcgaatgggcattcctggtgaatggccatttgtttgcagatccgcttgttgaccggtggaaattccttctcgatggtgacgaaggaacaatgccatgcaaaggtgatctgctcgggcttgatgattttttgcgaagaggcgatctggggcgtgtcgttggctctttcgtggtctgcgttctcgccctggtgacgtactggattcgtgtccttgctctcgttgcaagggttgttcgctgagtcgtcgtcgtggtccagtgagtgccattgcagaagacgcagggtgaaggcggatccctcgaccctgcttgtactgtgccatcccggattggcatattttaggcgcttgagttggccttagtcccctctgttgtgacctccgcggttgcggtctgttgtggttcattcgctgctgaacctcctcaatcgttgaggacatgtgaatttgcttccggaaacgtgctgtcagctgcatgctcgagtgcttttgcttgaattggtgacgtagtttaacgtccttatggaccaattgtcgttgcttgttggacgtcatttcggaccctgaccgtcggatggattgctagtttagcgtattttcggacaatggttgcttggtggccggtgctttgctagtttaacgtcattgcggacaattgatgctttgctagtttaacgtcattgcggactttgggtggtttgtttctctagtttaacgtcattgcggacatgtgttgtttgcttttctagtttaatgtctttgcggacatttgttgttaggttggttctttagtttaatgtcattgcggacgattgttatgtgggttggccgatgctttgctagtttaacgtcattccggactcgtggcagccgggtgattagcgtttcggacagttgttgatggcttaggctagtttaacgtcattgcggacgattgatggtgattagcttagtttaacgtcttctcggacgagtgctgttggcatggtgtcttactaattgttgccgagctcatgtttgggcaattctgttgactgcccttatcaattactgttgttgagtccgagcttctggccaatgtagcgacgcaatgatggttggcgcctgatccacttgcggttggcgacaaggctttcatttttctgttgagttcatttgtttggcttgtttgtgcgggattcgctgcttttccttttggttgtttgctgaaagaaaatgctggtcgcttggcaactgatgaactcttccttgttggtgttagccattgcactgccataggaattggtgccgttgaatgctcatttggtgatttggcttgtctatccctgactggattttgtatgatctcaatgccggatgcgtcgctgtctgatgaaagatcaatcacgattgattttgagctgatgggagccgattctctcttccgtcttgatcgcaatgttgcaatgctagacaagagtttgttgcgttgatgccgtctcagttcgtccttttctttttgttgaatgtttttctgcctctgagccgctttactgctttgtggcgattcatcgttgttgaccattagcacgaaagagatgttggacggttgcttgagcttgattcgccctgttccactgatgatattgccgattttcgattggcaaatcgtaaatccgcttggcagttgttcaattggttgaacattcagctggtgccaaacgtccattccgaggagaatgtccggttgccgtgactcattcggcagggaaagcttcttttgtcgaagttcgtcattatccaatgcgtttagttgtagtaccggcaaatcattcagcaggaacttcaaagcgttcaggttgaaaatgaacctgtcctggtcggggcataaaatgccgattgcgacgcggtcgcttatgtatcgcttcggttctcgttcaccgaagctggacaagtagcattcttccgtgctgaggacgttcagatccaattgttcagctgcactgctcgagatgaatgatcggtggcttcccgggtcaatgaagatggttcccatcatgctgagggatggccgtgacggattgaagatcgttgcttttgtcgtcattagcaacgctctggtttccttgctttggatggcattacacatttgttgttgttcgatcactgttgatcgcttgcaatcgttggcatttggcttctcttcactgcaagaggtgctaggcgtgttgatgccattctcggctttgtactgatctcggcagagtgccgtgggatgccgacgtttgcagtgatagcacttagatggtcgagcgcaatttgatgcgcggtggtttggcttcatgcacttgaagcacagcttcttttctctgacgatgctgatccgttggttgagtgtgtcgacgttttggcattcgtcatgccaatgattgctgttgcagaaaatacaggggtatggcggaccctttttgacgctctgtacttggtttcgcatttgttggcagtgtttctttgcttgttgtgtgtgctgttggcttacatacccttgatgtctgtgaccctcgtccagtgatgaggcgataaatgtcatatcacgcagtgccattggttggttaggccttcgtgacctttggtttggtgttctcggtgcttgtacaggtgctgctgagacgacttctgcttttggttggacgtagtgatggccatattctcccatcacttcttggatttggacttctttccggactgcttcggttagcacatcccggaatttggttgtcgtccagtttgccggatcctctcctttctttgtgaggatgcttcgtaggaatggtggagtcagcttcttctccagcatgaggaacacctgcggtccctcgatgtcctctccggcattgttcagctcccttgtaagccgctcaagttgaagcagaaagtctttggtctcacggaggcttcggcacggcttgagattggccagttcgaagtgaagacttctgatgtgttcctccggagctccgtacgtgtcctttaacagctgaaggaccgtctcgtagtttgcgtcttccaaccggaagcccgctatgagttctcgcgcttctccgcccagtatattgcggagtaagttcagcttctgcgctttactgattgattgactgccgattgccgatttgaaggattcgtagaattcgggccattttcgcttttggccgaaaaatttatccagttgaattggctggaattggtagagcggtgctgtgaatgttggcattgtcattggtgctgccattgctggtggcatgggcggttgttgctgcggattggccaattgatccgcctttgcttccctgtcggctctgcctctgtgcagtttggctgcggcactgagtgttgcttcgagatctcgcaaatcccgaagtttggttgatgctgcgtcgtatcgttcggcgattttctcatttttgtcgaatttgatgtattctttttcgccgttgtctttgtcgtctccggtcaggcgggcgagaagttcaatccaagcgttggataagtctcgtagactgtccatctgcatttccatcgagcgaatttccttgacgacgcgatcaaattgagcctccaagttgacggcattttcccagtttgacaggtccgggtcggggtgtagaaggagtgaagtggcgcttttggcattgtcgagagctttgagtgcattgatgatccctttttgtattggcccagacattgcgtgcagtttggttgtgcgtgtgtgtgttgtggtgcacttgttgttttgtgtctttttccgagatcagtctggccttggtcctggaccttttgtgactaaacacctgcctcggaggacaaggtgtttgccttttgccttatggctaaactaaagcctcggaggactgttagtttgccttttgccttatggctaaactaaagcctcggaggactgttagtttgccttttgccttatggctaaactaaagcctcggaggactgttagtttgccttttttccttatttgtcaatggccttgtgcgcgcttgaacacccttttgtacgaagtacttcctcggagggcaagtacttcgtccactacacaacaccttccaaccctctgttcggacgaagtgcttcctcagagggtaaacactaagtccgctacgtccctcgtgaagttatgcctcggaggacaataactacacgaaactatgaacactagacaagcctcagagggtcttgtctaggctctctaatttgcttttcccttccccctttgtcaccgggatccgtcgatttcagtccgtggttcacagcaaatccacccaggagcgccaatttgtcccgacttgctctggggtcgggccaaatgaattccacggtgcggggttcaggggcaggcagggacgagacacggaattaataaaaaatttattccgggaaatgacctcaaacttgggtaattaaacaaaaatttaaaaatggtgaacaaaatatcacaaaattgatcacagataaaatgccatcaccgggggattaatcacaaatgaattggggaccgggatgggacaggaaaattttcagaaaggaagcattcggtactggggcaaatgggaaatcacagaaatcaatgaatgggaccgggagaaacagaaatggagggcaccgggccatagatcaaagatcaacaatcggggggttcaaagaatgatcaaaattggggggccatcacagttaaaggcaaatggaggggcggggagagaaacggcaaaattgccaaatgaaatttggttgtgaaattgggggacatttttggccgcttaaataacaataaagttaaataaaaagtggcaaatgtgagcagaacgaaatgggccgaaaattgggcacgaaatgaaaaacgggggacaaaatgaacagatgaacaaaatgggcggaaaacgggaaatttgggggttcatcgttctttggagtctcattcgccgaattggggacggtggcagaaaagttgcggttttgacaaattggtcagtaattgtgcgcggggcatggaaggaacgcagaaaaacaattaacaatttggagggaaatgggggcagaggagtggaacggggtgcgcggggcatgtgaaagggagggggaagggtcgccacttcctttcttcaattctgctgatcaattgatcggcagtcggaatcccagagttccgacattccggcgtgaaaaagatgggcccgtcagaattcttttcgtctgggcctcccaaagggcgagtcttctgtgaggtcgagatggctctgtgttcgtggttgttggtaccgagccgttctggcgatcatgtccaatttgattggtgacatggatcggtgctctgccctgcgcgctggtggtttgggggttcgtggcatttcacgcagcggcattccctcttcgatcccgagtggtttggaaacggtggatcggaatgtcggatgcgggcgtactccaacgaggctgagaagagtcactcggatgggattgagcaaatacgccagagtgcatgggagaacaatgtcgcgcagcatgaggaaggttgaataaacgcaggcgactcgaatccaccacgtgattgcttcgtcgatcaggctttttagccagcgcatggtgaatccttctatttgccacttgggatgccgagagctgtgatgcgagctgttctggtcggatgcctcttttccatcttgtcgtggtggtgacaatgtcgtcgtattgctccttggcaattccgaagttctgttcggacatgacgatgcgtgtgccatcgcaggcgatgagttctggcgcatttttggcgaaagttaatgccttttggtgatcttcggagatccaagtggccattgattctccgtaggccgcaatgaattttccgttgatgacttccgccttctcgtagtcgcatgtttggcattcgttgccattgcaggttgatttccaaatcagggttgagttgtctggtagttggcagaattcggttgcgtattgacagttctgaacttggtggactggcgaaaacatctgcagattgtgccgttttacgaaaagtgttgctggttgagcaaagcagtttgtcgccgtgctgatttgttcgcctttgaaaagtccggcgattggtccagggaagttgacttccaattcgtcattcgttgaccacaattgtgcttcgtgattcgtcatttcagacttggcgaatgggcattcctggtgaatggccatttgtttgcagatccgcttgttgaccggtggaaattccttctcgatggtgacgaaggagcaatgccatgcaaaggtgatctgctcgggcttgatgattttttgcgaagagctcaattgccaggttgagccattgagcagtgagtgatggcgggggagcgatctggggcgtgtcgttggctctttcgtggtctgcgttctcgccctggtgacgtactggattcgtgtccttgctctcgttgcaagggttgttcgctgagtcatcgtcgtggtccagtgagtgccattgcagaagacgcagggtgaaggcggatccctcgaccctgcttgtactgtgcgatcccggattggcatattttaggcgcttgagttggccttagtctcctctgttgtgacctccgcggttgcggcctgttgtggttcattcgctgctgaacctcctcaatcgttgaggacatgtgaatttgcttccggaaacgtgctgtcagctgcatgctcgagtgcttttgcttgaattggtgacgtagtttaacgtccttatggaccaattgtcgttgcttgttggacgtcatttcggaccctgaccgtcggatggattgctagtttagcgtcttttcggacaatggttgcttggtggccggtgctttgctagtttaacgtcattgcggacaattgatgctttgctagtttaacgtcattgcggactttgggtggtttgtttctctagtttaacgtcattgcggacatgtgttgtttgcttttctagtttaatgtctttgcggacatttgttgtttggttggttctttagtttaatgtcattgcggacgattgttgtgtgggttggccgatgctttgctagtttaacgtcattccggactcgtagcagccgggtgattagcgtttcggacagttgttgatggcttaggctagtttaacgtcattgcggacgattgttggtgattagcttagtttaacgtcttctcggacgagtgctgttggcatggtgtcttactgattgttgccgagctcatgtttgggcaattctgttgactgcccttattaattactgttgttgagtccgagcttctggccaatgtagcgacgcaatgatggttggcgcctgatccacttgcggttggcgacaaggctttcatttttctgttgagttcatttgtttggcttgtttgtgcgggattcgctgcttttccttttggttgtttgctggaagaaaatgctggtcgcttggcaactgatgaactcttccttgttgatgttagccgttgcactgccataggaattggtgccgttgaatgctcatttggtgatttggcttgtctatccctgactggattttgtatgatctcgatgccggatgcgtcgctgtctgatgaaagatcgatcacgattgattttgagctgatgggagccgattctctcttccgttttgagcgcgggtgttgcagatgctggacagagagtttgttgcgttgatgc

SEQ ID NO: 223 - DNA, 1348 bp, Heterodera glycines
caaaataagtccccatttgggctaaaaggccgacaaatgtcaatggagcaatgttttcggcatgtagtgctggaatttcagaattctcgaaaactgacatcttagtgagaactgaaaacggtacggaagaattacaaaataagtccccatttgggcttaaaaggccgacaaatgtcaattggagcaatgttttcggcatgtagtgctggaatttcagaattctcgaaaactgacatcttagtgagaactgaaaacggtacggaagaattacaaaataagtccccatttgggcttaaaaggccgacaaatgtcaattggagcaatgttttcggcatgtagtgctggaatttcagaattctcgaaaactgacatcttagtgagaactgaaaacggtacggaagaattacaaaataagtccccatttgggcttaaaaggccgacaaatgtcaattggagcaatgttttcggcatgtagtgctggaatttcagaattctcgaaaactgacatcttagtgagaactgaaaacggtacggaagaattacaaaataagtccccatttgggcttaaaaggccgacaaatgtcaattggagcaatgttttcggcatgtagtgctggaatttcagaattctcgaaaactgacatcttagtgagaactgaaaacggtacggaagaattacaaaataagtccccatttgggcttaaaaggccgacaaatgtcaattggagcaatgttttcggcatgtagtgctggaatttcagaattctcgaaaactgacatcttagtgagaactgaaaacggtacggaagaattacaaaataagtccccatttgggcttaaaaggccgacaaatgtcaattggagcaatgttttcggcatgtagtgctggaatttcagaattctcgaaaactgacatcttagtgagaactgaaaacggtacggaagaattacaaaataagtccccatttgggcttaaaaggccgacaaatgtcaattggagcaatgttttcggcatgtagtgctggaatttcagaattctcgaaaactgacatcttagtgagaactgaaaacggtacggaagaattacaaaataagtccccatttgggcttaaaaggccgacaaatgtcaattggagcaatgttttcggcatgtagtgctggaatttcagaattctcgaaaactgacatcttagtgagaactgaaaacggtacggaagaattacaaaataagtccccatttgggcttaaaaggccgacaaatgtcaattggagcaatgttttcggcatgtagtgctggaatttcagaaatctcgaaaactgacatcttagtgagaactgaaaacggtac

SEQ ID NO: 224 - DNA, 2693 bp, Heterodera glycines
gagtagttatcccacggtacccgtccgcgtccggtgtgaagtttcacacctttggtgtgaaaccggcaccgtccgtagggtttaggacctggttttcgcgcactttgcggacggtaattctcccatttaaaactaaaaggtttgggaccaaattttcgcgcacttgggggagggggctaccgtaataaaaaaaaaccaaaaggtgtggagccgaaatttaagggcgttactgtaaccaattctaattaaaattcaaaggttcgtggccaaattttcccgcattttgtgatactgtaatataaatttgacttttaataaaatttattttatccaaaattgggggtcatctcaccccccccccccattttttccattcaattgacaatattgttgctttgcatattctgcctgcgagacgatgtgcggctaagggaagagaagaagggacagagtgaacagtgtatgctatctctgcttttctctcttcctcttcggcgcacttcatccaaattggtgtcattctttgatcaaacgcatctgcgttttgggccaatagccatcgcggcaaatgtgtgaaaagaaatatggaagagaaatcggggaagggggggggggtttgatcgcagattgcttttaggtgtgtccaatggtcaacattttggacaaaggatcacagcagacaatggccacgacttttggtcccattgaatgtaagtttgggatgggcgggatagtcatacccgaatacccacaggccacatcttcaccatcatttgtacaaaatttggcccttttccttttttttagcacaactgatcaaattcccttaccctaatgagcatcattcccatttctgttcgtcccaccaatttgacctggatggtcattgagggttgcgtatgcaaccggccggatgctgtatgcatccggccggttgattatacgaaaccggtagagtgcattaatgtggcccatttggggtcgtttaccgaccatctcctcagcaaaccgtgcgacaataccagcaacttcaatgtcaccgagttggtggctggaatgaccatcaaagggacgggctgcgtcaactcgatgaattttgtcttttttctcttcatcttcatgactcaggtgatttttaaattttttaaaataaaatcttaaaaaattttcaaatgaaatttcaaatttttaatattggtttaatttcaggttttcattttttgggcaatcttgctgaacgtgccgtctcgcctgcgacgcattggagggctgcgtccgcgtcgtcgtccgccggtattcgatgatgtagacacccgtccgcttcgtccgcttcatcttctggttcgtgaggtgagccccccccccccctcatcctatcatccgattacacaatcattttcccttcagcgttcgtcggaccatcgattgtccgccgagaatgacggcaacgagcgccgcactggaggggtcagtgaatggaggagaaaaatgggattttttttaaaatttattttttgttgcaggactcaactggtacccgcaaccgtttgtctacgatccaggaggtgaaatgactttattattaatttacaaaatttatttttttttgtttttttaaagaaaaacgagaacgcctttgccagcggctgagatgtccatgaaaaagaatggaaaaaacggagggaataactttatataatcctttttgatggtgatggtgatgattttatcttatatatttttagtaatttatcatttaaaatatttaaatacatgggcaagctgaatggaggattttattttagagttatgtgcttaattaatttttacatagaagctggatttaaattatcagttaaaataaagaattaatcagataattataatgcattacatttttatgatctcgttcttgctttttgatagccgttttggatcttgttgaaactcttctagtgcctttaaaattttaaaaatatttaaataattttatttttaatttataaaaaattcaaaatttaaattaccaaacaatccaaagaaagaagatgcacgcaataatcagagatgcacgccaaaaactgcacaacgaggactgatgacctcgttcataaaagatcatctaaataaatattaaaattataaaaattattaagtactaattatttaaatattaaccgttccaacgctgtagtgtcggttgtaggctcttcgttttttaaaaatcggtaaaacaggacgggacattgcttctaaaatcagtaaaaaaattacaataaatatgaacaaatgatggaggagggtcgatgacgatgatggatccatattatttgccattcattgggtgtgccaaaaaaaatgagaatgtaggtcactcccgacggatgacaaataagagggaccatcttataaatgataaataaattaattatggattcactaatgcggtatataaatggtggtaattttggataggttcattttggataaattttcttgaaaatgagcatcaatattcgtgacaaaaaatcgcttatggagaacattttgccagcagttgaaatcagtcacaccactaatggaattacagtgagcagtgagcgcattgctgttgcgaggacaattcctttcgacattgtcggcaaatgcagggagtgcaagtctacagaatgcgaaacggaatggtgcatatc

SEQ ID NO: 225 - DNA, 1085 bp, Heterodera glycines
cactcagacacccgcaccagtctaccaattaccacctcctccacccccgccacaactcccaaaaagaaaacagaaggaacgacaacaagcggatgctcccgcatttttttccgcactttcggcagcatcattaggagttgaattggcccaaactaccgtcaatccttcggctcagcaaactcagtcacaagagtcaaattttgcttcttctatttcggcggctacaactgggctcgattttggtcaaatgtcgactctaccaccgagacatcagagccattccgaagcttctgatttcttttcgccaattgcagcagctacaatggcgatggacgtggaacaaaagaaacccaacccaaagccgagacaacagcaaacagacgcctcaaatttctttggacctatttcagcggcaacaatgggaatgggtgcagaacagctaaagccaacgataaaacaacaacaaaatcaacagcaaaacggagttgcttctgagtttgcttcggccatttccgctgcaacaatgggtatgggcaacgaacaacgccaacatcagcctccgccccaaaaagagaaggaacagacggaccaagaaattttggatgagtttcttgagagcgtttcggctgcaacaaccctattggatgttccgcagaagaagccgaagaagaaaggaaagaaggaggtagaagatgaagaagccgcagcaatcgcatcgatcacccgtaaacaataaactatttaagtacttgtgatgcaattgattttttaaaaatatccagaatgtttggaaatcaattttatacagataaagagctaaaattaaaaatgccatttggtatgctcatttctgggccatcggggagtgggaaaagcacttttttaataaaatttattgccgagtcttccgaacttattcatcctaaacctgttccattctctatgcttttggagagatgtccagcatcgtgccaacgctccaaaatgtggtatcagtgtgtattctgggggtcctcctgaggaaaatgataatcgtttacctaaaccattgcttctcatccttgatgaccctttgctatcgatcg

SEQ ID NO: 226 - DNA, 5832 bp, Heterodera glycines
  unsure (1)..(5832): unsure at all n locations
ccgaagcttctgatttcttttcgccaattgcagcagctacaatggcgatggacgtggaacaaaagaaacccaacccaaagccgagacaacagcaaacagacgcctcaaatttctttggacctatttcagcggcaacaatgggaatgggcgcagaacagctaaagccaacgataaaacaacaacaaaatcaacagcaaaagggagttgcttccgagtttgcttcggccaattccgctgcaacaatgggtatgggcaacgaacaacgccaacatcagcctccgacccaaaaagagaaggaacagacggaacaagaaattttggatgagtttcttgagagcgtttcggctgcaacaaccctattggatgttccggagaagaagccgaagaagaaaggaaagaaggaggtagaagatgaagaagccgcagcaatcgcatcgatcacccgtaaacaataaactatttaagtacttgtgatgcaattgattttttaaaaatatccagaatgtttggaaatcaattttatacagataaagagctaaaattaaaaatgccatttggtatgctcatttctgggccatcggggagtgggaaaagcacttttttaataaaatttattgccgagtcttccgaacttattcatcctaaacctgtttccattctctatgcttttggagagatgtccagcatcgtgccaacgctccaaaaatgtggtatcagtgtgtattctggggttcctcctgaggaattgattaatcgtttacctaaaccattgcttctcatccttgatgaccttttgctatcgatcgatgaggcctatctcagtgcattattcaccaaaaaatcgcaccaccagaattttgccgttgtgtttgtcacgcaaaatctttttgaacgaagaataaaagttgcaagacaaaatgcccaatatttggtgcttatgcgggctcccaactcagctttggccgtcagaaacatcggagtacaattatttccaggaaaattggattattttctttcagcttaccgcattgcaaccaacagaccgtatggctatcttctcgttgatatgcatgctgcttcaaacccattgctgaggcttcgaagcggaatatttaaagaggacgaagaagaaggagaaaaaatcattttcattccaaaaaatgggctcttgtaaaattggagatattgttcataaaaattttaattttattcgcgcattggcaaaaactaaatcgaacggaaaaagaaaacaaattttaaaacgcgcaaatgccgatcaattgttaacacttgttgaaatttgcctaaacatcctttgccaacgtttcaaaatgacaactcgacaaaaaaaacgtcttttaccatatgctaattttgttcggagtcttgctcgacgaagaaccgagaaaggagcccgcaaacttttagttcaaaccggaggcggacttggcggtgtttttgcagctctgcttacccctatattaattgatttggctcgatccgctataaattcgagctcatcttcggagaattaaccatttaggatggcatcaaaatttgttcttgtgcctgatgaaatttatcgcggtctaacaaacagtgattcggaaaacatcaacttggattttgttcagcgtgctttggaaagaacaaaaagaaagggcgaaaatgtgacagcaaaaaatgtccattataaccaagaattgtcgcgttacctacacctgagagatgaagatcaaaataagccatcaaaagtagaaattaccaaaggtctaaatgcactgatcaaaagaggaaacgaaagtgatgaagaagaacaagtttttaatttggagtcagatagatcacaacagccagcttcacaaattagcagaccgcgtcgacatcatcatcatcataataatgacgatgaggaaatgccattgcagccagcttttccagcgcttcaagctgaaaataggggacaaaagcggaaagcaaatgatttttattcctcatgggaggagggcgcaaagagacaactgcgtcacgaagatgaaacggttccttcttcctctaaaattggtaatagacaaagaagaagacaaccgccactctcattgagaagagaacaacgacaaattcccgctgagattcagcaggaagaacccttccaaccagccccagaaccgtctattcccatccacccacaaattaacagaaaacgcaaagcccataatgctctaaatgatgttcgagaaataaaaaagagacttataggcttggaagaacttagacctccctctctccagcaagaagcatcccttcgctttcaacagaaaagaacaaacaaaccccgagtaaaccaaccccagcattcgagttcatcggccttggtaacaagaagaaatcctcagaggaatttactggccgaggcggcctttgctccattaccagataatgacgatggcgatgattttgaactctcacaaccaccagccaccgcagctcaggcccagcctctcccacctagaccttcattaccaagtaaaactaaaaagaggaaaagcaacaaagcggaagaagacacagaaagaaaaagaatcaaaattagctctcgaaaaagggacttgctggcagaagcagccgctgctccattacccgttaatgatgatggtgacgatgactttgagctctcacaacaaccgggaacctcggctcaggcccacccacctggacctccgttgcctagcaaaaccaaaaagcggaaaagcaacaaagatgaagaagataccgaaggaaaaagaaccagaattggttcccgaaagagattgtcgtcaccaactgtgaccaaaaatgagccaaaaagacaaaagagctctggaaacgaaggactatcagaagaacagcgtcgtcagtttgcggacgatcaacgccttttcaccatcccgaattcccaacttaccaatgagcaaaagagaagacggctccagttcgtatttaaccgaaacccggtaaagtatggtgtacgcggagacaccattttaaataatgcaggaaatccaataacggatagcagtgtgacacaagcacttgaatatattattgaacgcagagctggaagagttcctcagtttagacagccaccgggaacaaaaattattcaaaatcgaattaatcgagaccttattctacgaacatggacggccccaccggtaccaccgaggggagccaaacggaaattaccacagacagaccaagacgcggaattaaaccaaaaatcacaaaaaataagaggattggggcaggcgagaggcagagcacaggaaggattgatgcttccgtttccaacgaggggagtcaagcggaaaacaacggtcccaccagaagcagcaatggaaataccctcaaagacacaacgtctgagaccacagaaatggaaaaaccattaaaaattcaaaaactattagaccgtctatacaatgacccaaattcgcctgctgcattcgctggcgtaaaccgtttgtggttggaagccaaaaaggaacttgggtataaaatttctaaaaaggatgtgaaacactacttggagggacatcgcacatacacgttaatgcgtccaagacgtattaactttcctcgttctcggacaactgctgctggctttatgacagactgtcaggtggatttggcagactttcaagcactttctcgacataacagtggaaaccggtacttgatggtactaattgatgttctttctaagcaaatttttgtaacaccacttcgtacaaagaaggcagatgacatgattgaaggatttaagcaacttttttcacaaatgccaatgaaaccctaccgaattttttcagacaaagggactgagtttaaaaatcagcagctgaaaaagcttttcgacgaagaagaagtcgaaaaatatgagagtaatcactctgagaaaaaggcagcattagccgaacgtgccattcgacaaattaagaatcgagtctaccgctatttcgcccaactcaaaactcttaattggtttgatgtaatctacaaaattgttaatggaattaacaagtcaccgagtcgggtacatggcatgcgaccaattgatgtgaattttaaaaattctcaaaaagtttgggaaaaaatgtttggtgaagaacaacacagatcactttttggaaagcacagaaaaagaccaaaatttgttcccgaccagaatgtaagaatgagcatagcaaagggtcaattcgagaaaggatacatacctaactatggcgatgaaattctggaaatcgatgccgtcaaacgtcacatgaaaccaatgcgttataagttacgtgatgcaaaaggagaaaagtttaaaggattcttttatcctgaagaattaactcccgtacgtaaggaaactgatacgacttatagaattgaacgcgtttttcggaaacggaagcggactgacggaacgatggaagttttagtgaaatttatcggttatcctgaaagagaatggattcacgagacccaacttgtataaatacttgcaaaatgtacattgaaccattatagtttttttaaaataaatgtctaacacattctttgtccatttaccaagtaatagccctgagtatgttgataatgctccaaataaatttcgtgtccgtcttcccaaaccaatttattttaacggctcttgggtttgcggattacacagcataaattatgcgtattcgtggccatccactattgggaccttagatgatcagtggataaacattcattttaaggatggattagacaatgaaaatttaaaagttgtccgaattccggtcccaaaagcttcaaatacaaccattgaacatttgagagagtttcttacaacaaccctaaagaatcatgctgagtcactagaatcgatcataaaagatggttcccaaactccaatacgaagaaagagagcagcatctcaaccacaatcgcctccaagtgccgcaatagtgccaaagtcgcctccaagtgccgcttctaatgtcacttttaatgtcaaagtatcaacatcaccgccacgggccggacaaaaacctaatgaaaatgtccaagaaatgaatgattcttctttaacaaatgtgacaaagccaccggaaaaacaaccaaaaattgaaaaacaacccgaagtcataaatgcgaaaactggagaaatcaaccaaaaacataacatttcacaagtaccaacatcaccgccacgggccggacaaaaacctaatgaaaatgtccaagaaatgaatgattcttctttaacaaatgtgacaaagccaccggaaaaacaaccaaaaattgaaaaacaacccgaagtcataaatgcgaaaactggagaaatcaaccaaaaacataacatttcacattcatatccaaagcctacggctccattaccagtgtctattgtgccggatcagagtgtttcacaaaaaaatattcctccaccacccgtttcgaatccatcaataaatgtgactaaaaagcaggaaggagtaaaaagcagcagtgggctaacacattcagtttcaaagcctccagcgccatcgtcagtgacgaaccagattacagtatcacaacctcagcaaatagtagtcgcccctcctgctcaaaggaatgcaactaaaccacaatcagcaattagtgaagtgaatcagaaggaaattgttccaccaccagaacaaagaaacgtaaaaagtacagtcgagagagtctcaacaccaaaacatcccctagcagctccacctaagccgtccaataccaccgagaaaaagccacttctcctcctcgcgncattctcactgattatat

SEQ ID NO: 227 - DNA, 5453 bp, Heterodera glycines
gagcagttactttccgtcttgttgtggagacaagtgaatgggaaaaaaatcaacttgagaattcttaggcaaattattgaaggagttgaattacagtatcatcaaaattttgagcggttcaaagcggtttttacagacccaagaattgaatatatctcattttctcctcagctcggctatgtgttgggttttgaaaatcatcagaatgtaagaaataatgaaattgctaaatatggaagtgatctccgtggtggatttgcaagctttgccgtctacgcaaaaggtctaaccgagaatatgattgttggaaactcgttgagctcacttcttcgtgttgtatcagtgtcaggggccataccaggcgaatacacggaaaaaatttacgactctccgctctatgcacgtgttttaccaaaagaagtattagaaattgaaattgaattgcgaactatgactgacggacgactggtaccattttcctatggtacagtgctgatcgtattgatatttaagaaggtgataaatttttgaaatcactcatttttgttaccactataattgataaaatggttcacattctatacgacacatcggtttcgggctatgatgcattttttgtgcaaaatggatgtggagtcggggatgactcctcctaccaagtttttcgaggcgcgcaaccgtttcagcgcgggtggggcactgcacaaacgggtgcaggaataggagatatttttcgtggtctctggcgctttttcctgcctctaattcgcagagctggagatactgtagcagacgaaacaattcagactggaaaacgctttataaatagagtaatcgatgaaaaacccggcttaaaaggaagtatagagacattgacaactgagagtaaacggggagcagacaatgttttagagaagggcggatttcgacgtcaatttggcacaggaggacgaagaaagcgtataaaagctaacaattctcccactctatcacatcagactttaatcggaaaagcaataacgaaaccattaattaaaagcaaaaaaaggcttcgatcagacgcgtttggtctttattaaaaatgacatttcacaaaattgacgcgagtagcatcgattcgattaccaacgccgtggattttttcagtataccccctacaaatgttacagtatcatcgtcaaaggttttcgagattttgccgagtaatcccctcaccgacacaccttaccattttaaaatacactcgagccaaaactacattgacctgtcaaagtgttaccttttgaccgaatttcgaatgcgaaaattgacagcaccaaatggtgaatggggatatttggatgccactgatcaggttgtaccgatacaactaatcggacacactttcatacgagacatgaaaattgcaattaatggtcgcgaaattttcaactctaattctctgatggcatacaaaacttatctctctcatgaactttcacaatcacttgaagctaaagtttcgcatttaactgctgctggatacgaccgtgaagatgctagtaatctacaaaacgcaaattctgaagggttcaaaagtagaagacaacggtatttgggaggtcgaacagcacaatacattgcaaaaatcgatgctgatcttttcaatgtaccccaatatttgattaatcattgtgaaattgacataacgatacaaccccatgacgacaattttttgttaattgacaccttagacccacccggtcagccatataatattgagcttgttggattgaaactctactgcaaaaaagtcagtcttatggatggcttggctcttgagttggcgaaaaaattggaaatgaaaccagcacggtatgctgtacgaaagacaatgatgaaagcactgttcataagcccgggacgctatgaatttaatgcaaacttgttcatggaccaagttccacgccgcgtaacaatgggacttgtcgcaaattcagattatgtggggaacaccaaaaggagcccattcaactttcaacattttaatgtacgggaattgagtgttgtggccaatggtcgctcttatccccaagccccgtatgatattgactatgaaaattggaaatttgtccgtccctacaatgacacgcaggaggcgcttggttttgccaactctacatatggaaatggaattgattacttttcttttttgcacactcactgtatttatgtgtttaacatgactaatagtggagatgatcatggcggtttatttgacctgattaagaagggatgtacagcagtgaacataaaattcaaaaagccagtgcccgatgggggaattacattgattgttatgggagaagcagactccatctactttttggataaaaacagaacgatcgcgaccgatacaaccatttgattataaaaatgtttaatttattctttattgtcttattttttcaaccaattgtttcattgattgttgaagaaggaataaaaactgatgaaattccccaatataatgagtggaaaagacttttaggatttaaaaattcttcagaattgcgaaatataacaacaacaaaaataacaacatttaaaaaggtatcaacaacccgaaaaactacaatacaaaatacaactataaaaactaaagtcactacgataaattcacaaccaagccgtgtcttaaaagaacaacagcgtcaggacaacattaatttcccttttgtccccctctgcaaagaattaccgaaagaggcaaatgtctatgcgcatattttttgttgggctatgatcatcctttttgccttgtcagtcataagcctcatcatctatcaatttcgctcaatactttggttaaagcttacgttaacagaaaggcgtagtaagacgaatggacagcacgcaaattaccaaaattttaatgtcgtccgagaaaacgggtccgaggttccttggatgcttcccatgcgatcaattacctgacccaatgttcataaaattcccgtcatcgttgattgttaacttagacccccaccaattttccggctcgcattggattgcaatgtttgtttatggattaaataagaaagcaatttattttgatagtctagcgctaccgataaatgcattaattgttagctcttttctcaattcctttcccggagtaatgtttaaccaaaaagccgttcagtcattttcatccaattcatgtgcacatttttgtatttgttttgtttattttatatcttctgggtttactttcgaacagtttcttcaaaaatttgataatttacataatcccgaattatatgttaaatattttattcgcaatttcccaataaaattgtaaagaaattgcatttattttcattgtgtacttaggtctctcaaaaacgaaagcaatgaaaggtaaagtaaacacaatgtaccgtctagtgtcaggcaccaatgaatgaccactgaaccttgcccttcttcaacgacccgtcggacgctgattggctgagagcatattccgcgcctttatttatatgacatttcctccgcagaagagaggggagagtcgtgattggttgaaaggttaatcccctcctcagtgagcagtcaaccaaatgagtaaatatgaccgacaaaaatcattccttcttcggcaaacggaaggaattttcttgagagaaaaacattaaaaaaaactgcttagaaaattgataaaaatttaaaataaagtgtaaaaattgattaccatagtcttaaatacagaaaaaaaagaaattttgttcatttaaatttaaagaaaatgtcaaattctactccttcttctcctccatcaaaacgttcgcggcgttttttcattgatgaattacttcgtgaaccatacaatgaactttcaaatccacgaaagtctccaaaagactacgtaaaaaagctcgactcggaaattgagcgtgtcccaaaatttcaatggttaaaaaacaaatcaaccttcatcattgaggatgtaccagcagaccccgaagggcttctaattggaatttttcaacattgcatggacgaagcaatgagcgaaagcgttttgggaggcattaaaccaactcatcttggttgcattgtctccagtcaacttcttacatccgacatttggataccaatccgtcagatcactcccgataccatcaataccattctcaaccgattcaatgacgttgcacagagcaaaaagcaggacggtgtaacgctttgggggcagccgtttaatgtcactgtgataactgttaaccggaagggtttgccagagaagcggcaactgaaaggaggagctccgagaaaattagcaccagtgaatcaccaaatccacgagcaatgtcttatcaaggtttttaagtaaaaagattaatttatggagacaattaagattatcaattccgacaactattgtttgttttatgcaatgcaagcaacaatggtccgcgcagtaggcggtttgaaccgacaaaggtttcatgattatcttcgaggagtgggaggaaggctcaaaaaagaaacattcgaaataatgaacgctcttaatgtttcatttggacaacaaaattacgatgctgagttttacgtgccaaggatcattgattggtggaatggcaccaaattcatggggatatggaaattcaaagcattcatctttgggtcaactggacactacaagccgcttttcaaatatgggccggaggattatgttgtaccaattatactttactttgatgcgagtcatttcaatggtgtacaacgaagcggcaacttgtttggcaaaccttattgtctaagttgtgaaaaaacatatgatcgtccaaagcagcattccaaaagctgcaaagctcgctgcataaaatggtttcaaaaaaggttcaaaataatattcccagtttttcattagctcacaaatgggtcccacctttccgtgcaaacccattgatggatttcgtcaaaaatgcagtggatgcaacaaaatgttttataacaatgactgctaccaacatcacctcgcttcagatttttgcaaaaacagcaaggaatgcaagtattgtggtgtagtgtgggacttgaaagacaacacaaaagatggaagagaggtttttttatttctctgatcaatcaaaaattgctttagggacataaatgccaagagcgatggtgtgaaaactgccaaattttccatgaattcggacgaggctgctttatccgcccattacaaccaaatcagaagaaggaagccacagggtggcggttggtgaccttcgatttggaaacaatgcagcatgcaccagccgaccctaactttccggaacgacgaaagcatcaagtcaacttcgtcactgccaaagttgcttgtcccgactgcatttcttcgggaaaatggaaagagagcttgcgaggaaaattttgcaatgtttgcggctatcatcgga

SEQ ID NO: 228 - DNA, 7654 bp, Heterodera glycines
ccttttaataatacaactggtggatcgacaaacaattgatcgccatcctttggtggcttttgtcaaatggattctctacaagctgccaaaacaatatgaaacaattgcctattcacatttcggtggacgattcgacatggttttggtcttcaaagaattgctaatggaggggctcaacccatcaatgattaaaaaaggaaatcgcttattcgaaatgaaggtggattaattttcttattatatttttattttcaattcaggtcaaaagcagaaagaagatgaatccgaatgtaacttttcgggactcgtggaatctgatcccaggaccgctttcttcaatggtcccaatgttcggcctggatgtccaagacaagccatttttcccacatttggcaaaccgaccggaaaattatggatgccaaattttcccatcgaaaacggattatttggctgacggaatgaacctggaaaagcgcaaagaattcgacacttggtaccaacaaaaccgaaacacaccatttctgctcgatgaagcattggctaggtatctcattctttgttaaattaaattttctaattttaagctactgcaaaaatgatgttgatattttaatggctgggcttattgtatttcgtttggaatttttggagatgaccaaacgaccggctgggtcctatggaaaagcggacagggccgcctacaaaacgcctcatgagggaattgacccgatcaggcattgcataacaatcgcctcagcatgcatgcgacactttcggacaaatcatttgaagccagcccacttggcgctcgtgccagaaaagggctacgacagctgtggcgataatcaaagcgacttggcgctcaattttatgcagtggtatgccgacaaatacggagttcacattcaaaatgccttttccgctgaaggagagaaaaggtaatttcttgaacaaataaaggattaaattttgctaaaagggttggaaatttccgccttgacggatggatcgagactcaaaagaaagggcttgagatccatggctgcgtttggcacgcatgttcaaaatgttatccggatgataacgaaattttgccatgcggtaaaagtgcaggacggattcgggagaggaacaaacaaaggatggatttcataacggagcgagtgccaaatgttgaaattttttggcaatgcgaaattgaggcgatgttggtcagagacaagcagatgaagaccaagttcagcgaatatacaggagatggaggaccaatagatatccgttcctgcttcatgggaggacggacgggagccttgaaactttaccatgaggcagcaaaacacgagcaaatcagttactatgacttcacaagtctctacccatatataaagtaattcaataataaataattaattaattaaaaagaaaattagttatgtaaccgattacccaattggccatccaactctccatgttccttgtgaggatgttgattggcggcgccctgaggataatccctacccgttggcaattctcaaagttttcgtcatcccacctcgccgaattgatgtccccgttttacctgtcaaagtcgatgatcgtctatgctttcctctgtgcatgaaatgttgcaaaaaattcccaaatggtgctgttaaagcggcatacagctgcacgcataacgaccgtgaacgagggtggattagcacgtgtacttcgctggaagtaagttgcttttttcgacagttctaataaataatttagctcaacgcagcattagaagaggggtaccgagtaacagagcttttgcgtgtacttgagtacagtaaaagcgacaatgaattattccgcccgtacatgagcgaatttgttgtccaaaagctgcacgcttcgggatttgatcagaacatccgtgggaatcttgaagccgaggagcaatttattgcagaatgttgtgaacaattcggaatgaaaattgatcgcaacaaaatgataccaaataagggaaagagagcccttgccaaattggcagtcaataatttgtgtatgttttttttaaatttttttcatctccttaatttagggggtcgtttttccctacgcaactatggactctcccaaacgctcattactgacgacccgtcggagttaggcaactacttggacaacaagaaaatcgatgtcacagggcttgacatgttgaccccggaccgaattttgatcagctaccaacagaaaaaagattgggttaaggaacacccttgctcgaatgttgtcgtctcactttttaccacttctgcagctcggcttcatttgttaaaagcaatgcaaaaggtcgttcgaacacccggctgtgtccttttatatacaggtaagaataaaatttctatccaaaatatttgcaattttagataccgattctttaatatatgctcacccaattggcaaaaaccctcttagtacagggccccatttgggtcagttcactgatgaattccccgacgttagtttaaaaatattaatttttctcttaaaaatatctttagcatgacatattggaatttgtgagcggcggctcaaagcaatatggattgaagctcaggcggaaagggactgaaaaaattgagcacatgctgaagctcagagggattacactcaattatgatgtcaccgaaaaccaagggcttcgatttgatacgttcaaagaaaaagttttacaatttgctcgtaccggaaatgttgagccaatcaaagcagtttacccaaatttcctccgtcctacagtaaacgctggcagcgttatctccgccccccttcaaaagatatacaaaccatatgttagtaaaggaattgtttgttctcgtgactttcgtgtgatcgattttggatatgttgcacagtaaaattgtattttaattaccgaacaaataaaaaatgtaaaataaagtgtaataactgacatttttgtggtatgagtaatgcaaatatcaaaagagaagatacacttttttaaaaattaaggttaagaagaagtcaattttggctgggaaaatgaaaaattaatgaatagaagatacaattttatgaatattagtagataagttttatacatttgaactacctacctaccataaagaataaccgtcgctttggctacattcttggcgtccgcttgatattagtgatgtctcagtgcttgcattttcgtctgtgttaatgttgttattgttgtcacttccggtttcagtaaaaatacgtcccagccaacccggttcaatctgtccagcattaattttgcatagctcaagcgggtagaagcgatcctcctgaccctcgggaaatctctcgattacacagtgcaggaatgggtgtcgaagtttaatgcggtggcgaacgtaaaaatgcgctgtcacattcacattgaagggtcttcccaatcgcccgtaggccatagttgttgatgctccttgcggtgttatgccaccaaacagaaagctctttgtgaaaccgttccgatccttgtatgttgtttgtacgtgacatcccttcaatgctttaacgacatgtttaaaatctgaaggatgattaagccgatcgcggagctcagacacacgacaattcaaaatttgggcgattttctcagtaagaagcataataatcaaattcaaaagctaaaatattgtaaaaattaatgaagaaaagatgtaaatttagggagaaaaagagcagaattaacgaagtgaagaataaaactgaaaaatataagtgtgcatcaactatttataacaatcttggttttgtttttctgggttaaacaaacatcaatctgtataaaaacggagaacaagatcactttattcaatcctttattcaaatatatttaatttattaaaataaataatcctagctaataatgccgactcctcctcatgacaacaaaatttacaaaaaatctgaatatttaaaaggtatttttgtctcattatttattaataatattcaaaaaattagtcgatgatgctgatgaagtggatacggacccctctcctgaagaagttgagaaatggacgcccgagcaagtgattgaatgggaccagcgtagttatgaaaaaatgcctgccgaggaagagatttggcaagaattcctcgacaaaggagaagcgaatgtcggtgatatttatccatttttatgtttaaattaaaactttaggttctgcgtgagttctttggcggagagggggctcttaaagttgagaaaagtcttcgcgaatatgccaagaagaaagaacagcgagatgaaattctgatgcgaaagcggaaagaatatgaagaaaaaatggaaaacaacaaaggcgaaaattaaacactcctttgtactgttattgttattgattcaaatttggattaataaatcctttatcaatgttcaaaaaacgacttcttgaattgggttaggttaaacaaatattaggagctataaaatcaaaaaaattcgtgatattattgtccattcattcattcattcattcattattaacatatcccaccagcccattcattatctcaatgctccaaaacgaagattcctgcatgaatgagccaaaacaagaagtcaacatttcatcaccaaaagttcaatcctggaaactttttcgtccaaaatacatgttgacttaccgcttgtgcgactgtaagtttatcaaattagcaaaaatatttgactttgtggtttaagtatgtctttcggctctttggtccaacaaaaacaaattcacgactaacgaagaacgatcagtgatcagttttgaactctgtgagaagtgcaccattgacaattgccgagcgactgatgttttggccccgtacagaccaaagaaataactcttcataagaatgcaatagttagggacaaatcaatatttttcattcagtacatcattaaatttgttatttaatttctcaaataaaatgtcaatattcggaattccctctcaattattttccccgattaatcggcacctttcagtcttccattgctctcgagttccttaatgtttgcacaaatattgccgagaaaattttcctctccgcgattagcaattgccctttcccgtcatttgaattacgcttgcccttccgcgcagagagtgtttatattagttgagcattaggagctaatcggcggtagctaaaaaaggattttcgctcggcagttcaagcactcttcggcaaaaaacgacgatgagcagagaagaaatctgagatgtcagaatggcttccaatattaggtcgactgtatggggcgggaccaacaaaaatggtaaaccgagaggaacgacaattttagtcatttttgttagatttttgcgaaccaaaattgtttgttttatcgtttcgcccattctatttaattgaataataaattttaattttcagatagcaagcaaaaatgagcgattcgaccaacgatgccattcgtgaattacaacgagcactgcgtgaacaacagagaacaatttttgttttgcgcagtcaaatggttgatcaccgggcggtcattctacaaactgtcgcacgcacggaagccctggagggatacgcggctaacgtaaatttgaattcaaaatttcactagaatttaccctttttaattaataattaaaataattttctaaaaattgtttcagagccgaggagggagatttcgttcccgttattcacctatggtggcgcttgaaatgaccaccataggacggcggcttgaagagagacaacaacgtcgccatgcgcaagcccatgcatcgaccaattcatcatcaccagggcgcggtgagcccggcacatcctctggcgatggtgccaatggtgattttttgaattttcatacttttcttgaaatattgaatttaaaaaatatatattttaaggacaaggctcaaacgagccgagtgttggagctatagcagtcaactcgggtttgactgaaacttgtaattataaaaaaaaacccaaaaaaataaattatcatattttttcagtcccaccaaccccactcagctctcgtggacaaaacagtgctccattgcgtcagagtgcgtttaaaacaaattaagtgagagaaatctgtttaatttaattttcagataccgctggtgctggtcccagcacgggaattgcagatgggggcgctgaaagcggcggtaagaacatttttctttctttaagtcatcataatggaaatatattttaggtcagtggttcgggcccacgattgaaaaccacatgaaccgatcacgacttcgacttgtgcgcgaggaaatggcacaccgaacgatgcagcaacaggtggaacatcagcatcagcaattgcttgaacgggcggaaagagtgcgacaggccaatgttgaacaacagatggaggaagcagacgttctacaagaacagctgcagcagcaggacgaagaaaacgacgagaaccgcgacccagaaatggagcagcgacgactagttcaggtcgctcgacaggcagaatacgagcgacttgtccgcttgcaattgcgggaagctcgccgttttcacaacggagtcgcttcttcggttgtggtccctcctcccttgttttgggaggaggaatgcgtcatttgcaccaacgcccgtgcaaatttttataatcgtcagtgcgggcatgtttgcctttgcgcggagtgcgcagtcactgcggtaatccaaaaactcactgtctgtatgatgtgccgtgccccagttaacggcatatacccatatgttcgttaactgggacacgaaaataagtgttagcataattttaaaaatttggaaaaaaataaaagtacagaacaataagtatgtttgcattacactaacacttattttcagcattttgtgtctgtcactctatcccataatatgctgatcatttatttgcttctctgattgtattacctaattattttaaaattggataactttttctttcatttttgtaaaacattttcattataacatcgatcaccatttatttgaccgtaatacctatttattttaaaattggacgctgtttcttttttttcaatttttgtaaaaaaattttctattttacacttcaacataccctcaagcattatttttttttattaaaaagtgtaaatgtcagaatcattaacaattatggccactgtgggcaagatgcttccaaggcgcctttcctccgttttattgggccccgtgggaggggggatcctcgatcagcccctcccggacaagaaattctttgtaaaggcgctccgccttaattttataaaagttttagaatgattttctttgaaaacaacagactataaagacaaagaataaaagatgaaaatgaaaaaacaaaaggggggcaaataccaggagatgcccgccttatgctctccactttacagaaaagagcattggtaagggggcaaataccaagagatgcctgcaaaccaatgcccagacaaatatgagaaagagagagattgagaaaggctaaacagagcacaaactccaaacccaccttatcaaattgggcctttgtgacatctgtgtgaaaagcaaagggctgacggcaaatcggtgcagcataacgtcgggccattcggcgccgaactgaatt

SEQ ID NO: 229 - DNA, 733 bp, Heterodera glycines
ttcactactgacatcgatacggattacgtacttacgtactaaaaatacggaaaatccgtagtacgtaaaaatacgtataagccgaaaaaatacgtattacggactacggatcagtaaaaatacgtatacggatccggtccgtatccaatctctagttttgttgggtgagtaattatttttttatcgcttaaagttgctgactttaaataattatttcattttcaactattagatttaattgattgttggggacgaccaatgatatgctttttacttatttttgtattgtaatatgtaaattttagagtatttatcaatctagatttatttagaataatatttatattaatttttttatatctattaaaaatttatcgtaaagaaaaaagaaattaaattaataaaaacataataaaacgaagaaagaatctccaaccgatttttgagtcggaagaatacacaatactaccatactgcatatgcaataagtaaaaaatgatattagttaaaacaaattaaatacaattattttatatcaattaattaagtgaatcttattttactagataataaaaattgttaaatttgttcctttttctataatacaaattaaatttgaatttattattttggtcctttaaaaatcgaatgtatttgcaatgcatttatattttaaatgaaaatttatgtttattttaatatattcttaaaagtttctaaaatcaattagatg

SEQ ID NO: 230 - DNA, 4301 bp, Heterodera glycines
  unsure (1)..(4301): unsure at all n locations
ccgactccagcaaatgcaacggttgctgcgaccactctatttgccgcaccatcatcatcatcaaccaatttgtcaatattggtggtggtctgtattgttttggttgcggttttgtgtatcgcacaggtgggtttcatttgattattttgtaattttgataataaatttttgtgataaaggcagtgcgtttcgcactgaaattgcgccaatggttggccaagcgtgccttcaaaaagaaaatgttgcgccgcaaccgtcaaagtatgtttggaaatttttatataaaacttaatcaaaaaaaatgtaatttctttttttttttacaggagcgagcacaattcgtcgctaccccaccgcaatgccgtcgccgttgttcttgcccggggcatttccgggcgtgactcttcgccctacgggcatcaatttggtcgaagaggtgcggttttgttttctcattaaatcctgtgagcaaattttgtatttttcaagcgcactgaagatcacgcggtggatgccggcccggtgtatgcgccgactgtatcttccgccaggatcgatgtccacacagaacaggcagaagaagaagaagatgatgagttttaagatgttcggaggaatttacgatcttttatttttaattattcgatcttttatttttaatcattcgatcttttttaatcctgcgatcattttaaataaatcactaatacaatctttgtcagataggaaaattgaatttttggcgtctaaaattatggtaattaatgataatcaagccaaatgtgtggaattagaggatttgaaaacaccatatggtgaattaggtcaaggactaaaataactagaatataaaaggcgactcgttagttcactcgctcataagaaaaattaaaattattattattaaaatgacttcctcaccaaaaagtaaataataataaattttattttatttttcaatcaattcctttagcttccctctcccgtcgttcacctacccctgagattgatgagctagatgaagtatccgcatggtatgacatgatacaaacggacgacgagaacgtaaacaatttttttatattaatatgattttttcgctcattaagatacttaattggttcacacctaagatggcccgagttgtgtgccaggaggttatcgaatttgctcagcaacgcaacatgccgtgtgagaaggttgtcaagtggaagaaaattctggacaaaatttgcgcacaacttgcgcaaaagaagtgatcactttccaaaagacgcaaagaatttcctgttacttttttaattaaataaaagatttactcagtgtaaatggctttctttgaactgtcaaacgggactcaatcctgagtgcccacccaccgttccttaatgtttaaagtgggtgtgagatactttagggtcatgcgggagctgtatataagtagctggtcaacttgtccttcatttcattcttaaatattttgaaaaaaaaaatggcaatcaatatttgcgacaagaaatcgctcgtcaaccaaatcctcgggcaggcggacctcaccataacaacaagcggcataaccgttagtgggcctcgtctgtccaccccacgatttatacccttcgaagagtgtgggcgctgccgcgcttgtaaggctaccgaagttgaggttgacacaatggtgaccaaagagggggtcacattgtggtgtagtcggatcagcaaggcccaattcgtcccatttgatgtcgcacaactcaaggagcgcagaccgatgagaaacaggacctgaaacgtaaagcgaaggtagctctagacttggtggaggcaggtctaatggcagatgcgatgcaggacggtgcgcgttggaagaaagcaaaaaccgcaatcaatgttctgggtaatctccttttggcggaatcgttggacaacaacaataacaacaaagtgacaaacagcccagcagcggaggaagacaatgtacaggaggaggaacataaagaagaagaaaagaatgaggacctcggagacattgacaagactctggacgagttcttcaacagtattaaagcttccacctcaaacttgtaaatcatttttgtccacaaaaatgcttaacacacaatcctttacaaataaagatgtttgtttcaaattaccgtttggcctgattatttctggtccctcctcatcagggaagactgagtttttattaaaattcattgcggaatcggaccaattaatcaccccaaagcccatctcaatgctctactgctttggtgaaatgaacgcggcggtaccggcgcttcaaaaggcgggagtcgatgtgtacgcaggagttccatccgaagaattggtcaagcgtctccctaagccactcttgctaattctcgatgacctaatgctgtctattgatgagaagtatttgtccgatttgttcaccaaaaagtcacaccatcaacaatttgcggtggtgttcgtcacacaaaatttgtttgaacggaagatcaaagtggcccgcctgtccgctcaatacctggtgctgatgagggccccgaattctttgttgtctatccgtaacattggtgttcaactcttcccccgtaagctcgactttttccttgatgcctatcgcaaagcgaccgcccgtccctatggctatttgttgattgatatgcatgccgcgtccgatccatcgctacggctgcgaaccaacatatttaaggacgagcaggaggatgaagacgaaggaacagttgtattcatccccaaaaatggagcggcataataaaaaacaacaagcaaacattggacaattgattaaagaaaattgtgattggctttgtgccttggccaggactaaatccgcaaaaaaatgcaagaaactgataaagaaagcgaacacagaacaattgctttcacttgtggaaatttgtctaaacctagtcgcttcgcgtttccgactgaccacccgccagaaaaagagattgctaccccatgtggataccgtacgccaaatgagcagagcgagaagtgagcggggcgcccgacgtgtgcttgtccagaaaggcgcaggatttggaggactgtttgctgccgtattaacccccgttctaattgaattggcaaagtctgttatgaccaaaaatgcataaatacccacaactgctttgtttttatgtgcattcatcatcatcattcattcaataaaacatggcaaataagtttttacttgtcccacaagaaatttacaggggtttgacctcaatgtcggacacgggtgacattaatttggatgctgtacgacacgatttgaaccgaaccaggggcgaacgaacaaatccctctgctaaaaatgtcaactacaatcaacaacttaggcggtatttgaaaatgaggagggaactaacaaacatgccgacaaaagttgagatgtcaaaaggaataagtatactgttaaggagaggtggcgaagatgaagatggagaggttgtggatactccacctcgaccacccgctccaccaccaccaccacctccaccgtcaggtaaatgccctccacgtggaccaaatcctcccgctcctccaccacctccaccgcctgggagacgtcctccacgtccacccagccctcgttctccaccaggaagtccaccgcctcgtccacaacgtccccctagaccatgtagagctgctgcaccttctcggagaggtggtctcatagagcaatggcggaaaagacgatatgatatacaacaacggcggcccgtggtgcgggatcttttggcggaagcagctgctgctccattgcccgaaagtgacgatgaatatgactatatgctggagagtggattcgcgctgccagcaccatcacagtactatggagatttgcctgtactacccgacaacgcagacgaaattgaggagatggacactgttcagcgcaggattgccaccagacgaagattaaaaaaggacttggcagatgatgatgatgatgatgaagttgatttacagcgaaaaagaaataggatttatcacccttcacctccacggctcccatctccgccacggaaatctgagccaagacctcctctaacagccaagagagaacaccaaaaacaaacaaaggcagaattgaaatcctcgacatcaaagaaaaccggtcaccccacccctacgcctcgtccaaaaagagagccggagtttgngctggaccccgcacatccacatcaaggaaagctgggtacaacccgcctccctcaacacctaaaataaaaacacgatccaacaaagagacccaa

SEQ ID NO: 231 - DNA, 3607 bp, Heterodera glycines
tccaacaaagagcccaaaccgttgccgtattctgaaaagagagcttaaaatggagtgaaccccacaacaacaacaacaacgccaacctcctccagctgctattgtcgaagaaatgcctcttattcctcctcataggagagggaccaaacgccgccaccccgtaaatgatgatgatggtgacggggaggtgcgcataagaaaaagagtgaggcaaccgagaagggtaagagtacagtactctcccgagccaggtccatcaacatctgcacaaagtgatgagcaacaaccaacaacaacaacaacaacaacaacaacaacaacaacaacgtgagctgtttgccattccgtcaaatcaactgaccatgacacagagaattgagagattatacatcaaaatcaacaattatgctgaacgtatgggcgttagggggaatacaattcacaccgcaaacggcaagccgttggcgcatagcaatttgcgaatggtcatcaggtatataatagacagaagagcgggccgccccaccattaaaccgccaggagcggctatattggaagagaggcttagacaggacccaattttgtattcatggacggctccaccaaagagaccatcacagagcaaaaccacccggacggcacgggcaatcaagaaggaatttcgcccgaaaaaatggagttgatcaacaccactcttgacaaattgtacaataatccatcttccccagcggcgtttgcaggtgttacagcgctgtggaaagaggcgcgaaaaaagattaaacatttacggaaaaaggacgtgcagcattatttggatgggcaccgcacctacactctgatgcgtccccgcagggtacgttttccaagggccaaaactattgcagcgggattcatgacgatgttcaagtggatttggcagattttcaagctctttcgcgccataatcggggtcataggtacctgctcgttgcggttgatgtcctatccaaacgtctgtttgttgtaccgctgagaaacaagagagccgagcaaatgctggaggcattcaagcaactcatcgatcaaatgcccatggcgccccaccgagttttctccgacaagggcaccgagttcaagaacagattgctcaaggaattctttgaggagcgggagattgagaagcacgaacccgtccattcgacagtaaaagcatcaattgcggagagagccatccggaatgtgaagcagcgattgtataggtactttgcggaaaaggagacactgaattgggtggatacagtacagaaaattgtggacggaattaacagctcgccctcacgtgttcacgggatgcgcccaattgatgttgacttttcaaatgctcagaaggtgtggaagcgaatgtaccgaccgcaatcagttgacagaaaaactccccgcttccataaagatgaatttgtgcgcatgagcagagataaagggcaattcgagaagggatatttaccaaattacggggatgaaatactcgagattgatgaggtgctgaaagcggtacgtccaattcggtacaaactacgggatgagcatggcgagaaattcaagggaagcttctatgagcaggagctggcacacgtaagaaaggatgcagagacaagttaccgtatcgagaaggtgttcagaaagaggaaaagagatgatggatcaaccgaggtgcttgttaaatttataggatatcccaatcgggagtggattaatgagtctcagcttgtataaaagcatttccattttcattatttatgcggataaacaacaatcatgtcaaacagtttctttgtgtttttacccagtaatgtgagtgattacccggacaatcagcccaacaaatttcgtgtccgactcccaaaacctttgcattttaatggaacgtgggtgtgcgggttgcacagtatcagttacccctactcgtggtcaaccattggcacattggatgagcaatggattgacattcacttcaccgaccgtagcgctattgatgaggaccgacaaagaattatcagggtgccggtgcccaaggcatcgcatagtagggttgaacagctgcgagactttttgactgctacattgcggaatcatagtggtgcaaaaatgttgccactccctcgtgagttggaagagaatcgaaatcggacaaagcctctcaactcaccaccaccggcgaagagaaacaaaagagatgagtcaccaccagtttttgatgagaacggcaacgagcttggctctcccccgtcttacaatggagataaagaggatgaggaggaggaagggataatttctgagtcaccgcctcattatgaaggaaacgagactgtaacaattgactttccctcatcatacaatgaagatatgaaggtgtgattgcggattcaccgcctcgttatgtagaaacgcaaaacgaaactgtaaaaacatcaaaagcgacctctcctcagccgccgcctaccccaagcactgctaagccggctccccctcctccaccaccaccgtctacaaattcgactcctatttcaataaagacaccggctgtccaaccaccaaaacctacagtatccacccctccaccacaaacaacaataacaaaggcaccaccgccaccgccgcctactaagtcggctccaatagttaacccatcaattacaacaactacaaaaacaatacctacccctccggtaacaaaacctactacaccaacccctccggtagcaaaacctacgacatcaacccattcggtaacaaagccaacgacaccaacccctccggtaacaaagccaacgacatcaaccactcagtcgcccaagccaccaacggcagctcctaaaccgataaagcctgcatcacctgcacctcaaccacccaagccgtcaacgcctgcttctctcactacaacaacaaaaccaccagtcccaagcccatctgttaaaccaacaatttcagcaccaccggctcaacaaccaaaaagcccgacaccatccaccaaaccaatagtgccaaaaacagacgcgccacctaaacccccacccccggtttctctttccgctaaattgatccctagtgcaccgactccgccattagactctacacctcgttttgaaggagaggaaaataaaaacgtcaaatcatttgcgaagccaccaccaccgccgacatcagcagctcaaattgatccatcgcgtttgattcacacgctcgacccaccaagaatatattttaaaactcctccagctaaccaaaaccctttgaactatgtgccgaattcggtgatagttctctttaacaatgatgtggaacgattcaaggttgtgttcaacgaggaaatcatcagtcatttgtccttctcaccgcaattgggctatgtcattgggttcgaaaacccccagcatgtggtgtcaaatgaagttgccaaatacggacatgatttgcgaggtggcatctcaagctttgctgtctactcaaaaggactgaccgagaatatgatcatcgggaacacattgagctctttgctccgggttgtgtctatcagcggtgccacccctggggactacactgagaagatttacgactcaccgatatt

SEQ ID NO: 232 - DNA, 10031 bp, Heterodera glycines
ctatttcaataaagaacaccggctgtccaaccaccaaaacctacagtatccacccctccaccacaaacaacaataacaaaggcaccaccgccaccgccgcctactaagtcggctccaatagttaacccatcaattacaacaactacaaaaacaatacctacccctccggtaacaaaacctactacaccaacccctccggtagcaaaacctacgacatcaaccccttcggtaacaaagccaacgacaccaacccctccggtaacaaagccaacgacaccaacccctccggtaacaaagccaactacatcaaccactcagtcgcccaagccaccaacggcagctcctaaaccgataaagccggcatcgcctgcacctcaaccacccaagctgtcaacgcctgctcctctcactacaacaacaaaaccaccagtcccaagcccatctgttaaaccaacaatttcagcaccatcggctcaacaaccaaaaagcccgacaccatccaccaaaccaatagtaccaaaaacagacgcgccacctaaacccccacccccggtttctctttccgctaaattgatccctagtgcaccgactccgccattagactctccacctcgttttgaaggagaggaaaataaaaacgtcaaatcatttgcgaagccaccaccaccgccgacatcagcagctcaaattgacccatcgcgtttgattcacacgctcgacccaccaagaatatattttaaaactcctccagctaaccagaaccctttgaactatgtgccgaattcggtgatagttctctttaacaatgatgtggaacgattcaaggttgtgttcaacgaggaactcatcagtcatttgtccttctcaccgcaattgggctatgtccttggtttcgaaaacccccagcatgtggtgtcaaatgaagttgccaaatacggacatgatttgcgaggtggcatctcaagctttgctgtctactcaaaaggactgaccgagaatatgatcatcgggaacacattgagctctttgctccgggttgtgtctatcagcggtgccagccctggggactacactgagaagatttacgactcaccgatatttgcgcgagtgttaccacgggaaataaacgaaattgagattgaactgcgcacaatggacaaaggtcgattggtgccgttcgcctatgggacgacgatggttgtgttgatatttaagaaagtgataaatttctgatttcattcattcatttttcatttaataacaataaaatggttcatattgtgtttgacccaagcattgcacagtatgatgagtatgtacaatacggtggtggattagaaaaggacgattttgactacttccggggcactagcccctttcagcggggctacggtattcaacgaggggcgggtgtcggagacgtgtttcgtggactttggcgctttttcttgcccattcttcgccgtgttggtactacagtaggatcggaggcgctgagcactggacaacgcgtgctggaaagagttggtaatgagggggtgcccctgaaggaggcatttgtcaatgagggaaagcgaggaatcgataccgtactcgagaaagggggcctgccaaaacagtttgggagtggaaaaaggggtataaaaagaaagagaacatatgtgcctggtcatcaaactctaattggacggcctattgtaaagcaagcaaaaaagcgtattcgatcggacgcctttggactttactaaataaatgacatttcacaaaatcgacaacgactcagtgaactcaatcaccaatgctcttgactttttccgtatacccccgacaaatgtgagcgtctcatcttcaaaggtattcgagcttctgcccagcaatccgcttaccgacacaccctaccacttcaaacttcactccagtcaaaattacattgacctctccaaatgctatttgctcaccgagtttcgaatccgcaaggaaaacgttaatggtcaactcattaacctaggcattgatgacataaatattgcaccaattcaaatgatcggacaaaccttcatccgtaacatcaaaatgagcatcaatgggcgcgaaatttttaatgcaaacgccctgatggcctacaaatcatatttctcacatgaactctcctattcaacgaccgcaaaagactcccatctgaatgcagctgggtactaccgggacacgggcgatacattggagatgggaggcggatgcacagcgcgacgcgatttatttgcgggtagcaacgtagctcaattcattgcaaaaattgacacagacctattcaatcagccgttgtatctgatcaatttttgtgaattggacattgaaattttgcccaacgacaacgactttgtgctaatttcaccagtcgtaggtgcacccaaataccattttgaggtcatgggtttgaaaatgtatgtgaagaaagtgtctttgatggacggattggcgctggacattgcgcgaaagttggagttgaaacctgcgcgttatgcagtgaggaagacaatgatgaaatcgatgttcatcagtcaaggacgatatgagtttacagccaatttgttcatggatcaaatcccccgccgtatcacaatgggtttggtggctaatactgactatgttggcacaattaggcgcagcccattcaactttcaaccatttaatgtgcgcgaaatttcgattattgccaatgggcgctcttacccacaagcaccctacgacttgaattacccaaacggtaaatttgttcgtccattcaatgacatgaatgaagcggtggggttttcgaattcatcagagagtaatgggattacttttgcccaatatggaagaactcattgcatttacgttttcaatatgaccaacagcggggacgatcaggcggcattgtttgatctgataaagaatgggaccaccgcggtgagcatcaaatttaaccacccagtacccgatggaggaataatgttggtggtaatgggagagtgtgactctctggtgatgttagacaaaaaccgatcaataagcactgacaccactatttaaaccaccccgcattgtcatttcattaaaataaacatgttatcaaaaaagttgcctctaattttacttttccttcgcatttcgattcccgtaactgcatatagagaagagtactcttcatattcggaatatttaagaagaaggacattatctaggtttactagcacaacaacaacaacaacaacaattactcccaataccacactaaatgtgacaacgcctgtactaccaaagcaagaaaaactaattgatgaacatgtctctgctgttctcccaccacttattcaattgtgcaaggacacgccggaggaaagcagcatattccatcaggctatttgttgggcccttttcactctctatttaatgttgatcatcagtttggtgttgcatcaactctgttcaattttttggctaaagaatggacagcgtacaaatcacaaagattttgagcgaaaatcgtcggacagagcgagtatttcggggctgctacgccagtgaccaattgccgtcgcccaccacactacagtaccccgcagcactcgttgtgaacagagacccccagcacaaggagggctctcattggtgcgctatttacgcgaaggaattgggtgcgccagtgctctattatgatagtcttgctcagtccatcccgcctgccattacatcatcttttttgaccaaattccccgagggattaaggaagaattcttgcccattccagtcccctttagtgtctacgtgtgccgcacattgtattgttttcatttaccacatgtcccaaggagactcgtttacccactttcttaacgtgcttaataattgtgcaagccccgatatgtacatgattattttattacgtaaaataataaattgttaacatttgtacgagaattactcaactgaaaaattgaaataaaacgagccagggtgtcgagatctttcaatgacaatcagttgaccaacatcatttgagtggtgcgggttcatcagtcgatacatttccattccgtcggtgcgcaccaacagtccaactccccgcgatgccatctcagtggcagtgagcttgaggatcggtggaaaatgctgacgagacagataacctcccgcagttcgcttcttcatggtcagcggatttacgctgctcaatgcatagtcgagcagaatgccgaaaagctcaccgatttgagctgacttaaatagcaataacaattttttatgattaaattatccgcgcttactgccgcatatgtgatgattctcgtcgttgcaattgtgcccgagcgcccaaagcacaagtagtgcacaaagtcggtgaagtattgaggatccagcagttggtcatctttgaagctgaactggatgaagagctctccaccagggaggttcctttttgcgcaagccaattcgaaatccagagcaatttcgatctaaaaatattaatattaaagtcctaaaaatgtgatcacaaaccaattttacgaagaaacagtgtcggtttgctcgaaaaatttcgaacccacggtttacaaccggtatgccagatggtgggcgtgtaactccttcaaaatttaattagttgattaaataaaggtgtaaaaaacctggttttttcacaactcctccgaacaggtacatgattgggatagcagctacaatttcccaaacaagttcggatggtaaacgacgtttgttgttgtcgttgttgcacattttttcagtgaaatagacaatgaatgaatgaatgattattagagttgggtgtaggcgtcaagcaagggctataaattattattacagtacaccaattcccaagggaaaattttgaattggcttctaaaagtattgatcaacatgaccttgcaaacacctggcgtcatattgatattcccggggatcatcgattgatgggaggagcttaccaatatttggatggctttataagagctcactgacactctatttggttatttttacattttcaaatttgctgttaaccagggcggtttctcaacttaaagagctccgtttatcctggcagcaattttgttaatttgccttttaggtcttgaggtagtgcactagacatatctaatttcacggaacgctttaggtgccctgtcgtcttgtgcttcatgggtggcggtgcgctgctcatcaggtcatggttggttgctaccgatttcacaatgatccatgcctatataagcatgctttttctctcatctcatcattttatttatgcacaaaattcaaaaatttattatttaatttaaatagatttaaaaatgtccaaacgattcactgacttttctattgactccattctcggcaaaaaaccccggcaaggattccttatcaaccaaatcctgggcatggcccacctgctcggatcagttcaacacggcgaaggttcttccaaaaaacctgtcaacaaatacgtcaagaagttggaaggcagtttggaacacaacgaaaagttccactacacgaaggtcaagagccgattcagcattgaggacgtgcctgcaaatccggaagcactgctcgcggaaatcttcaaacactgcatcgaccaatcaatagcaaacagtcgcggcaagggaatcgagccaactcatcttggttgtctcataagcagcccgttactcagcggcggtgacataccgatccccatccgacaaatcacggacaacactgtcaacaccatcctaaaccgcttcaatcaagtggcacagagcaagaaacaacaaaacgtcacactctggggtgaaccgtttaccgtggttgtgacaacagtggatcggtctggactccccgcaaaacgacaagtgaagggaggtgctgctcgtccattggctccagttcggcatcaaatacatgatcgctgtttgatcaaggtttaacctcaattggaagcctcttggcatatatcaatgtgttagtttaagatcaggaacccggacaggcaaaatttctgtctcttctatgcactgcaggcgacaatggttgccaagaccagaggatggccacgatggaagttttacgattatctacaaaaccgacatggacaacgggagaacttcaacatgatgcaattcagcttatgaatcaaattggtgcacctttgaatttgaacgcgtatgatgcagatacttatgtgccgcgcgttatcaactattggaacaacaacaacaacaacaatcaacagcatcgattctctgtcttcatcttcggtgcaacaggccactacaagcccatctacaaatatgtggacaacacctacaacacaccactgctcctttatttcaacaacagccattttgatggggtgcagaagcagggtggccttttcggaaagccttactgtttggagtgtgaacgaccatactcgagggcaccgcaacacaataaatcgtgcagggctcgctgtttgttatgctcacggacgggcccactatttccatgtcaagcacatgctggattctttatgcattgcgatgggtgcaacaaaaacttcaacaacaatgactgcttccggcaccatctccagtcaggtttctgcaagaggtccaaaaagtgtaaggactgtggtgttgtttgggacgtgaatgataacaacagaaatggaagaaaaggtcacgtgtgtggcgaacgctactgcaacctctgcaaaaacttccacaatcccgaacgtggctgcttcatccaaccgcttgagccaagggaaatggagccttatcggattgttgcgtttgatctcgaaacaatgcagcaccagcctgttagtcctcgtgagccagagaaaagggagcatcagccaaactttatcgcagcaaaagtgttctgccctgagtgcattgacaacagcagatggcggaacggaactgcgggttgcaaagtgtgcggtcctcaccgaacagttgccttttgtcagcgccgctttgtcaacactaccgtcgacaaacaagttgtcgctgacaaccctttggaggcctttgtcggctggctcatcaacgctctgcccaaaaaattcgacacatacgcgttctctcactttggaggacgcttcgacatggtcctcgtgttccgcgaactattcaaaattgggttcaatcctgaaatgatccgacaggtaacttaattgttatatttttttattgtgttattatttttagggcaataaaatgttcgagatgaaagtcaagaagcagaagaaccgcaaccccaacatcgtgttccacgactcgttcaacctaatgccctgcgcattggcgcagctggtaccttcctatgggctggaggtcgaggacaagcccttcttcccacatttggccaaccgcccggaaaactacggtcgacacatttacccaacagtggatgactacctcgcaaatggaatgatgccggagaagcgacgacaatttgacctgtggtacgagcagcatcagcatgagccatttcaactggatgaggcattggcttcctattgcaccaatgacgtggaaatcttatcggctgctctcatcgccttccgccgcgaattctttgaagtctcgaagcggaatgactacgtcgatggagttgatgaccgcgaaaaccacgacggcatcgacgcccttcggcaatgcatgaccattgcgggcgcctgcatgaaacacttccggctaaaccacctaccagcagaacaccttgccatagtccccgaaaagggctatgacaacgctcaaaaccaaagccggctggcacttcagttcctccactggtacgctgaggaaaacaacgtacaaatacagacagcctattcgcctcaaggagaaaaaagaattgccaattacacagtggatgggtggattgaagaggagcgcagggttattgaagtgaacggtaatttttatctatcataataataatttttatgagaaatttttacaggttgtgtctggcacggctgcaaaagatgctttccatcggacaacatgatgctaccaaatggaaaatctgcaggagaacaacggaggagggatgccaaccggctggaattcttgaggacgcaagtggcacgagtcgacatcttttgggaatgcgatattcagcaaatggtggagcggagcaaagcgataaggaagtcatttgcggactatgtggatgctggaccgctgatcatccgcgacgcgttcacgggaggtcggacgggtcctctgaagctcttccagaaggcaggcgaagggcagaagatttcctactacgatttcacgtctctgtacccgtttatcaagtgagaaaaacgtaaagatttttttttgatttttgaaattttcagtttcacgactcgttatccagtgggccacccgaaggtgcatgtgttgaatgaggatgttaattggaccaacccagcagacaacccttccctttggcactgatcaaatgctgggtggttccacctcgcaagtgtgacatccctgttctacctgtgaaagttggtgatcgcctatgctttccactgtgtatcaagtgcgcgaaagattaccccactggtggggtcgacgacgaataccactgccaacacaatgaccaacagcgcggttgggtcaacaccagcacttcaattgaactcaacgcagcgctcgaggagggatatcgcgtcaccaaagtgttccgcgtgctggagtacgagcagagtgacgaccagctgttcagaccatacattgctgagttcatggcgcagaagatccaagcatcaggatttgactccaaaatcaaaggcaacgccgaccaagaagcgcagttcgtccaggaatgctatgagcagtttggaataagcattgacccattgaaaatggctgtcaacaaaggaaagcggtcgattgcaaagctgtgtctgaataatttatgtgggttttccttttcaagtgtcaataataattggattaatttcaggggggcgtttctcattgcgcaactttggactttcgcagacgctgataaccgacgatccggttttcttcagagagcacttggacaaccggtcaatcgatgtcactgccattgatgagctcgatgaggagcacatcctcctcagctacgaaaataagaaagagtgggttgaggagcacgactgctccaacataggtatggatcaataaattagcgcacaaataataattataaatgttcagtgatatccctgtggacgacctcggctgcacggctcctactcctaaaggcaatgcagaaggtggtgcgaacgcctgggtgcggactgctatacactggttagattattattattttgtggcaataaaaaaaaatttacatttttcagacactgattcactggtctttctccacccggaagacatttgcccgctcaaaactggcccacatttgggtcagttcaccgatgagtacccacaacatgaaattgtggagtactgtagtgggggtgcaaaacaggtaatgttttattttttacaaaggtaaattaaagcttttgttttagtatggtttgaaactgaggaggctgaacgcacctgcagatgcggagtttgaatatgtgctgaaggtgcgagggatgacgctgaactacgacgtcatcaacaaccaaggactgcgctacgattcaagcagcaggtgctgaacttcactgcgacgggtgactatgaaccaatcatcgtcacatatcccaacttcctgagaccaagcattaaagatggagggaaagtggtgtcgggaccccttcagaaatgttataggccatatgtaggaaaaggaattgttaactctaattttgatgttttgaattttggtcacacattgtaaaacttacttttgaataaaattaacaattggaagttgtcgattttgggtagaaaaatagcataattaagcaatgaaagatgtaaatattgcataattaatcaccacatttgggaacattcatttcttcctgtgtccagtactaatga

SEQ ID NO: 233 - DNA, 1263 bp, Heterodera glycines
ctcagtaatgccgccgacaaagaatgttttgttcatcccattgcggtctttgtaggtagtcctgactttcttgcccatcaactctttcaacacattcgaccggtcgtcggggtggttaaatcgatctcgaagagatttaggtgagcaagagagcaggttggcgcaaaagagactgacaagtaccattttggggtatgaatgtgctaattgaaatgtttgagcttttatagctttgaaataagctccgcctacttaaagccaattaaattcacccgctcaaagctcaaattcattttataaaatgtcatcattatctcccgaaagaattatgtctcaagctccgtcccctagaaaggcaaaagttgacgagcgagctctctggaaaatcttcaagggcaagtaaatgctggcaatttatctctgcgacgatgactggcgaaaactgtacgagaacaaagagaaagtcagacgactagaggacgacgacgacaatgtggcccttagtttccaaatgtgtgaggattgcgcgcgcgtgaattgcaatgcaactgacataatggcaccaccgaagaaacgaaagatcgagaaagcttaaggacttcataatttattgttttttttcatgcttatctcttaaataaatcgttgtaattcttttgcgcaatgattgggtgtgaaagatggtagcggagtgggttgggtttggttgttttggtgtttttgtttcaatctcgactcattcacccatccgcatcccttctcgtccaattttcaccgaagaacaattcaactgctgccatcaacatggaagctaattcgggatccttgacggcttcattgcaagcagcagaagctgaaattggcgctctgaaggaaatggtcaagctgcagaatgagaaaatgaaggacatgcgccaccgttttgtgaacttccgctcccggctagatcagctggaggcgtgggctgctgacgtaaaatttaaacttttttatttttattttttttttatttttttatttttttaatcattaaaatgtgtttagaacaagcaaacgaaatttgtgcgccccgacacacgcaaacgcgtgttgttgaacgattcgccagagaaggaaatgccggcgacatcaaatgctgctgcttcaggcaactttttcttagttatcaatttgacattatttacattatgatcactttaaaggtgatcgtcaacaaaactttcaagaagaattttttgaagttaaattcaaaaaattcatgaa

SEQ ID NO: 234 - DNA, 14818 bp, Heterodera glycines
  unsure (1)..(14818): unsure at all n locations
cggctaaaaacgtcttttatgatttttagcgcatttttaggtatacatattgagacaattcgggcaggacaagaaaagaatgaagttgatttctcatgaaactcggaattggttatgtttagtcgaaaatatgcttacatgatactcataaaaaatacaaataattcaacccacctattctatgaccacattctgaaaaaaatcccagaaatacgaggaaagatatgcttggtcacaataaaataaaaaatggctagtgtgtaaaaatttgcggtcactaataaaataaaaaatggctaatatgtaaaattggcgtccagaaatttttagactaatccgaagcaaagcacgaatgaattaaagaggcgaaagaattcacagtatcgtttctaatagggaaatattgacaggatattcggctaaaaacgggtttgatcatttttagcgcatttttaggtatacatttgagacaattgggcaggacaagaaaagaatgaagttgatgcctcatgaaactcggaattggttatgttttgtcgaaaatatccttacataatactcataaaaaatacaaataattcaacccacctattctatgaccacattctgaaaaaaatcccagaaatacgaggaaagatatgcttggtcacaataaaataaaaaatggctagtatgtaaaatttgcggtcacaaataaaataaaaattggctaatatgtaaaattggcgtccagaaagacaacgacttggcaaaacgcattgacgagaatctttacgtcgataatattctaatcgaaatgaaagccgacgaacaactcaaatcagtggtcaatgaagccaaatcaatcttcaaagcagccggcatgataatccgagaattttacggcaccgacattgaagggctcaaacaattgccagccgaagacttggccaaagaattggaagagacaaaagttcttggaatcgcttggaagccgaaacacaatcgtatcgcattcaaattgccaattttcgagggaacaatcaccaagcgcacaattctatcacacattgccaaagtgtacgacccgcttggattgatgtcaccagcattgttgtcagccaaacttttccttcaagaagtgcaaaatgccaatagcaaatgggacgaaacattgtcgagccatctcgtcaaaacgtggctcaaaatcgtagaaacttggtcgcacagtggcacaccaatcaatgtcgaatttccgcgattcattccgtccacaacgaaggacgaatttcattgcttttgcgacgctagcaactatggcttgggaattgccatttatcagaaagcagacacgacatacgcaaaatccgaatgcaacttgatcttcgccaagagcctggtcaagccgctaaaattggtcgcccacgattcaacaattcccaaactggaactgcaagcactcacgctcggagttaaagcagtcaacttcattcaacagcaactcaatttcgatgacaagcaagtcattctttggaccgacagccaatgttcggtcgaacgcctcaaagacggcagaaaatccgatcgattcgtgaccaatcgactcaacaaaataagggctgcaaattttcaagttcgacacgtcagaacagactcaaacccggcagacttagcctcaagagggatcgaccctcgcagcattcaagcatcgcttctttggagatttggaccgatttggttgtccaaatctgatcaatggcctgagtcaaatgtcatttatcaacccggcgaagaaatcaaagcttacgaagaagtgccgatcgttgaaatcagctgcgcagttcaagaaaagcagaaattcaagccaacaattcaatttgaacgattttcgaattggaaccgactcagagccacagcagcatacgctaatcgattcatcctgcgactgctgagagcaaaaagaaggaacaaacagcttcctcaaaacattcaaatcaatggaccattgaaagcacacgaactgcaacttgccgaagaatggatattgacagaaactcaatcaacttatccgccaaccgaagatcaaattcgagatcttcggctcttcaaagttggaagactgtggagatgcggaggaagacttgacaacgcagaaagtctcagtttcgacaacaagcaccccattttcctgccacccgacggctggatcaccaaactgatcattcgacattatgatcaacaacacaagcattgcggcccgagaattcttctgtctcaaattcgagagaaattctggattccgcgcggcagaaagacaattcaacaagttctgaattcgccacgtcatggatgtctcaaatgtcgaaaagaaagagcaaaaccatactcatacccagaggcacctgatctaccagctcaacgcgtcaatcaagcccgaccattcaactcaacgggcatcgattatttcggacctttgaaagtcaaaaggggtgccgaagtcgtcaaaatttacgtcgcgctcttcacttgcttagtgatcagagcaattcatttggaaattgcggaagactactccgccgaagcattcatcaggacgttccgacgatttgtctcgagacgtggaacgccaacactcatcatgactgatcaaggatcaaatttcgtcgctggatcaaaaatcatcaaagagcattggaccgacacgcttcttcccgaacatgtgcaaactcgactcgcgcatcaaggaatcacatggaagttcaacacagctcatgctccgtggaaaggaggcacttgggaacgacttgtcggcattacgaagaattcacttcgtcgaacaattggccgaaatcttttgggatttgacgaaatgcaaactttgatctgtgaaatcgaagcaatcgtcaacaaccgacctctcacgtttgaatcggatcaagaaccgtatcaatcgcttcgtccgatcaactttctcattccatacgaacaaatcgtgatcaactttccgctcttggatgaaaacttcaacgatccggacttcgaaccgcgcacaagcaaccgtaatcaactcgtcacgatgctccgaaaaaccagcacgctgctggaccgattctggcacacatggaaaacagactacctgttttcgctccgtgaaacagacagaagcaacgcaacaaaccgatttcttcaccccaaagaaggggatgtagtcattgttggagacgatgaccaaccgcggtcattgtggagtttggcacgagtcattcagctccacaaagggcgagataaccaaatccgctctgccttactgtccattaatggacaacatcgatcccgggctataaatcagctttattgcctggaaattcccgacagttcagaaacagaagcaccagcacacaccgaagtgatcgctccaatcatggcatcggaatcgatcgaagtcatctcattggcgagcagtgacgaccaaatgtccgacgactatcacattccgaagaagaaaaatgtgatcaaacgaaaacaacgctttattactggtcacaacgtcggcttacgagaagtcgagcaacgacccacggacaacgatcccgtcgaaggattgttgtactccaagcgaccggacaacaaaaccaaattcttcaaggacggaaacttgaagatgcttttggaatcaatcactctgttcaagcgcatcgaaggcaaaaagatggcagaaaaactgttggaactttacggaaaagttccgatgatcgaatgggacaaacgcttggccaaatacgaagcaaaactgaggaaaatggatgaagcaagggacaaaaaggataaagagagagaaaaccaaagaagagaaaaacgaaaattggatgaagaagaggaaccggaaaaacggaagaaaatttcagtcgaaactgacccattggaagaaactgacccgaaaaaggaacggcaacttcaagatgaaaatagaatccgctggtctgcgcaaaggaaagcagcagtggatgaactccgtcaacgcatcaaattgaggaagaaacaatggtcaagggaagaaattgagaaggaaatgaaggaaagcgaaaaagaggatcaaacacaactgcgcgaactggccaaaaacggaagcaaagaagcaacacaattattggaaacagccccatcactccgccaacagtcaaatgttcaagtgactgcgacaattcaacgaaaagctgaggattatccacaaaatggagaaaaagttttgaagttctgccagcggatgtaccaagacaatttgatgtcagcgtggagaagaaaccgagttcaaaaggaattgactcaacttttggaagatggccgcttcaaactccgtcatgtgaacggacaacaagcaattctgcatcgaattacagaaggcaaaaaggacctttgcggtgaatttctcatcggaagaatttgttcatggcattatttggacgaaatcgaattcgaagacacaaaagagccaccgccggctcaacgagactcaactccggaaatcacggtcgtcgaaaccaaaaacgaccaggacaggcagcaagacgaaccgcaattcgttaccattcgagccggacgtacgccgccaccattatttatccctcaacgttcaaaatcgccatcgcctcaattcatagtacaccgtgccgctcacacaccgccgccagcacatcgcgattcaacacaaacacaactcgtggaagagtaccatttggccaaaagcaaacccaacacgtttgtggatttcaacatcttcactgaatgcgatgaaactcatctcacctgcgcaaaaaatgcgacttatggtcaaatcgcggacaaacacaatcgagagaaaatcgaagaatttgtcaattgccgtgcacgcactttgtttgaagcaataatgctccattggcttaattgcaacatcaatcggccaaataacgaagtttgggccatgcacgaactgcacactcaacaattcgacactttggaagaatcggcaaaatttttccatcaacaacaaatcgtcatgcgtaaaagagacatcggcaaagacaaacacttcaaagaagcgatcgaaatttggcgcaactcatgcgacctgttcaatgaaaactttcaacatgtgaacaagcaactcaaattcagcccaacacattcgcctgaaatgcaaaaaacggattatgccaaatggatcgaacggatcaaccaacgtacaaacgaaataagctcaaaagagagatcaagaatgcaatttcccgacttcatctacttcaacgttcgaacaattttgattggagacaacaccgcagaagctctccaatctcatttcccaaaatcccgctggtacactcattttgccgatcaaccgcttcgacttacactaggcccacaagtcaagcacgccatctttgcgtatcaatcaactgatgaggacatgatccgacaaatcactccgttgctttatcagcacaagaacactgacatcgaaacaacgctgatcctacgaaaggacaacaacaacgattggctctacaacaaaaaggaattcattggcttgactaaacgacttgaggccggattcttcgttttcaatgcacgaatcggcgaagctaaagaattggccgatcggatgaaagagacaatggaggagtcaatgcaactcaacaccgagcctacaacttcaaatttagccgggaacaaaaagccataccgaaaaggattcacagttgggcaacgaatgctcaactcgctcatgctcttcagcctttttatgctcatcgcattacaaggagcaagcgcacaaccaatccgtcaaaaacgatttggcggagttggagtttggcatggaagccacgcaatcagccaactttggggcaataacgccaccagggaacgattttcgacattttctccctcagtgcaacgctacataagtcgtgtgttcgctctcaacgcaacagcaactcttccaacagtcccaacctcatcaaccgcacacacaactccaatttcaacaactccgcccccattcacaaccacaaaaccacccgcaataactatcaaaccccccatttccacaaccacacgccaatggaaaacgaccaagcttcgaacaactcaaacattgcccccaacaagcaccgaaactccgatcacccgaaccaatcgccccaaaatccaacccccattattcttcgctcaacgacaatcccaatggaagggagacccgatcaacgccaaaggaatggacatcttctggtgtacggatcgtggcagcacaatttgtgaactgaagggacctgaaaactcacccttttgtcgcccaccgccagtgttgaccgccaaatggaccgcacttaccatcacgctgtacacaaaaatccatcgacccgaaaccgtacaatcaggatggaattgtgcagtgagacgaatcagtgaggtgtattacaccaacctgataggagataagttcgtggacgtcaacaaaacatttctgcccgtgtccaaaacaatgtgccgacaaatggcacttcatcaaatttgccctatggcaaaaacagaaatgacacaaaccagcaaaaacacatggacaaccaacgacgaactcagtgtcaactttcctggtccaatcgaaggactcttcaaaggaagtcaaaccagcgaaacgacaaactgttttgtccaaccagcaacattgttcgtcaaacgccacaatttgcaacttttgtcgccagttcatcatgtagaacattgcgactactcatcaggattttgccaattgcccgacaacaccacaatcatgtggaaaccagattgccccgccgaaggatgctacacctgcgacttcgagaaagccgaacaaatccgaggcgaatttaccaaaactcgaggacaaacctcagcaatttggatatcggaagatcgtcaaaaagctttgaccttcaccgactcaacggcaataatggcatgcgatggcaaatcgattgttctttcggagcagaattttggaattcgaaaggaacaatacgacgcattgatggacaacgatcattcaagaacaaagcgcttcgtagaaccggaacaactcgcctctcagttgtcagcagctcaaattgcaaccaacatggcactttcgcaactctacatgaaagaatgccaacgcaacttccgtgttgcgaatccgacattgcaggcccgaaaactgctcaaccgcgagaatttgcaagctcgatggatcggagaaacaaccatcgaagttttcccatgcgtcaacatcactctgaccgacatcagctaccgagcaacaaaaagttgctacaaattcattccggtcaccgttcatctgccaaatgccacaatggatgcatttctcgaccccgaaatgcgcatcctttcgctcgtcactcacatagcaagctgcacgcatttccgctaccaccatctgcaacttaaaaagaaccctagcatttggctgcggatcgacgtcaatttcggcatcgccaaacgactacctcagtctgctgtccatgagctctacgaatcgattcaaaatcaaactaacaacgatttcgaactcaatccattgatcttccatcaatggcaactcagcaacgacaccgacaacgccattttcccgcacatcgacgaattcgcggatttgacggatttcaaatcaaaactcgagcagcatcaaactgcgagagccgaagcattgggcgcaattcccggaggactggaaggatggacaattcggaaggtcaaggagtggctcaacgaactcatcaattggtggatgcgactcgcatgcgcatacgctacatttctccttctacgggatgtgatactcccgtgcatcttcgcctatctgatcaaccccgtccgtgtcacattcatgagcctcgtaggattccgaccacgccggcaaccacttccgcaacggcgatgcttcgacgaagtcgtaccaatgcgccaactgccccgggcacccaaacggccatcaattcgtctacgtgccgaccgcccatcctcgccgatcgctttggacttcgactcaagatcggcaacttaccgatcacgcgcatcaagcttgacaatcgacacgccattcgggaagtcgcaaccgttcaaattggcagacgatgattgaagaaaggaagaagatggatgagcacaccgtctcgcgcggggaatgttcgaattgggcataatttttccatcatttccccaattctcggccaatcaattaattgattgcctttctcatgaccctcattcattcgccctatttttccctcgtcattatcattgtgatttcgccaaatgtgggcctcctacgcatcttccccccatttttgcccatcatcatcattgtgttcatgccaaagtgggcctcccactcatttcttcgccccaattctgcacatttctgtaaaatcgtatagttccacgtcgaaatgccctcccgattacgcccgtcaaatcccattcacatgcatttcattatcgcccaacatcaattcaacgatatttaaacccctgccaatcatccaccttatcaacacaattttatggggaggcaaaatcacaccaccatttgtcttcccttctccccccaattcaattcgatcattttgtgtaaaattgtaaattgtacaattttccccccattcattcattttgcgctcatttatatgagcgcggtttaattacccaagtttgagatctggataaatttgttgtttttattcgcttttgaatttgggcacattttgcctatcgaccactcgccgaccccgaccccacaaacaaactttggactagcgtgttcgaagtaaaagtggacttggaacgcccacaccgcgtcccaacaaggcatcaacttcattcttttcttgtcctgcccaattgtctcaaatgtatacctaaaaatgcgctaaaaatgatcaaacccgtttttagccgaatatcctgtcaatatttccctattagaaacgatactgtcaattctttcgcctctttaattcattcgtgctttgcttcggattagtctaaaaatttctggacgccaattttacatattagccattttttattttatttgtgaccgcaaatttttacatactagccattttttattttattgtgaccaagcatatctttcctcgtatttctgggatttttttcagaatgtggtcatagaataggtggtttgaattatttgtattttttatgagtattatgtaaggatattttcgacaaaacataaccaattccgagtttcatgaggcatcaacttcattcttttcttgtcctgcccaattgtctcaaatgtatacctaaaaatgcgctaaaaatgatcaaacccgtttttagccgaatatcctgtcaatatttccctattagaaacgatactgtgaattctttcgcctctttaattcattcgtgctttgcttcggattagtctaaaaatttctggacgccaattttacatattagccattttttattttatttgtgaccgcaaatttttacatactagccattttttattttattgtgaccaagcatatctttcctcgtatttctgggatttttttcagaatgtggtcatagaataggtgggttgatttatttgtattttttatgagtattatgtaaggatattttcgacaaaacataaccaattccgagtttcatgaggctgttcgaattgggcataatttttccatcatttccccaattctcggccaatcaattaattgattgcctttctcatgaccctcattcattcgccctatttttccctcgtcattatcattgtgatttcgccaaatgtgggcctcctacgcatcttccccccatttttgcccatcatcatcattgtgttcatgccaaagtgggcctcccactcatttcttcgccccaattctgcacatttctgtaaaatcgtatagttccacgtcgaaatgccctcccgattacgcccgtcaaatcccattcacatgcattggacacagtgcactcaagcccgttcagcaatccaatcaccgcgcactcaatcaattgtgccggtactcatctcatcaacaggtggattacaaaatccgcacaaatttccttgagtatttggtttcaaggccaatacttttagaaataagggaaggggtcgaaaagtggtttcaaagaattgagtttgagacttcaaggtcttagctttattctcaatcgatcgatcattcatttttagccacaggcttcttggtcttgactaaatttgggtaacggaatcaaagtattgggtttcaaggctcaaacttagtttctgacaaggttttgtagtatcagacttcaaggtcggaactataaacctataggggtctaatccgtgcatttgcccctcgtgccaaactcacacaatcaaaagtgagactgtcaatttgctgttgtgaacaattcaatctgtcaattcaatcgcggcacaaccaatcacaagcaactcaagcaatttaacaagcaattgacaaatcatggcctctccaatccaacaaaaattgggagccgcactcaaagtgatcagccatgtccgaaccgctgctgcactgacaatcgcaactgatccaaccgcaagcaactttgaaaatgcactcaatttcgaagcgcaacttgagaaagttcaaaaagaagcaaaaacattggaaatctttttggatgacattcgcgaatcgctttcttcgtggactgatcttctccgcaaattgccagcaacagaacgagaaacaggcgaaaccgaattcaacgcctacaacaaaaaggagaagatcacagacaaagtcgatgatgcatcaagcaaactccgggatcttcgtgatttgaatggcacgttgtcaattcatgcaaaactcttccgcaacaaatacgacatggaagaacgagcaactcaagctgcacaagcacaagcagcacccgcaactcaaggcagaacgattccgccatcacgcccatcatcatttttccaaattcaacccgtgcaactcgagagattcagcggcagcaaacggcaatggccggaattttacgaatcattcaaatctgcaaccggatcacattcattgagcaaggccgaaaagttcaacatcttacgcaatttgttgactggcgaagcacgtgaactcgtcgctggctttcgtcttgaagacgcaaactatgatgtggtactccaattactgaaagacacctatggagcgcatgacgaacacatcagatcgctgcatttcgaattggccaacctccgaacatgcaaaacattgcgcgacacaaaagagtttttgctgcaactcgaacgacttacgcgggaattgctcaacgcaggagcagacatcgaaggaccgccaacatatctcatgcttgaaaagaagctgacgccgccatttctgcgcacaatcctcaacaaaaagggagaagatcccgatcattggaacacatcgaagttccgcaacattctcaacgaagcagtccgcaaagagactcaaattcaagaagtcatgaccgaatatggtcaccatcagcagcaacgaccaacaaaaccatttattgccggaccgagattccgggatcgcgcaccgttcaatcaatttcgagaacgatcattcattgcgtccgccgtggacgaaaatcaaaggcgattcagcaataaacaattggcgcccaaaatcgcacacaatggaccaaaaccaactcaattcgcacaacgcacgcaacacaacccggccaaacccaatcaattcaacaggccgtcacaaccgcaaacaagtggcaacagtcaatcaaatgcaaatccaccaaggccatgtgtattttgcaacggcaaccattggaattccgattgccgaaaattcagcacaattcaacaacgagttgaaattgtcaaatcaaaaggcttatgcttcaaatgccttttcgcacatcgtacatttgactgtccaaaaccgagaaaatgtttcaaatgcggacaacttcatccaacagcactttgccgcaacattaatgcgcagaaccaaatcgcagcggcaacaatcatgccacatttgtcaataccaagcccgcaaccaatcgaaaatgctgcaatccaaacccaaccaatgtgcaacgccgtcaatgcaactgacactcgcgccttactcatgacaacgacggcaaccattttcaatccggcacaaccgcacctcagcatgatcgcctcaattttcatcgaccctggcagtcatcgatcatttgtgtccaatcatacggcacaacggcttgatcttccgatcgtcaacaccgaagaatgccttttgaccagctttggtgagcgcatgccaaagaaatacatcagtgacatggtcaaattgggatttctgtgcatcaatggagaaagactcatcttcaacctcaatgcacttcaattcttggtgaatgaaatgccaatgatccaattgtccgaattggatcgcgatcaactcaagcaacgaaagcttacgccaccacacgagatgaagcagcccgacattttgcttggcatcgatgtctggcacgaattgcaagtccaattcatcgaacgattgccgagcggatttacactttgccgatcaaaaatgggcaaaatactaagcggaacgggacgaatggaaatggggcaagcatcaaatgtcacattcgtcctcgcagtccaagacaaccaaatggcccaagcatcgacaactcaatcaatcgaaatcgaagacaacatcttcacatccgaggatgatctgaaacgagacgatcaactcaacagcttttttggtctccatttgattggaatggatgactcctcaacgccgatcgatcgagatgaagttatggtcaacttcaaaaagaatctcacgttcatcaacaatcgttaccaaattgctctgccttggaacgacaaagtcggaactcttcctaccaattatcatcaagcaaaagcccgactgatcggactgatcaacaaacttcgttcactcaatctgatcaacgaatatcaggccattctcgacgatcaactccaaaaatccgtcatcgaactcgtcgaaatgcccgatcaatcaattggcccggttcattacctaccacaccgagccgtcattcgagccgacaaagcaacaacaaagttgcgaattgttatggatgcttccgccaaaccaaaaagcaatccatccgccccatcgctcaacgaatgcctctacactggtccgctactactcaaggacctgactggcatccttttacgcttccgccgaatggaacgcgtgcttttggccgatatcgaaaaagccttcttgcaacttggcgtccgcgagcaggaccgagacacaactcggttcctttggctgtcaaatccgaaagaggccgaattaaaccctctaaaacgagaagacattttggtctttcgttatagtcgtgtaagcttcggattgaccgtttcgccttttctgcttaatgccacgatccgtgaacacctttcacttttcgacaacgacttggcaaaacgcattgacgagaatctttacgtcgataatattctaatcgaaatgaaagccgacgaacaactcaaatcagtggtcaatgaagccaaatcaatcttcaaagcagccggcatgataatccgagaattttacggcaccgacattgaagggctcaaacaattgccagccgaagacttggccaaagaattggaagagacaaaagttcttggaatcgcttggaagccgaaacacaatcgtatcgcattcaaattgccaattttcgagggaacaatcaccaagcgcacaattctatcacacattgccaaagtgtacgacccgcttggattgatgtcaccagcattgttgtcagccaaacttttccttcaagaagtgcaaaatgccaatagcaaatgggacgaaccattgtcgagccatctcgtcaaaacgtggctcaaaatcgtagaaacttggtcgcacagtggcacaccaatcaatgtcgaatttccgcgattcattccgtccacaacgaaggacgaatttcattgcttttgcgacgctagcaactatggcttgggaattgccatttatcagaaagcagacacgacatacgcaaaatccgaatgcaacttgatcttcgccaagagcctggtcaagccgctaaaattggtcgcccacgattcaacaattcccaaactggaactgcaagcactcacgctatgagttaaagcagtcaacttcattcaacagcaactcaatttcgatgacaagcaagtcattctttggaccgacagccaatgttcggtcgaacgcctcaaagacggcagaaaatccgatcgattcgtgaccaatcgactcaacaaaataagggctgcaaattttcaagttcgacacgtcagaacagactcaaacccggcagacttagcctcaagagggattgaccctcgcagcattcaagcatcgcttctttggagatttggaccgatttggttgtccaaatctgatcaatggcctgagtcaaatgtcatttatcaacccggcgaagaaatcaaagcttacgaagaagtgccgatcgttgaaatcagctgcgcagttcaagaaaagcagaaattcaagccaacaattcaatttgaacgattttcgaattggaaccgactcagagccacagcagcatacgctaatcgattcatcctgcgactgctgagagcaaaagaaggaacaacagcttcctcaaaacattcnnaatcatggacccattgaagcacacgaaactgcacttgncgaagaatggatattgacagaaactcaat

SEQ ID NO: 235 - DNA, 13483 bp, Heterodera glycines
actcggccaaccccatgacgacgatactccggcgacgttcctgctcttggaccgcttcctctaccattttgtgctgcttgaactgcagcaggtcttggttctgctgcagtatgacgaaactattggatgcatatcccgcattacatataactcgaaagtaatggccaaatatagtgaattagatgaaaaaaacctaaagattgccaaaaagccgaaaacgaatttgcacagacttaattgaatgtcattcataagtttaacatgcgaaattggcgacagcagattttcagtgcgtttaataaaatgaaattgaaagaattttaaattcaacttctttgcctgagtttcaatttccgagtcatctcaacaatttcgagtgtttctgcaggattttttcaccaatcgtaattgtttatttttattgttttagcattttcttcgctaaattcaaaatttccattaattgcaaacattttgtattaatcccgacgtaacagtagaacaaacattgattcatccgttttttccaaatatttttgatttctctaacccacactatttctccattttctttctatctgctcacaactaaaattgtcaccataaaaaatcgatatattggtgggagaaaagcctgcagagatgaagagcagaaaagaaggatttctatatccatatttttccatatttcgcgatttatgtccatatttccatattttggcattttggtccatattttatgtccatattttggcatttttcaaaaaaacctctattagaacggcccccagcagctaaattagcctttttgagcccaaaacccgaaaaatttttcaaaaaatcattttttcgccaaaatttctcgagaatattgaataaatttaaattttcttaaaaattaataaattatgtcaaaaataagcaaaaaagcgaaaatttcgcttttgttgttgattttgcgctaaaaaaattaataaattttagcttttatgttttttttcttttaaaatgattgcacgtaattgccgaaaaaattcgagaccaatttccgaatgttgaccgactaattgcaaaacgaaagccgtctttgtcaaagcgccttaccgagtcaaaaaatttggaaatgtatttcatatgcaatttcaaccaataaatttgaagaaattttgcactcaattttgaaaaatttatgtccatattttgacatttttgccatttatgtccatatttcgcgatttttgccattttatgtccatatttcgcgatttttgccattttatggccatatttcgcgattttatatccatataattacactccctagtgatatgtctgtttacaccaggctactttaattaaattattgtttttttttaattgattgaatttttatgggaatgcgtaaaaatttttagtgaaaattttgtcagcgaggagttcgattaacactttcaatgccatttaaacaaattaaacaactgaagaaggcatttgcgaattagctttgctgtgtgcactgttaccaaaaaatttaaaaattggtagtaaatttgtctggataaatttctttgtctttctttaaaaaactatttcctccaatattcatgttcaaaagaacggcggcaaatttttcccccctctctgaagataaattcgttttattgagatttcataattgctttttaatttaacattcgattattttgaacattggcaaaaatatttgggtgtttattttatttttttaatccgccatcgttcgtgcattaaactgcactagtggaatgtcgtagcgcatgaaaaagatacgagcccgaaatatccacaggatgccaagtgttaatgccactgatgccaaaatggagcaaattgaaagcataaaatgagcgaacatggaggacgaatgggcaaccactaaattggcactcagaacggcttgctgctgggaattgtaaaaatatttattcttttattttccgattaaaaagttttcgagaatttgaattatccacttaatttattacttgttcttcccttcctcctcctcctctgtctcccgattcaacggacaaagtcccatgccggtcattaattatttttcttatgccagccaaaatgccatggattgcatccgcccaacgcttttgttgaaacaattgttgctaataaatttatatgccaaattatttgcttttttttgatgcaatatgttgtaataattctcgttattttttctgtttctcaaatggccaacctccgctgcatacaaatggtttatttcgtcctgcaaaattggcgtggcgaaataaaatgcgacgcggccaaaattaaacaaatcaatgggaagagtcaatagaaaggccttgtggcattcgttgtccaactcccattgatgcaaaagtcggaaaggcgcgtcgacggtgttgttcaacaatttgccataaaatattactttttaaacgaataattaaacaagcaataaaaaaatgtctatgtgtgtcatttggcaccactaaaattaccatcacatttatttcaaaataaagcggcttcttggaaagcgcaacggcaccagtgactcccttctttttacacccattttgaccaccgtcctgaaatttattggaggataaagaaaggaatccaattgattgaatggcatttttggtcttctttcaaatcacaacttttctttaacggtgtgacatcatcactcataacactgacaatgagcatgactttggttacatttttcgtctgttcctggaaagagtcgagcatttccgcgagtttttgtcgctcgtccgcgcttaacacttcttccgggtcgcacacgtaactcttcagaggcattttgcactttgcgaattgcccctcgcgcaacggatttggataatcgttgatcagtgaggaggcggacaaaaattggggacagaaaaatgggaggagaaaaaatggaaaaagcaaaaaggaaaactcagtagcagaagcagagaacatatgtaatttagcaacaataatattatattattataaaaaatatagatcaaaaaaaaagaaaagaaatttatccaacaaaagagacgagcaaataaccaaagcaattaagaaattaataatctaataaataaacgattggtggtcattcgaaaaggagcgcactttagtaaaataaacaaaaaaaatgtaggaattacataaaatgaagcatatttcaatgagaaatttttacttctccaaaatgtcatctttataatgaaaaaacaacagataaaatgagaatttcagaatagtttttttgaaaattcaatcaattgcctaacagtcatttttcttaatgcttctctttttgaattgacgacaaagctgcaaatgagaaatggtattatgtattcaaaacaaaaagcagtccgaaattctcacccatggtcacattgtcaatttgggcaaatattttcccaccaattcaatgacccactctttagtcaacatttcctccacaaatttgtcattttgatttatcaattgtttgaatttgatcttaaataaacgcaacaaaagttcatggtaattttccaattctttcgaaattttccgtccctttatttcttcatccattttgtttgaatttttgctgtctttcgctttgaagaatgaaatttgttttaattccggtgccaaattcaacaaaattttttcctcttcctccgacaattggcttgacacttcatcatcctcagaattgatagaatcacttacattttcttcttaataaatttttatattgttagagaaaacaatttgaatgcaaaattaaggcattctaatgcaaaatttagctgttttattgcccacgtctcatcactgataatttcaaagggaagccttataaagatttacctctttctttttggcttttcaacttctgctgcttgacattatgagctcgctttttccagcccgaaacgaagtgaaaaactttttggaaaatgtaaaataaattggtaaaatgttaataaattagcagtattgcaattagagccaggaattgagaaaaaaaaagcgcgaccaaactaaaatttccgaaaggactcggacacgaacaacagggttaaaccctgtcttaacaagctcctggtccatatgcattttactatgtttccgggctctaattatgacataaagtaatatgtatttattttttcacttttagaaagtagtaatgggtttgatttatgctcttccaaatttgaagtttcgttgttttcacttaaattcctaacaattaaatcttttgcattattttttggtaaattgtccatatcacttggcaccatttcatttgtaaatttggttaacacttcatcaaatctgtcaatttttttcaagaaaatttcatccattctttcgtctaacaatgaaaaatttcgttcagatgcagttaaatgcatccctttaaacaaatcaaaatcggcatttttatgagtttttggcgtccttgacaataattgtcgttgtctttgaactgtgatgggttcgccttcactttttggcactgtactcatttggccatttatttttggcactgttttcatttggccatccgattttgtatttaattttgacgtcgttcgaactctgttcaaacttctctctcggctttggtgtccgtaagaaaatgtgtttgtgttttcattattcggaactttcgagagtattcgtcgcattgcccgcggaggttccgatggtgttctgaccgacgtttttttaatgtttggtgttgaatttttaaatgcaaagatttcatttaaataaagaattaacagagtgattgaatatttattcataattttagaatttcgcagcaaaataataaaatgaagaaacaatgattttattagtattttttgtttgcttttttgctacatcaatctgtcaatactatgtctgtgtaataaaataaaataattggatttccggacgcctaatattttcttaaatattagaaaaacaaattgcacaaaacaatattcttcatttctattcacattgaaaaataccagttatgtaatataaattagtgaataacaagcttccctggtgtgctgattttcagatttgtgatttaattgagtcggacagcctttaattcaataattcttaacggggtaaaccaactcatccacaaacaattaatccatgaaaaaaatgccataatgcgaacgcacaatgcaagaaattgcatggatgagttggaaaggtgtgtggacatttcgccaactgacacttcgccaactgacatctcgccaactaagccaaattcagacgtttcgccgactcacccaaaaaatgacatttcgccaactaagccaaattcagacgtttcgccgactcacccaaaaaatgacatttcgccaactaagccaaattcggacgtttcgccaactaagctaaattcggacgtttcgccaactgacattttgccaaaaacattcatttcgccaaatagccataatattaacatatgagaaaaaaaataaacgaaactgtttctttttcatcaaacatatcattattccctgtcacttccctttttgtgttaaagttttaaaatttcttttctacctaaacaaaaaggattttcagattctagtaagaaatgccaacggtacgtgaaatacttgagagtctgcaaaagccaattaaaaggccccgaattccaacaaatgaagacatcgtactgaatgctgataggactgacgcagaacaacaaatgcgtcgtaacacacagaaaggcgatggcggtgaattagcgagaagaagcaattaccgcacacacaattagccaaatggggatggagaattgtatcccgaatccaaaatccaaacaatttacttttacaattaaagtccgaggcagcaaattaaattcacagcagaaaacaaaaacgaataatatcataaaacaaaaaccgaaagaatgagaagggaatgacgtggctgctggtcagcagcagaaacacaatcgatattacagtaatatagaattggcgggaaatacaaattcaaagcaaagggagatgaaaaattgagaaggaaacaaccaaattaaataagtcaaaaatgggaaataaataaattaattatataagcacatcttcgccctttgaaaagcgatgtccacagagcttgcttggcgaatcgggagtgcaattggcttcacgaaaggcgatggcgaggtcaagatcaacggcgatcagctccaaaacgagaacgactcggaaaggactgcgcgaactgacggcgatacgggtggtgctggtgaacatgccgagctccacgcgaccctgactggttgaactgtccacggcctcttccaattctgcttgtccctccatttggcccctcttcactcttctttttcggttctgactcttctttttcgtcctcctttggcatccctttgatttgggacatgacccaggccctcaaaaccaataagcccttttccgtcattttgccatcatttgacacatggtcggtattgaaaccggagccatagcgccacagttccagcactgatcgtcccgccggcgttgtcgttacaaatttgacattgccttgtgccgtcccaaaatgttccttcattcgtatgatcagttcttcgtattcaatcattttctctttgatgaaaggaggtggcagccaaaacacaggggcatggctaaagcgcttcaacagctgttcaagtcgccccacacgttccagcacattttcgatcgtttcttcacctctgatcgaatctcttccgatcatcacaatgacggccttcacttttgatgataaaattgcgccatcaaaagctctgatcacttcggtgattgtgccttcttcagtgccaatgaattgggattttggccacatttttaacaattgtttggccgatgagtcgcctacgatgactcttggcttctcgacgaacaatggcttgcggtggatcgtcgttgcgcgtactttttctagtacgaagctggccttctttagcacctcgttccatccgagtttttccgattccggcaattcggcaacgacatttggcattggcacttcgatcggagtgtagccagtcttcagcaatttgtcccttgtcactgcgcatctttcgacccacgccgtaaaggcactttcgatgtccttttccgttgggaaattgccgcttttcacttggtcttcgcgtgcgccggagtaagtgatcagttcaaagccaaccggagcactgacgatcagctgtgtcaatttccgaccgccggcgactgatgaaacggcattcgattttagcaagaaattgctaagaagggctttcattggggtgccgatcaccttaaaatcgccacattcatccccattttggatctttttccattttctgatcactttgaggccaagaccggccctttcaagcactgggtcgaggtcggctgctgtcatttgtacgcagtttcggtgttcgatgccgagtccaccgcattgcgtgtcccaaagcaaaggcccgcagctgttttccgtctccatcacttttccaccaactgaatttgcaattgtcctcaattgcccaattaaatgacggcccaagtgttccaatttttgagaattgcccaaatttgtggtttcattttcggtttcccgatctttgatcttttccatggccgcactttttccacacggttcattttccatttcgcgactgatcaaacacacgacacttatcagcgcatttaactgatttttgaaggggtttttaccccggggaagtgtactaatgtttggtacaccttcaggcacttttacaaggcgttctattgggacctttataggctcaaaattcggtttatcgattggtatgactgacgctgtcgaatcagtgagatccaaaattttaaatgggccaaagtgattccaaagaagtttccggtgagctgaacgggtattaactcccggataaatgaccattgctctttcgccgatgcggaatttatttgccgtgacttttggctgttgatcgtactgatttttcatatttttacgagcaatttcggagtttttctgtgcaatttcgcttaattgtacgatattttcacgaaaaagttggatgtaagtgtccacatcaatcgtgtaattcgggtttactggcaaagaaatttctgatgggaaatttggtgttttgccgaaaataagatggtaaggcgagaatttcgtggtctcggacggagtgatgttgtaggcaaagacaacgaatgggagcctctcgtcccaagtccaattagatgccgttgatcgtttcagcatccccaaaattgtttggtttgctctttccgtaattccattcgcctgagggtcgtaacccgatgtaagcgatttctcaatttttaaaactttggtgatttcgttgagcgtttcatttacaaattctttccccctatcgctgtgaagcttcttcggagttccaagaatcaaaatgaaattcttgacgaattcattcgcaattgtgtccgcacttttatttggtattgggactgcgaccaaatatttcgaaaaatgatcgaccgctactaaaatgtatttgtgcgacgaattagcgggcccaatcgatagtatatctatgcacactaattcgaatggttccgatgtttgaacgattttcattggtggttcattagctcggggctttcgcgaatgtgcacaaattcggcattttaaggcaattttgacgcagtctgcatacatattcggccagaagaattgatgcgcgagttgcaaataaatctttttgccactcatgtgtccagcacaaattcctgagtgccgttctctgatcagcgcttctctgaaggtgaatggcacgaagagacgtagttttccgtcggcttcgcacttgtagagaagcccatccaaaattgtgaaatttgggagaaatgccgtaagcctttgcttatttttcggctcctgcggcacaattcttttggacagaaactcataaacgaaatttaattcgctttgcttcgttttttcgatccattccatacgattgttggcttcctccaccgaactttgaatttggcaaatttttatttgcgcaattctcgaaatttcgctttttgccggtggttcggggcattttaaagctggcgaacgagataaaatgtcagcgatcacattctttttccctggttgatattcaacctgtaggataaatcttgagttcaactgcatcagccacttatcgacgcgactgtttccggtctctgttttacttttaaacatatggataagagctcggtggtcggtaaagactctcgttggaagcatcgtgataaattgcgaaaatcttttggctccaaaccgaacagcgagtgcttccaactcggttgggcaatatttgctttcgtaagtgttacactttctcgaagcgaagtaaattggtcgaacattgccattatcatccggttgacagagaatagcggcaattccgattttactggcgtcggtcatcattatgaattgacgggatggttcattttttgctgcttcaaaatttgggaagtgcaaaacggcgttgtccaaaattttgtctttcaaggcgttgattgcctctttttctaatttgccgatggcaaaactagtgtccttcttcagaagcgaatacagcggagctgctatagcaccaaaaccgaaaataaatttacggtaataggccaaaaatccgagcagtgattgaagagccttttttgatgttggaattggtaattccattactggacggactttgttcacatccattttaattccttctgttgttagcacgtgcccgaggaacggtaattcgcttgcagcaaaatggcacttgctgatttttagtttaaggcctgcgtcctgaattctctcaaacacagcttttaagtgttgttggtgcttcttccacgtttcggaagcaattaaaatatcatctatgtagatgaaaacgaagtcgttgataagtccctcaaaaagttgagtcataaatcgttgaaacgttgcgactgcgttgcaaagtccgaacggcaaaacgacaaattcatgtagtccaaattccgtggcaaatgccgttttttcaatcgaatccggtgacattttaatttgccaataaccggaaaggaaatcaagtgtagagaagaattttttacccccgagtgccaatagtgtattgtcgatattaggtaacgggtaagcgtcttttacagtgactgagtttagtcccctgtagtccacacagaatcgaagagtgccatcttttttcggcacaatgacaatcggagatgcccacggggaagatgaagggcggatgataccgcgtccaagatagttttggatcatttcagagactttctctctatatgcataaggcactggtcgcattcttgagcgaactgggaccgaatttcctgtgtcgatgtgatggctagccaaatttgtttgactcagctcttcttcagaaaaagcgaaaatttgttcaaaattgtgcaacaaatccattaaatcgtcctttccttccggtgggatttgtccaattttcaaagcctgttcagcttctccaattttgtttccgttttgacaatgatcgattctgaaaatttttgacggcagaagtgaattgtcggcttcccatgtcgattcgagtgtctcgacattgccaactattgttttgctttcgatttgttccgtcattgaagacaaattcgaaatttgacacacaacttttccgttttcaacttttccaactgattgttccagtttgatttcagttttgtttggcactgggcaaatcagcacgtcttggccgttccattgctttccaacttccatttggacgaatttggaagtccgtggctgcagtattgtgttgaagataattctgactgcattttcatttttggtcgcttcttcaaactttataagttctttgtttggtgcatcgtacagtgaaaaaccgagtgcagttaatgaatttgttccgaataaaatgtcgaacccaaatggggcactggtcacgtaaaaatggataggcacttcgatacagccttttcgaagaattggcattgtaagggtgccaaaacattgaagttcctttccattgacgtcggcaattcggtcctttgtacgggcaaaatttgctttttgcaggtctaagccgttttctctgatcaatttatacaggaatgtagcgccgatcaacgaaatttgtgctcctccgtcgatcattgcttccgttttggccccaaaagtctcaacttttatgaccaaaatcttcccgactcggcccaaacttttcacttcgttttgttcctcattttttcctttgaactcattttcgaaaaattcctcgatttcggacgaaagctgtacgccgcggcaaaaaacttcaggtggtgcctcttcttgcataattatgcaattttgttttaaaaaattttgtgaacgacgttgatcagactcttttgttgaagtctgtggaagtgctcgattttcaggaccatttggccggatctgaaaactgtttgctccagtggcgggcactgcgtggctttggttagccctgtaatcgaaattttgttttcgtcgtcgacagtcacgagaaaagtgcccgggttcgttacaattgtaacaaacaatgttttcacgcggttgaaaactttgtaaaaattttgatttttgctgagtttggaattgctgtccaaattgggaaaagtttcgctgggtaggacgatttctttcgtcaatgttttgacgttcggttgacacattttttgtcgccttttggattgactctgcacgagcagccaatgcgacaaattcgtcaaagcacatgccaggccggcgtgccatttcaagcgataaagacaattccgggtttgacaaagcacgaattaaatgctttgtagcatattcgtcaatcaaattttgagttaggccggggtatgcgcgttggactacgttctgaacccgatcggcaagtgcatccatgctttcgttcggttttctcttcactccattcataagctcatcaaaagcacccatctctctgcaatcagtctcctctaaatgcgcttgcattgctcggcgaattgcatcaaaccggtatggctgatttgccaaagcagcattgaacgcacgctcagctctgcccgaaatttttgattcgagagaggaaatccgtttgttgtccggccatccctctgtcgcagacacgaattttttgaaaaaatagcgcactttatcagcgccttcgttccctttaagctcgggaagacggtcgagaatcagcacgtactccaaattactaagcggggattgtaccggcccttggcaatttgtttgtggaacatttattgggtcgtgacaaaatttgggagcagcatttccgtaaaaacgcatttgttggttattttcaacaaaattgcgttggttttgttgatggggttcacgcgtttcaaactgcggaaaatttcgctgatgaatgtactggtgatgatattcggcattttgttgcggcccgacattcgttggttgctgcgcttgtcgaaaataaagttggtctcttggttcagcgcgttccccggcgttaggctgtgcgacaaaacgaaaatgctgttcctccagcatcaaattgcgttggtggactgccggtggttgattgagcataaaactcggttcaccacgctgataatttgcgaccacgtttggggtcgaagtcatgcccgggtgaaacccaaaatcatccacaatatcaacgcgcactctcccctggtcaatgcttctcataacactaactgcatttcgaacattttctccacccaaattttgttcatggggattttcgttaccaaaaattgagtcaccatggtcatccaaaagagcatcttcgtccaaatcgtttcgattttgttgcgcgtccatatcgttccgtggatttgggatttgcaaaagtcgccggtggattgtgtctggtcctaaaacagatgaaaccgatgaaacgtggctttggcgattttcgttttcgctcaaaggagcatttccgacgtcggagtgctgttgctgaactcgctgctgttcttgcgcaactcctatgccctcgtttcgcaattgtatgccgaggtttaacgctctttgtcgcgttaatggcggacttcgcataaccggcatcattagcaaatgagaatttgttttcccgttttcaattcaatgcttttgacttagttgtcagcttttcctccgctttcaagattcgttttccacgttttacaatttcaacaaatccagcgaattcggcgagatgaagaaagggatttgtttccctctttttaaaattcggtgatcacaaatttctcgtttttcttttagggatttgtttcccaattttacgaattcggcgctttctttccacgtcgta

SEQ ID NO: 236 - DNA, 2684 bp, Heterodera glycines
atgaaaaaatagtattaatatcaatacaaaaacaatattacatatccaagcaaaattatatagtataacatttattgcaaaatatataaatagttaattgttttttccttttaaacctttatcacacttagatatttattttgcatagttagacttagaaatgtggaaaaaatactataacataagaataaaaattaattttaattccaaattcaattaaatggactgaacacgtaataaaccgaaatcgtcattttttgaaaatccatgatcccaaatataattgcctaatagaagaatcaatcaaattataaaattaaaaatgtaaatacatcaaatgactgagttcttttaaaaaagaaataaattttcttttaaaataattaaaaattggcaataaatataaaaaaattggtgtataatcaaaatcctatatattatcaagtatttcctaaaaaatagttttctttcaaccagaatattaatttaaaatgtaaacgtacaacaaagctttatgaaaaaatatatgcaataattaaaaattaaaatgtaaatgaaaaacattaaatttcaaattaaaacattttttacttagaatactttcaactttgaaaacttttaaatttttcaaaaagagtgtttcatttaaatttcaatacaataataaattatttagtataatgtatgaatcttagtatcaattcaacaaacataaaattgttggtcacaatataaatataatgtgaatttgaatatcttaattataaaaagtaaaaaatatgatgcgttttaattatgagaatgataaaatatatacattcgctcataaattaaatacttccaatataaaaaattaataaaatattaacatgatcaacattttcattgaattgataaataagtatgtttaaaatcaagcattttcaaaaaatatttcaatttacatgttcgttatgtaaataaaggtttaaaaaataaatataaatatatataatataatgtttaaaataataaatataaatataaatagttataaagttgtaaatagataatgtaattaacataagggtctgacaatcaaatttacaagcggtttgaattaattaaatataagtaatagtatcaagcgaaccgaatatgaagaagcctcgcttatttaatacatattagaaaatttaaaaaaattatgtggcaataattaaaaatttttgctgacaatgtagaaaaattagtatcgaaaaaacaataaaaaaacttctcctcattaataaaatttgattttattaaagttcaaaaaaatacaaaaatgttagagaaggaagtaattattgattaggtgtatgaccccacgccacttcgccatcttccccctcccattcccctcattcagttgattattgtgcccaccaatttgacctcccaatttattctctgcatttatttattattttattttcttcggcaaataaacttatttaatttgttatcttcggacataacaaattttggcgcagtcagcaatcaactgcacatcaccggcaacaacaattccgagctttatctcgtgttgatattgctcgagagggaaaattagaaagctcgtgttgatttctaattttcccagatcatcaaaaacttttctctccgtgtgagattaaagtctgccgtgtgcagttctcttcaattggccatggacgcgcaacagctacaacaattgcttaatgcactccaacaaatggtcactaatgccgcaccagcaaatttgagcaatgccaatttggcaagctctatcgatgctcgcctttcggcctttcattacaatccggaggtcggcaccacatttgaaagttggttcaaacggtttgggaaattgatcgaggacgacggaagcacactgtaggaggcctcaaaagtgcgacttctcctcggcaaactcggagaggaggagtacagcaaatatcgggacacgatcagcccaacccagccggaccaagtgaattggaatgacaccatttcgcacctcaaacagctttttgccgagacacgttcgctgttcgtccgtcgcttcgaatgctttaaaattcgacagcaacaagggcaagacatctcatcactaattgcgcagatcaacgcatcatgtgaaaatgccgacctgagtctgacaaaggagcagctcaagtgcattattttggtcatcgcactcaacgatgaacaccatgatttgcgacaaaaggcattgaaaatgttggaggactctcagaaaaatggcaccaacatttcgctcaagaaaattgaggaggaattaagggcaattcaagttgtcaaggagagcgccctttcgctggtcaacccaccaattgccacaaacgccattcgcacaaggccacgacaatgggccgacccagcgcaaagacaaagcggcggctccaatcaaaagcaaactccaaatgccaattcaagcggaaagccaacgcgtggtcaaccgacgcatccatgcggatcatgtggcaaatccgaccattggcgctccgactgcacattcaaggacgccacttgcctcaagtgcaacaaaaaaggacacatttcaacaatttgccggcaaaagaaagcaaaggcaccaccgaacagccaccggtcattccacactgtcaaaatcgacgcaaattgcttacatgtcggcacga

SEQ ID NO: 237 - DNA, 2798 bp, Heterodera glycines
acagtatctcttcttttatttactgtatcatttaaataatacaacaaaaataaataataataataaaaatcaaaataataaataacaaaataaataaaaataacaataataaaaataaaacgaagtgtaaagtacaacaatttcttttctcataatcctgtgttttctccgacattctctaatggtgtaacattggtgaccgatgacttttgtaactgtgtacactaatgcttactgtaatcagcggtcctttcccacgctaatgcatttcggatcgcaattgcttatgttattaacgcaaagctttctcaaacattaaacacactctcgaatattcttgtcacactttctcattcataagccgagtccatccaatcaaaggcatcattcatcatttaatttgtcaatagcctttcatctccttcattgactattgtgtcttcaattcaatgctcattgtttaattagtctttcactttcacaaattaatataatgtactcattcatcttctatttattctttatcatcattcagctattccaaatcccaaatcattcccaaatccattccaattgtcttttcctctcattgtttgttgcccacacctatgacctcagggtcaattggtgcgcttggagaaagtggttgggccatggcccaaaatcataatgatgatgaaatggtagcagtgcgggtggtaaataagaatgtattcaatggaaagacttcgggttcagtccgtttcgaggacgttgataaagtcttgggtgagatagtccgcctagaggaaggcataaatcgtgtccttcggcatgtcaatcgcaaagccaaccgtgctttgagcaacattagtctattgtctggtgaagttaatactggatttaggactctcacaactcaaattgagacatgtgctgaaagggttgacacagtagcacaagtcaatcatgccgatcgtcaacggagggattcgtccctggattcaaatcgtagcgatgatattcctgctcaggacaaccaagctgagaatgaagatggtttggatgatggccacaacattaatgatcaaactcttcaatgggatgaaacaccttttcaacgtgtcaacatgctgactgatggtcctccaattccgttggaagtctacagggatgattgtgtcatcacatatgacaggtgggccaaacgttttcgtgaacacatggaagcctatggtcggaagttggatgaaaaagaaaagttggccaggctggtcatttatttggatgggataccaaagcgtttgattgagaagatggaagatgcaaagaaaacgacgattggtatggccttaacgaatcttcgtgctgagctggattcgccgcagagcaagagtttatcaagacaagccctgttagcatgccgccaatctgatggagaatcggtaaaggatttcttaaatcgattccgtgaagtcgaaattatgatgtcagctcaatcaagcggtatgccgtttctgcagaatgaaagagttattcatgccgttgaacaagagtcaatgcagaatccatcaacgccaagcggtaggttccaaactttgactccaaccagacaggatagattctcttccaacaattatgaaccaaaccgaagaagaaatcaaacgccaggccctcaacaacgtttcaggcagaaattcgacaatcgaaaccagcagagccaatatagaaatcaacgcccgccaaatgacaggagatggaataatcgtccggtttgcaattattgtaagaaagttggacatgttgctaatgcttgccgtaccagactagcagactttcaaaacaatcagcggcctcaatcttttaatcaacgtgccaaatcggacagatggtcgacaactccttttgcctctggtgccaatgctgtccatcaggatcaaacattgtcgctgcttcatgaaattgcacgaacaatgaacaaattgaccgtcaatactgatcagcctggacgcagagatgatgtcaacaccattgccacttcgacagagcagtgccatgtcaagaaagtacacatcaaggataagtcagacatcagtaaatcagagcctttacaagtctcgtcatgggaaaaagcgactttgggtcccaaaattcaccctttcattttcattgtggctatattttgtacttgtggccctgtcttttcaaatacagcaatgattccacaaggaccaatgctatgccaaactgaaacccaacccactctttggaaattaccagaaattcctgaatgccctattccaaaagtgacagtgggacacgtcccaatttctcaaatcagggaattgtatattcctaatgctatcgagcacaatactaaagcatgggcgtgtaggaaaatcatcaaaagagcaagaaagttcacttcactttcgggagtgccaatcacggaggctttaagttctgttatgctggacgtctctgttgatgagtgcaagcagatgattgaacacaggtcatgcatttttggcatccttacagaaattgatggtctgtggggaacctcaaacccaattgacctgactccgagattctggtttattggctccttctcttggtatgaggttaacagcaaaaattgttttgcatttgagacagtaatctcatctcattttttcaataatcaaagcatctgtatctgagcaatggactcaagttgctgatgagttgaaaaagaaagttgtgggagattacagactgacttggctgactctcttgaccatattggtattagtgctgattttggacttcaccctccg

SEQ ID NO: 238 - DNA, 12990 bp, Heterodera glycines
  unsure (1)..(12990): unsure at all n locations
gaatgttatgttggaaatggacgtcttgcacgtataattcttggtagaaggaagccaaaacaggacattgaagaaacatatcaagtaaatgaatttccactttcagatatggtccaaactcacgaaatattggaagcaagaggagatcataccaattggccgccttcagtatcaagctttcctcctacttttgcctcatctgatcctcaaaacagcagacctatgggaaggctccagacactcaggaattctttaaaaagcagaaaacgctcaaattcatcgccgtctaatgcacaagggagaattgcgggcacatcagctacaacatcaatcatggtgctgacagcatgcatttctttgttaccacaaacggaggcagtggaccaccaagatgaaatgcggaccactcttttggattggtgggttgcactaattcctgcattttgtgcttatttggtattatttgttgctctgtactgcttgaagtaccttttacacaatagaaaggaggccaaggcctcatatctcacttggaatgaagttgtgtcagaagtaaatacacttcatccatatatggcaactgtgcgtgcctttgtcaataataagcctgtttgtagtctcatggacacgggtgctagtgtaacgctcgctcccatttctttggctcaggacttaaattgccatctttaccctactaatgaaagagtcatttcagcctctggtcatttgattgatgtgagggccaaggccctaatgcacattgaagttgcaaattgtaaaatttatacagaagttaaactggtgaatgatgatggagccgccaaacgcaaaaattacaaactcattattggctgtgatgcgatgaagaaaatgccgccggttacatttgacattgcgaatgccaaactacatattctaaatgggtcaacggacataggcgcagaacgagattggctgttctcagacgtcaaagtggtctgcaatgtctccactgacttgcttccaggacattgcaaagtcattgaaggtaaactcctgtcattttgtgacttaaatcaggtgcttgttcatgacttggacagaagattgaaacaacaaaacattggattcattccaactgtttcagtgtcaaacaatggacacataaaattggtattgacaaatccaacatttgctcctgttcggttgtacaaaggtatgcaaatcgcttcggtgaatcaattgcgattgagtgatgaaggtccatggttaactgaacaaactgaccattcagtatgcgctgtagtcaactccgtcggtgaggtagacccctcattttgcatcgacttttcaaaaagctcggccactggtgataatttaacaaaactgaggaaattatgtgatgaattttcggacatattttcaaaatctcagtatgatttaggttcatgccttgtgggtgagcacgacatcgtcaccaaaacagaagagccagtcgcttctaaaccgcgccgaacaccattcagatttcgtgaagaagttaagagtcatctcgataaatggatcaaagcaggcgtgatggtaaagtctgacactccatgggtctcaaacttagttctggtacagaagaaagatggagggttaaggccctgtattgattttcggaagttgaatgaagttacaattccggatcactaccctcttcccagattggaaatgattcttgaaaagataggaaaatgccattggtattcatctttggacttgtcctcaggttatcttcaaattcgtctcacggacagagcaagcagaaaatgtggcatcatcacggaagatgaaatcttccaaatgacacacatgccatttggccttcgcaatgccacaagtgcatttgctcgagtaatggctcatgttcttacaggtcttgaagatacagtgattgcctatgtggatgactttctgatttacacgcggtctcctaatttggatgatcatttgtctgctctcagacaggtatttttgcgccttcggcaatacaatctcaaagtaagtcctaagaaatgtgttcttgcctcatctcaaatggaatttttgggttttgtaataaatgagcatggctacacaccaagcttaggcaaagtggaaataatcaaagaacttccagccccaacgtcggtgaaagaggtgagaagaataattggaatggcctcatttttcagaaagcacattcttggattctcaacactggttgagccactgactagactcaccagaaaagaggtaccatttgtgtgggaggctgaacaacaggatgtctttaacaaaataaaaagcattctttgtgataaaccagtgctaagattcccagattatcagaagccctttcatattttcactgacgcctcaaatgttggacaaggaggtgcgctgatgcagaaggacaatgataaggctccatttcatgctgttgcatactgcagtcgcactctctcaacagccgaacgaaaatggccaacagtccaaattgaattgggttcaataatttttgcattaagacaatttcgaccattcatttatatgggaaatgttgagctgcacactgaccacaagccattggcttatcttcttcagaaagcagacgctcatccaaatttggcaagatggctcattgaacttcagaactacaacataaaaatcgtccatgtggctggaaaacagaactcactggctgatgcactctcacgagctgcacatgagaacttatccgaagaagaggtaaagaatttaagtgaattaaaggatgtagccgaatttcctgcgtgtcttgtactatcatctgagtcacgcttggtcctcgatgagtcaatcaatgcactcacacttcgttccgatgacggtaagtcttatgtaattaatatgaggcatgaacaacaaatcgatattgaagcctctgcattcattgagtttctaaaatcaggagaaattcctgatgggttatctgacttagaaaaagaaaaattcgctgccacggcctcaaaaatgttaattgattctgaattgcttgttcatcaagaaagtgggctaaggcctaggattttcgttcctgtgtctttgagggcacttgtttttgattcgtttcattcatcacctcttggaggaggccacatgaatcttaaaaagacgctaaagaaatgccgaaaatatttttggccaagaatgcatgcagatatagttaattggactcgtacatgcatcacttgtcagctgaggcactctcctgttcctgcttacagagcagagatgaaaatgccaccagtaaacactctctttgcaaaggtgggattggatttagcaggtccattcccagttacaaaaagaggtaacaaacacataatgaacgtggtttgctggttcacgaaatttgttatatcagttccagttccagatgccaaatcaacaacattagtcaatgcctttctaacaaattgctatctcaaatttggtggatgcactgagttgataactgacaatgccactgccttcacatcagaatttttccgtgaattttgtgcgatgctctacatcagcaaacgctatgcaattcctcattggtctcaaggaacgcctccacagaaaggacctttcgtacttttcacaacatattgtcaaagtacatctcaaaagaccaaccggactttgatgaacacttagaagcggcaaccttctgttataacactgctgttcatcaatcaacgggagaaacacctttctttctgatgtatggtagggacccaatattttgcgttgatcaaattttagacccaaggacagcagacccagttgcttttactgatttaacagaattcaaatatcgtctaatcatttctttaagaatggcatgggcggccactgctgaggaaatccgggagtcccaaatgagggctaaggcccaatatgataaacaaaaccgagttctggatatccaagtgggtgacagagttcttttgaagaattatatctctaaagtaggcacatcaaagaaattccacctaccatggagaggaatttttagagtagtgaacattgatggtgtaaaggtaacaataacaagctgtaatgccccgcaagcaaaccctagggttgtgcatatcaaccaattgaagaaatccttcgatggattaggttgttaggaaaagaagagaagtgggtcacggcccaaaattctgagaatgaggtggaaggagaggaaaagaagaaggatgagggcgaagaagctgagttaaatgaggacgttgagaagaagaaaaaggagtgggctacggcccagaactctaagaacaatgaaaaggaagttgagaagagtggagagaaagagtttaaaaaaagtgaaaagaaaatgaagtgggttacggcccaaaatcattctgaaggcttcggaaacggtggttttggagaacaaaccaaaaaagttgttgaagtgcttcttttggatccggagacatcggcgcagataagagaatatgtggtctgccaactccaaagcaaaggagttgtgttggtatacccaaatccttcgggaaaaaacaactttccgtacttcatctttcttccggatgtgtttgatggcaaatttgaacgtccattgttgcctggtgaccgtgtctttgttgaagattacgcttgggtggaaggaaaagagcatttggacaagtcaagatggatttatgccgaacaaattcgctgtcaagcgacggtcacaaaaattgacaacgtcatttatgccaaacaccacaaagaatttgggttgatcactgccaaatcgctcagaggaaataaagaagtcggtgccatttcggtggttgcgtttggaatgaagagggctatggccctgtatgaacgccaatgtatgcctggacttgagctgaagcaagccattgtgtcggatgtgattgaagtgcaattggcgaaagttgctgaaggttggatgatcggttcgagctacattctgcctcagaagacacccgtgaggcaagggacggaatttaatgctggagcacatggcaagataccggctatggccgggctgtttgaaaaaaattggccaaggaagactgagtctggaattccaatcatcttcccgtttgtgtcagaatataccgaagatgagctcgtaatagctgagaaagtcgtcgcagcagctttaacagtcgcagccgaaacggaagaaatgctgagacttcagacgcagttcaaaggagtagttgggcctgtctgggacaacgtcgacacggagcaggaagaatttcctcgcttcttttggctgcgctttgaaacatcggatcggaagcacgtgaaaaagctggttgatcaatggaccatcgattcacctgttgctgcaagaaaggactacgattccgatgcgtttgctcaaggacaagtcctgctgctgaaaagaagtgccgagttcaaaaacgatgacgctttcttcgtggtacgaatcaaaatcaaattgaacgcacatgaagacaacgacagtcaaatgaacaacttccgttcaatgttacacggcgaagaagtgctagtgcaggcgacgggtaccacgtctggttatgccgaacaagccgcgtgctttggattcaactcgccctctagcatcgcaaaacaagaaactccaagagcagaaatgctccgagcattgttgggacggccgttgaaagataaaagtcggtttgctggtgacaaagttgaggttaatatttgtgatgaaacattggactcgccgacatttaaacgccttaatgaagagcagaaggaatcattgttgctgatggaatgtcaggacccattcatcattttgcagcaggctccgccaggcaccggaaaaacgaagacattggcttcggccattgatctgattgcgaataatggtgttgctgaagatgtggtggtggctacggccacgtctaatttgcccgtcacgaaaatggtggaagagaccaaagctcttggtgtgaatgaagagcttatcgcgttcttcagtggtacggcgaggattcggtatgcagagcaaatttctgctctcgaatcagaattgcttcggcacaaattgacggacacattcctcgcgaaagccaaagaagctggtacgggagcggccccattcaagacgtacaaaaagcaagtggtgaagaacccgatgagagcccaagaagcgaaaattgcgtctcgatatctgcaaatggaacgcaaaaagataatgtttgtaacaacaagcatggcgacacgcatccctgaagcgtcagacaacactacgcatttattgattgatgaagccacccaagtgccgttcacatgtgtcgtgaacatggtctgcatgatgccaaatttgaagaaggtattcatcacgggtgatatcagacaactgggtgtgcatctgagtgagcttcctgaagctatttgggcaggcttcggcctggaatcagtgacaacacaattggtgaagtctcctgctgtgccggagactgttcttcggcaatgttatcgctcgcatggtgcgctggtgaactgcatttcctacgcttcgtacgaattgcatggtgaagaagttgttccggtgggagaagtgacacacgcaagaacggctttgactcactcgacaatcaatttgccgattgctgacattccgctggtgctgttacactctgaaggccgaacaagaacggatgaaacctcgttctctgtctcgaatgaagaccacaacagaattgccagagagcttgtctatactctggacgttaatctgccgaaagaagtgaacataatcgtgatatgtctgtatctgtatgagcgggaactgctcgtggatgagtttgagcatgccaaacaacgaggtcggttgagtcgcaacgtcgaagtgcacacggtggattcattccaagcgaaagaagccgacataatcgtgctggtgacgactcgcagcggaaacaccgcagaacaaacgaaaggacgtttgacttcggacttcttcaaggatagccgtcgtgctactgtcgcgttgtccagagcaagagatggaatgttcctcattggagacttcagaaccctccaggaagggccggtgtggcaaagatttctcaccaaagcgcaagaatttgtgcccatcttcaccgatgaatatcttggtctgatggaatgcacgaaaataagaagagtgaatggcatccttgcaaatgttcatggctactcgccaatcgaacgacttgaagagccaaggcgaaaaagagacttccgcaacccgcgagaagagacgacatgggagacgcagccaagaaagatgtgaattagaaggaaggcctagtacatctgtgcaaaggaatccgaatgagaagccattgattggaaggatgagaatgcgaacgtgtcacaagtgtggagaacaaggacacattgcgaagaattgccggcaatgagaaagagtaagtccgtggaaatgaatggttaagaatgagtgtgaggcccggggacggtccctaaggggtattggaggagaatgaccataaagagtgcttaagaaaacgcttttgcagtgggctatggcccaatacgtattttgaggcctcctgcgttgtctttcttttctcaaaatcttatttttgtccactattgtacctaactgtcttcttccgctttattttctattgtaaaataatacatttaacttttcttaatatgaaataatgactagtgagctacggcccaaaagtattaaaaatgacgtcaaatatttcagcaatggaaaatcacttaattcctggaatcccttttcttcttgacggccaaatcgccataaaattcttcactttgcgatatttcactagcaatcatcatccagcaccgtttgagatggatttcgacgactggggagtgagacacatgcactcgtccgagcaaggatatttcgccttgcgtgcggttgagttcggtgaccgacaacagttcgaacatgttcttaatttggcttcggccagagatgtgaagaaccgaggaaaaagggtacgcggctacagttatgggcattggcagacggtcaagagagaacacatgctgcgcgtggttttggaaaaatttcggcagaatgaaccgctgtgtgaagctttgctccggacgggctttgtccgcctcgtggaagccagcactgaccgatattgggccgccggattgctgataactgatgaagctatacgcagttcaaataattggacgggtcggaatgagcttggctgggtgttgatgcacgtcagagaccaacttcgaccattgccgcaacaagtccacctgatccacaagcactacgtcgtttgccaggcggcagcgcctgactacgttgtggcactcgcagctgagccacatgttcagccgtatgctgttcggattaacaacgaaactgtcaatgctgcccgacaactgcaaattggcgatactctggtgataggaagtgtggagtggagagaaggttttgagcagcttggggccgaaggaatgaacgacagaccgtgttgggtacaccaggccagattcaactggcaagctacggcttcggccgtgtacagtgtgtgtatgcaccagtgggttcctgccagagcaaagatccttcgttgtgttcgtggggggccaagacacaaccgaactatctgctcaatacgcatccagttggacggcatcgaatttgtattgacacagcgaaatgtcaatggcaacatcaacttggcacaacagggccaatgggttgacgtgtcggcaattgtggtggcagagcattggcacgcagattggggattcattttgcccccggacgctgtgtttagagggagacaccagattgtgtcggatgggcgtgtcagaatcccggtgtttgtggggtgatgcggggacgaagagaagagagtacgttgactaaaagtgtattaaacgggctagactagaccgcttgagaaatagccattttagtgagctaggttcgagaaacaaatagaaaatgacatgcaggcttcggcctgaaccataaaattgcagaaaaagagtcggcaggccacggcctgaatttaattggaaatgatgagagaaatgtatgactgtcaaatatattacggtatcaaaatttaggagcgcagaaggaagttgtttgggttgcggaggacgccgtagggtccgcgaagtcgaagaatcgtgagcgaaaaaataatcggacaatttatgtacaaataaattttctaatcctttcagctgttctccgttcccatcctcaacaacctcgccctgtcatggaagactacacgaccaacgccgctgatcaccgtctctcgacaacttttcaatcacaatttgcatccacttcaggtggatatttaataagatggaaatattattgatttatttagttgaataattaattaaaaacatcaaaattcaaaattaatggaaccatgggacggttcccggttaaggagggaggtgtaaggcgtaaaagggatcagctaatcggagggaagggccgcccctcccgttcactcccggggcccctccttataagcccgggaattccttcccaggcagttgagtcgcgacgatcagctatatcctattcaattccccatccatcgatctcgtcccccttctccagcccagggagagctcagcgcgcgggctacggcccgggatggacaagaggggatccgtgggaccggcacaactctaactgatttttgcggcaaccaattcctgaatatttttgtcgaaaattcaaaatattctatcaaagcacttttatgtggtatttttaaaatgtaaaaataatttttaaatttctcttaaatgtagcaaatatctttttgagtaaaattaaagaaaaatacttttggccccgagtttggcactttttgccaaacttttgtggaatatttcaattttctaatgacagagaaaaggaatgtatctttttaataaattaaaagagctcggagtcgcgagcgatgccaataggaattaccgatcggaaaattattaaaaatattcgctcgatttgttactgcttttgcaaaaaaaaaaaaaattggccagttttgtggatttttaggccaaaaattggtatttttatgaaattattcaaaaataattgaaatatttatgcataaatacatgctagcaaaaaaggtattaaaggcagttcatttttgacagaacaatccgtggttttggttttaaattcgaaagcaaaacaattggtggatggatgaaggaaatttattcaaaatttgtgatgggatttcttgccaaattgtgccgtgcccttctcttccgctccctttctgtgttccgttcgttcattcgtccatttctttcagctccacaaattcgtactctttctccaattcatcagcaggtggcattttcgtggaagagcgctaaaatagcttgggttttttctttgggaaaaatcaggtgaatccgattgaaaatcctgatatcccaatcacaatctcggtttttttttggtccaagtcaagcctggcccgatgtggattttcccaaaaattctgagctcttgcgattctataaaaaaacaaatacattttacaaaatttcaaaggtttgacatttttaaaacgattgttccagtatttatgattcttcctttcaaactatgaggaggctctatttagggggcgggagaatttggaaatacggtatactcttgaaatttatgcaaaatttaaactctgctgaaagcgaaaattgattttttcaaagacagaaatttaattttttatgccttacagtacaaaaccaccgcccaaaatggaaaatgctagtggatacggtacattctgtgcctgctgttgctgctccaattgttcgagacgagcactcgcagcatcgaaaatttttttcgcatcagccataatccgtttttgtgctttgatctcctcgccaattcgcttaaaaaacaaaacttccgtctcccacgaaataaatttgttttacttccggatgatcaggcactttttgctgtttctttttgtccctttgttgccgatttacgaaccaattgccaactgaaatttttaataaatattttttgttcaagttttagtcaaaacaaattgcattgactcaaaaatgccatttatttagttaattattcattgagtaccagagtccctattcttaaatcccgtttttggcatctcggtctcgcgtcaagtctcaggaaattttcggcctcaactaattaccctgctttgactcattaacgaattgccatgcattgattaattcactaattatcctgcacttatttattaactaatcacccggcactaattaattaacccatcaccctgcatctccgtaaggcctgtctcttgcgccagctgctgctcctttgccgggctcgggtaggcatcagtcaggtaattctccatgagtattttccgctgtaaaattgcattccatcaaatgcatttagtccattaaattttaccgtattatcattaaagcaatgcttttccgggtttgccggaggcaatggatgcttcttgcgcactctgtacttgtccactgggccaagtgggcttaagaattttatttttaaatttaaatttccaaaatctacccccccccctaatttcacctcttcccccacatttgttccgcctgctgataatgcgcatcattccacattttcagcagctcctttccgttttcccatgtgattctttcttccaaaatgagataaagttggtcgaaattgctcttaaaatttacacgaaaatgtgcctaataaaaaatgcccaccgttcgagggggtagaaaaataaagccctcggggggtgtgggggagagtttctattttaggagtacggtaacgtaattgactaccaaattttgaaaatttttctgcttattcctcccactaccgtatgtccccgctttttcttccactaccatatgttcccgcttctcctaataccgtatgtccccgctttttctcccattaccgtatgccccgctttttctcccactaccgtatgccccgctttttctcccactaccgtatgtccccgcttcacccgctaccgtatctcccagctttttctaccactaccgtatgcccacgctttttctcccactaccgtatgttcccgctttttctcccactaccgtatgtccacgctttttctcccactaccgtatgtccccgctttttctcccataccgtatgtccccgctttttctcacattaccgtatgccccactttttctcccattaccgtacgcatgggaaatgttgagctgcacactgaccacaagccattggcttatcttcttcagaaagcagacgctcatccaaatttggcaagatggctcattgaacttcagaactacaacataaaaatcgtccatgtggctggaaaacagaactcactggctgatgcactctcacgagctgcacatgagaacttatccgaagaagaggtaaagaatttaagtgaattaaaggatgtagccgaatttcctgcgtgtcttgtactatcatctgagtcacgcttggtcctcgatgagtcaatcaatgcactcacacttcgttccgatgacggtaagtcttatgtaattaatatgaggcatgaacaacaaatcgatattgaagcctctgcattcattgagtttctaaaatcaggagaaattcctgatgggttatctgacttagaaaaagaaaaattcgctgccacggcctcaaaaatgttaattgattctgaattgcttgttcatcaagaaagtgagctaaggcctaggattttcgttcctgtgtctttgagggcacttgtttttgattcgtttcattcatcacctcttggaggaggccacatgaatcttanaaagacgctaaagaatgccgaaatatttttggcaagatgcatgcagatatagtcaatggactcgtacatgcatcac

SEQ ID NO: 239 - DNA, 1420 bp, Heterodera glycines
  unsure (1)..(1420): unsure at all n locations
ttatgaaaatttattttccaacgtgggtttttcccccggcattttttaaatttctctagccatacagacaaatattgtaggggaatttgctactcgccccatgaattttcgtttccttatttgttcgggttggagaagaacccaagataattcttgctctactgttcataagcaggaaagcatttcagggccccaaaaatttttagaaaaatgtctcagagttttttctaaagataaaaataacactctcacccgaattctactaccataaaaaatgtaaaaaaaaaaagatgaaaaaaaatttttaaaatttttgagtgcaacaggcgacattcacacttccccgatcttgggaccaactctactttaatcacttaaaagaccagcattgcactttttgaccagtgaaattaaatattaggccttaaaacccaaaaacaaagttttatttatttttgcagtctccattccatattttcagaaaattttttaaattttgttacgatatttcttttatttttcatgaaattgtccgcaaatgtccgtccgcaaatgtcccactgcgctccaaaaagttatcccctcgtatttctccaaaatgctgttcaaattcggatctccgcaagggcgtagcgaagggggcgggggcttaggaggctaaagcccaccgaaaccgaaaaataaataaatgaatctcgaacatttattttctggcacagaagaagcacaaaatacgaacttgtataatgaggaaattggcgagtgtgttcagtaaatgtacaataagtgccgaaaggagtgcctgggggtgaaaggacaaatgccgaattattatcattgttatttttttctacaataagtatgtataatgaatgagcaaattgatcagggtcacatcggcacgtcactcgattgatcatcatcagcgttcagctccgttagaggcgttcagtcattggcgtttatttcgctcctttctgggtgcccaaaaagcctaaatttttttacagtttttaaattttaatttatatatcaaaatatttgtcaacactgatttgaacgtgtgcacttcatcctgaccctgccccccacatcccccgaaatttcaaaaaatgtatcaaaccctaagaaatgtcaagtttttcaaaattatcagagacacaggctgtttagtatattaaaatttttcaattttttccattcgacccttctgtttaggccgagaaacaaaaaaaaattttttttttgaggcttaggtggtattttctctcaccacctacgctcaatctaaaaagaatcatttttcagacactgcaagctgctgctgcccgatcactactccattcggantaagtggtgagcaagttgattttttttgaaaaatatgaggagtgcgtgcgaatctggngacctccctccc

SEQ ID NO: 240 - DNA, 4419 bp, Heterodera glycines
gctcctttccaccacaccccaaccgaaaatttttcaaaaaaaaatcataccttaagcaactgtttgcggtgtttttttgccctttttcagtgccgtgttgatgtagccttgtcggagcagcgcgtaattttccggcgtttggcgcattcgtgcccatctggggctcgtttcggccagctgaatagaaaaaaatttttttttttttgcgttcaaaatttttttgtttaaagggagggatccggctgtagcacgagagacgaggtgctcctgcccatccccgccccctccctcctcgttcgtcgtagggggccggtttaaaagagggggagtcgccggtaaagaggggggggggaagtagcaaaatttaacagattcaccaaaaaatggtgattttttcaatttcgaaaaaaatgcatgcatttttaaggaaaatttcagcaaaaaattctaattcagtgataaaccttcgcggccaatcgcttccagtcatccctgtccgtgccatcgcccacgcatttcgagaagaaaaccaattccgccgtcttgccaccgatgcacatgaggatttggctttgagttgtctgcgtgtgaagctgggcgcttcggtgtattgcaccgagccctcatttccatcagcgtcttttacaatggtaatctgtttaattataataattaatcctcaaataaatccacttttttgaaatcccaatttatggcgccaatggcatgcccaggcggagccgaggccttcgagttttcaaaaaatcgcgtttaattttgaaaaaaattttcagacagtttatgggtttggtaaactctcagaaaaaatatttttttccttcccatttaaaaaaagaaaccttataaatgtgtctatgcattccatcagcttccacaagaaccaaagatgacccagttcatgcagggtggtgcgggctttggtaagtcgccccgttcgttcgcctctttccatgtttgccttttctcgtaccagcgtcttcgtcgttgcgctttttgtcgttcagttagagctggcatggttagtgataatttgttaaaaaataacagaattgtgccgatctgaattcgcaagcaatatggcaagacgattaagcaacaaaacacaaaaacaaatgcttaaagatgcaaaaaaacacttttttgtttgtttgtttttttgcaatttacgacttgggtagaagcgtgacatcaatactcatttttgagtgtcagaaccgtgtccggtaatcccgacactgggtaatttagacactacaatttcgacactgagtattttcgacactgagtaatttcgacactgaactattttcaaaactttcactgttttacttcattttcgacactgagtattttcgaaactgagtaatttcgacacttaagagttttttgaaaaaaaatcatgccaaaatttgaagattggtcaaaaacgaaatataaataaactgcaaatacatagatggcatcggttcgaatttataccttgttttttagacagctgatcaagggctttcgaatgataccaaatttgttcgaattttaccgttttaaagggtcaagggcacctttttcacacaatttttcgagttttaaaccggttcaaaaaccggttttttggcatttccgcaactcgaggcatatttttccgtgcttagctcctcgaggcgaatcgattggtatataatttgaccccttttttcacggggcgttcactacagtttatccggtagaaaaactccaaaataggtattataaaagtcatcgtagacatcccaaaccaagtggaaaatgctttttcgtgcttatctgtgcgtattaagttcgcaaattttatgtatttatctaaatttcccagccctaacaattacctaaatgtattcaaacaaagaagcagcaattaacatgaacatcaattatccgatcaattcccattcctaatgatcaaccaccatttgtcatttcccaataattcgttcattcactttttcttccgctgtccgctgggcccgggtttcattttcagacgatttgttgctttcttttggcccgcttttggtggagacaattgcctaaattcggctaagtgcaattaaaattgattattattatagcaaaagctaatgccatgccactcacccaatcgtatgaaacgaaagctgacattgttcaaattttcgtcctcccattgaattgtcttcccaattgggcatcgcttcaacagccaataatcaatgtcataatcatcatcttcgttctcttcatcatccttttcttctttctccaatgtcagcatttcgttggtccgttcgttcgtcaattcaaatggcgcattctccgccggttcaaagtcttcaagtcgaattatgtagttggcagaagtggtggtgatggcacggagaaatgcctaaacaatggaaaaaatgaaaagcaaatggcaattaatacaaatattttattgaaaatatgggcaaaagtgccggtggtagcgcctctttttcgaaaaaaatttcaagtttttttttctcgtgataaaataattagaccatttttttagaccaaaaatccgaaatcttagaatttgaatttcacacacctttttgaacccgttgatccatttgatatttggtggttctgaagcatcacgacaactcaattgctttggctttctatcttttctcggcgtgttcaaccattttgacagcgcttggccagcagttgcatttggtccatcatcagcgatcacatcgggcaacaaattgccggaatcgattgaattgatgttgtgatcagtgagaattgacggcgaagtgtggcgaatcaactcttcaagatcatgagcatcaaaaaaattcaaattgcgaatggttggcgcaaaaatgggccaaatttcatcagcaattacattccaaattggctggacattcttggctttacgggcgtaaaacaaatacaaatacaaatccaaattggtgcctttgtcaaaaatttgctgattggcacggagaaatgtgatgacggaatagtcaatgtaactgaaagggaatgaatcatttagcattttttgaattttgtttggatttactcgattttaaggttctcaaagcggattttgtcgggcatcgaatggtccggcaacggaaatgtcacaaatttgccatcgatctgcacagacagtttcgcttctggttcattgtcctcgttatgaatgctaatctcattccaaagcgtcaattcgcttttgccgtcgaaatgtttgtccaccaacgcattgaaacggggcgaaagcaatgccaatttgagaccaagttgggcacggtcaaaaaatgggagaatatccatcaaaacatcgttgcacacccaactgaaaatgccaaaaattatttggcctagaaatggaaagaaaattcggcacacattttcctcaaagttcgacaattctttttgatggccacgcggagactttgccgttttccagaagatgacatcactgagcccaacgtttgctgctgttgctttccaccaattgttgcagcagaagaagaaatgaggcgatggtcggcggaggaatgcttttgcttttttttgattggcggtgccatttaaacaaataatttagcctaaaataaataaaacttttgaacaaattagcacaaaaattaagacgtggattatggattgagtaaaaaactattttgcggcatttagctgagcacgcttccaattaattagtcatcataaattatgattgcaaaacaacaaatgacattaactgtcaattttctctgcattttatatcaatttttcacaccggtactcaaatatacgctaatatttttgtataaaaatgccattgtttcttctttcctcctcattcaacattcattcattcattcatccccccccccattttttatccaattttgagtctgttaggtattttattttttataacaaaatttttattgacaagccaaaaatagtttttaaaaaattcacatgccaaaaaaattgttggcaattgacaaaaaccccaaaattcttgaaaattgttgctaaaaaatcgatcgaattcaaaaacttttggagaaaacgtggttttcatgcttttctccagggcttcgatcttaaaattttgaaaatcctcatttccgccataaaaatcctcatttgccactaaaataccccaaaaaaatcttcatttggcatgaaaaatcctcatttttaaaaacatcataaaattacgaacaaagtcagttaactgtcatatttttcgtttgaaacaatcacagcgcctatcagcgccgccggaccccaataattcctattttttcttaaaaaattggcctaaaatcgcaaaattggtaaatttttggtaaaaatctataactactcttatttaaa

SEQ ID NO: 241 - DNA, 2103 bp, Heterodera glycines
tttaaattgctctttttgtggcgcagttttccaaaaaactttttggtgacattgtggggaggggtccggcagtgccgataggcgctgcccgaaaaaaaatttgggattttggagtgcgatttgttaacagattttgtcaaaaaaatgatttgaccccctctatcgatacctgtttatttttttgaataaaattatttaaaggaaattaattaaaatttattgaaaaatgaggatttttcgagaaaaaaagtttaagatttgaagaaaaagtttgaacattttggcaaatatgcctaatttttcaaaaaaaatcatgcttttttgtcactttttttcaaaagatcacaaaaatccgcaaatcctcatttttcaaaaaaatcctcattgaccctctaaaagaccataaaatgaggaaaaatcctcgcatatcgaagccctgctttcctcatcaaaaactaccacaaaaaaggttaaaccctaaaaatcccaacccttcttttgtaaacacctcccattccaatgtttaaaaatttgttttttttttgataccgagccgaacggacccggttttactggatccggtaaaccggtccggcgaattttcgaaatcccctagtatttttttcatacaaaaatttcatttaggcaattcttattattattatttttaatggcaccgcccgtcacaaaaaagcaaaaaatttcctccgccgacaatcgccgcctcatttcttcttctaccgccgcaattggtcatgaaaagcagcagcaattgatgggttcacttgtgacagcatttggcaaacggcgaagtcttcgagtggcaaagaaaaagaatcgaactttgacgaaaatgtgaaaaaaccgaaaaccccaaattttcagttttattcggttttacgcgtccgtcccatgaattcttgggccataacttgtttcttacttaatcatgcttcacattcttggtaccaatcgaaagcttaaagtctcggcaatttataaatgcaagaaaagatcaaatcactggcattaaaaagaaattacaaaactttttcgataaaaaatttttttttattttatttacaggctttaaactttcgtttgataccaaaaatgaaggctatgataagaaactgaggacattggtcattcatggaatgcgtaataccgacaaaaaccgaattcttgtgttaaattaaccgttttaaaaaccgttcaatcatttttccccgcattttttagctggatttgtaacgacgttttgatggacgttctcccattttttgaccgtgcccaacttggtctcaaattggcattgctttcgccccgtttcaatgcgttggtagacaaacatttcggcggcaaaatcgaattgacaatttggagacaaatcagaatttcaaagacacagcaggaccatcagcaggccaaattttctgtgcgcattggtggcaaatttgtgaaatttccgttgcccgaccattcgctgcccagcagaattcgttttaagcaccttcggattgagtaattaaaaaattgactataattaaaagcagctaatgtaaaaagtatcattttccggagcagcttgttgcccccccccctcaaaaaaaaaattcaaaaaaattggaaatttttctataagaaatttctcaagaatttttttttttaatttctaagtttgaaataggcacccccgtttcaggtacattaaccaatccgtgctcgaatttttgcgctcaaacaaacaaatttttgacgatggaagaggcaccaatttgtggttggacgtgtgcaattatgccaaaaacccgctgatttgggattttttggtccgagaaatttggccaatttttgcgcaaaacattcgccagttgaagtttctgaatgctgctgatctggccaaattgcggtgccgaatttcgccgtcaattctcaccgatcacaacatcaattcaatcgattccggctttttgttgcccgatgtgcctaatgttgatcaaaataatcaaccaaaaaaaactgcaactgctggccaagcgttgtccaattggttgcacacgccgaccgccgatggccaacccaagcaatgtttttattcgc

SEQ ID NO: 242 - DNA, 2641 bp, Heterodera glycines
  unsure (1)..(2641): unsure at all n locations
agtttctgaatgctgctgatctggccaaattgcggtgcccttaaaagccgccaagtctcaccgagcacaacaggaaacccctaaaaaaggctnnnggnntggggangggnnnaangttgatcaaaataatcaaccaaaaaaaactgcaactgctggccaagcgttgtccaattggttgcacacgccgaccgccgatggccaacccaagcaattgtttttttattcgcctattaatggcccagaaaaaaaagaatgggtcgacagattcaaagaggtgtgacagggagggagcagcagctcgtccccccccccctcaacgcccccgattttttaaaattttttggaaagttttcaaaatgaaaaatcagtaattcaccatgaaaaaaaattctttttttacttattcaaaaaactcagaggtgtgccaggaagcgcatgtttaagcgagttttggaaaaagattttagaaaaatgaaaaatcggtagtgattcacgatgaaaaaaaatttttgtttgaattttattaaaaaactaagatttttcttgaaaaaattctacattagcgagtcttttttaacatagtgcacattttcataaatattattcaattgattgttgccaatttgtgttggttttcattttcacaaatttgtttagcaatttcgccgtgccaccactgccgtcagctacaaaattcagtttactgcttatgcgccggcgtcaacatcatggtgccatttgaattggtgaacgaaagaacccgggaaaagctgacattgaccaagccagcaaacaaccgatggataattaaacgatgccaaaatggggagacgacgacggcacaatggacggaccaaaattcgaacaacaatttgaacaatgtcagcatttatttgaatggcgcaaattgcatttggtgagtaaaatttgcgtaaaattattaaaaataattcgaattaaaaaatcattatgtgagggcccttcaattaaaatttaattggaaataaaaaatagattttgacatttctttaggccattgttgtccactccggcgacgcgaaaaagcggcagaaaaaggacgtcgaattgcgcggaagtgaaatttaattgagaaatgatcggcttattggggattattgttgtgaatggacaaattgatcgatctgctaatccattgttgatgatgattctttccgacgaaaatattttttattatttgttttcacttttgacattaaatgaatagggctgctcaaatgagggctgaaatccccagaaaattaaccctcgtatttctccaaaatgctgttcaaattcggatctccgcaagggcgtagcgaagggggcgggggcttaggaggctaaagcccaccgaaaccgaaaaataaataaatgaatctcgaacatttattttctggcacagaagaagcacaaaagacgaacttatataatgaggaaattggcgagtgtgttcagtaaatgtacaataagtgccgaaaggagtgcctgggggtgaaaggacaaatgccgaattattatcattgttatttttttctacaatatgtatgtataatgagcaaattgatcagggtcacatcggcacgtcactcgattgatcatcatcgcgttcagttccgttagaggcgttcattccctgcgacgagtcatcagtcgcgagttcatctgtctgttgatgaaatgggggcttcattgaatcaattagtgtattaattgcggctctaaatgcagttcatcggaccatgaaaaagagatttagcaaaaaacaatttggcaaaactttaaagcaccataactttttcaaaaatcactcaaattaaatattcttggtatcattcgatagatgtaagaagcctctgttagtatttgcaaaatttcaaaaaatttcattgcggttcaaaaaaataatgatcaaaaatacttataaaaccagttttttgaagttttctgttcataactttttttaaacataacaaaatttattgaaattttgaacattgatagaggacgcttagatctgtcgaatgataccaagaatgtttaatttggacgcttttagaaaaagttacggtgcattaaattttcaaaaaattttttatggtcctgtgaactgcaatagagccgcagaagcagccaacccacctcatccaatgcttgttgtgcttcatcttcgactatacgaattggcgtcaatgtcagtccgtaccagcggtccatggaacagaacaaagcgcgattgaacatgcagaaaatacgggggaattgctaaatggggggagggaaattggcgatgcgtttagaaaggggacggcacaaaatttcgccgcccgaaatctcgccgagacaaaaatctcgccgcataaatctttaaaagcttttaaagttacaattagaattttatcaataaattttttttgaaaaagtttcaggattttttttttgaaattttatgataaattagttagttttttcgaaataaaaaaaaattccaatttttttctcactttctaagcaaaacacacaccaatatttaggtttttggagtcgctgatcacgaatccggcatccatttcgaccaatttcgaaccccagacccgaactcgagcaaaagatcggaaattca

SEQ ID NO: 243 - DNA, 1277 bp, Heterodera glycines
  unsure (1)..(1277): unsure at all n locations
ctgcannggtcggaaaaaaattgaaaaatatttatggggccctaaactgcatgagccgaattttttttgaaaaaatttttattttttaaatttatccggcgaaattttggggtgcattcgtttggaaattggtggacgacaaatgaatctctctcatcagctcatcacaccttttggatgaaagactccaccacggtttggaagccgagccatttgaacttgacggtcaccaatttgtaagcgcacatgaacggctcgcagttggtctgccactgtcccgtcaacggaccacggcctgtgcacaccgaacggaacgtggacggtatgctgtcttcttgaatgtcctctgcactcagaaactctgtgtcgttggcgatgtcaatgcgtaccatcttcttgcattcattcagcgcttccttcgtcagaccgaacgcctgaaaaattttgaaaaaattgcggacaagacagaccgtttttgtgcgagccgttttcgcgcgggcccgagtttttgaactaaatgtataacttttttcattgtcaaccaaatccaacaatcttggtgtcattcgaaagcccttcacatgttctattagcttgataaaaagcaaaagattttatggtctgcaaaaaagtaattaagaatttttttaattcgactttttgcattttttttttggcaattgtcgaatcgccaagcaattgcatagatacaattctaaacatggtcagctttcgaatgataccaacattgaattggatttggttgacaatgaaaaaagttattgtccaaaaactcgggctcacgcgaaaaataatcgacaatttggtgatggatgatgatgattgatcctctccatcaaacatacgttttttgtgttgccacgatcgctcaaaagcattgtttccatccggatcagaaagttgtccttcatgaagtccgggttggtcagctcctctttccagtacgggaaggcgttccacactttttcatgcacattcattgaaccctttggcaaaagccggcgcagaagagagggcagcttttttctggaaaacgcgagcgaccaattagcattgattacacatttcatggtaacaatactacagccgggtggtggcccccattttttgaatttggcatccatttttctgccaattccgaccccggacccgaattcgaacaaaaagccgaaagttagaaatttagcattttgattcataaaatcggtttaaaacatggaaacaaaacttaagcgccatcaacatgtaataaacga

SEQ ID NO: 244 - DNA, 814 bp, Heterodera glycines
aaagagatttggaagaagaattatgcaaacttgataggcgattatcccttgaagagtataaaaaaatgcttaaggatcttaggaaccgttagtcaaatatcataatggtaattattatttgaaaatggggctttcggctttttgttagaattcgggtccggtgttgtcgaaattggccgaattgaatgatgccggattcgtgttcagaggcgacacctctaaaaacgctagcgaccaattagcagcagcattcattacatttgattacaatccctcgaaaactcacgaattgaaatggtaaattttgtgcgaaaagtgtccggatgtgaatcggccattgcacagattttggccttcaaacggttcgttgtcgcgcaccacttgaatgcgttcttctacatcgccactctcctctaactaaaaagggaaaatgcacataaaccgccgctccatcaaacattgcttcggtaatagttaaaatttgtccacccccagcccattttgaagaaaaaatttgttttaaaaatctgaaaacacatttccgaagggtttcgggttcattgaacagtaaacactaatccggcactcattccgaccaattctgaatcccggactcgaagtcaaacaaaaagtacggtacttttcggttttgtgcctacgcctcaaaatttttaaaaaggtcaacaaggggcgcgctgaagggactttctaccatttccatagcatagcacaaaaccgaaaagtaccaaaagtacaaaactcgaattttgaatggaaacgaactgagtcgtcagtgcttcaataaaagaatcat

SEQ ID NO: 245 - DNA, 5054 bp, Heterodera glycines
gttcgaattcgggtccggtgttgtcgaaatcggccgaatcgaatcgatgccggattcgtgttcagaggcgacacctctaaaaacgctagcgaccaattagcagcagcattcattacatttgattacaatccctcgaaaactcacgaattgaaatcggtaaattttgtgcgaaaagtgtccggatcgtgaatcggccattgcacagattttggccttcaaacggttcgttgtcgcgcaccacttgaatgcgttcttctacatcgccactctcctctaactaaaaagggaaaatgcacataaaccgccatttccatagcatagcacaaaaccgaaaagtacaaaactcgaattttgaatggaaacgaactgagtcgtcagtgcttcaataaaagaatcatttaagaaaaatttgaattttcgaaattttttgttcgaaatcggacacggcgttcagaactggtcgaaatgagtgccggattcgtgatcagcgatccagaaaaccatgggacgcatgttttcatgacttttgaaaacaaaaaaagattttcgcgccgcaacttcatccaacctgtcgcgctccctcctccaagcaaaacgattgggcaatttgatactcttcagtggtcaacggcataacaatgcgactgaatgaaacacaaaagaatgagtgaaccaattaacaacgtaattaattaatgaggtgtcaacagaataatgacggaaaaacaaaaacaacaactcactattctctggtgagcattgttgctgaagtgcagtccaaaaaaagagggaaaatgaacaatgaatgattgtttctgtccgtaaaccatcccttttatactacacactttgcacgtcgtcattgctcagcagcgacaaaaatgaattgtcatacctagtagggatggcattcggaggccccaaaaaatttgggaaatcggaaaccgaaattccgaggcccaaatacttctcggaagtcggaaatctaaattctgactctaaaaatatcggaaatcgtaagtcggaattccgtgccatccctgatacctaccgtatttactcgcgattagagcccccgggggctctattgttcaacccccctccgaaatggggccatatccgcttttccacctactatgatctgcatacactcagtttgaggatataattttaaagatttacgtttcttaattatgaatgaaataagttaaaaaaattttccggttttcgtttcgtttcgtacgaaaatggttattttttcgttttcgtgcagccctgccacggtgctatgtcgttataaaaaaagccatcaaaaaaggcgctaaaaatatgcatacatttaaaaattcataaaaaatttatagaatagaattcatgcgagcttttcagaatatattaagaaggtgtaattttcccggcgccgcctgcctaaaaattgcgaaataatgcgaaaaatggtaaaataggagcgaaaatttgaaaatcagtgcgttttttcaatgaaattaaaataaaatcgatgaaaataacttattgagaaaattaattacaaaggaattaaatttcattcttttttcgaagcaaaaaaataattggggtttctacagaaaattctttttttttcagttttttgttagtttgtattcttaattattttttcatatctttgatgaacctattcaatgttaagattttaatggttaaaaaattgaatgtcaatctttgtgactagtaattttttcgaattttcaattagttatttttgtcgatggcttatagttttagtaaaacttattgataatagtggaatttttatgaatataatatttttgacagcgcggcgcaaaagtccatttttgctgggcggcgcaaatggagcggcgcaaatatccgcggcgcaagtgtctcatcacgttcagaatatattaagaaggtgtaatacacatgtaaataaaatttgatgcgtttcagagcactttctgaaaaaatatttatgaataattttgcaaaaaataaaataaaataacgaacctcccttaataatttttctgcgcctaacaactaaggtactcacttggccgcttcgcggccccccatgaggaaagggacagaaataaaaccgtaatataaaaatttaatattatgatcaatataattaactgaatgatcttctgtcaaatgactcagctgatgaacatcatggaggactacttcaagtaatccataccaaggacggtatgaaattattttttggtttttttcccattttcaaattcctcccaatgtttttcagtgataaattcattaaaaataccatttaaatttgtaaataatgtttgccatatttaatccttccctttggtgttcaggtggagtcccagttgccggagaagacggagtacgtgatcaaatgtgacatgagtgcgctgcaacgcctcctctacaaacacttgcggaagggacgactgctcattgacagcaaacatgtcagtgaacaattacacgactttttcaatttaattgcattttttcatacaaattttttttcatccttggtgacgggggcgtacatttatgtatttccaattatttaccacctctattgtatttatttgatcgaccacttttgatgttatatatttatttgagtaattaaaacgatttaatttatgttttttgtatatatagtattccacgtaaattacgtcattttgcaataaaaatatccaggcattcgaagatttcgcacttcgcagctaaaattgttctttgaatattgaatggtaattaaaatttaaataatttccagtcgctctttctagaacgtgtacaaatagcgaaagatgctaaatcagcggctttttttcttaagctaatttttcagtatcccttgagttttgcgcctgaatttttgatatttcaaataatctcatgtaaaaaaatggatttaaatcaaaatttaaaaaatggctttttgttggcataaaaaggcagttttgtgggctctagtgcactttatgagtccaatcaattgacaatcccgggtttttatacaataactttttccatgttcgaaaatgatttttcattgaaaatctgttaaatatatagccaaaatttcaaaaaaatttcccggcggcgcctatcggcaccgccggatccttaaaatcctcaattttcttaaaaaacttgctcaatttgcaaaaattggtcatttttgaacagaatctaacaatgtaatgtattaaaattttcaatttttttcccggcggcgcctaccggcaccgccggcctccctcctcctccttggtcaccaaaaagttttttcaagaaatacaccgcaaaaaattttgtaaaattaataaagggagtcaaaaatataaagttaataaatgttttgttcgaattaattataaaaaataatttatttaagcaatttgaaaaaattttctgatttttgactcaaaataagatttttttatttcaaatttctcctttataaatttttccatatatttttaatttaataaattgattgccctttaaatttgtgcattaaaaatatttatgttatataaatcattaaaatttagtaaatttaacaacccttgtgctcaaaaatttctatgttcttgaaaattaaaaaatttttatatggaaacctcttattatttagtcaattcttacggttgtttaaacgtagaattaaacatgtactggttatggacttagaccctgaataccggcttagttgggcccgaaatgacaagagacccatctaatactatttaaatttataaattttaaatcttgaacatactgagccttgtaatgatacaaataatacatatatgtaaggcattttatagaatgaatagtaatcagtttagcaaaataagcatgcttaatcgagtgaatattcattaaaaactttctattcgtaacttgatcaaatttactatgcttttaaattagatggttgcaatttatagacaattaaaaataattttattttttaaatccttaatttagtgcccaaacttccgccccccccccattttactcagaggtgatctttcgctttttctattgataaaaatggtttgttgtttttttttgggaaaaaataaaaaaattcaaaaaaaccgaaaccgaaacggtataccgaaaatttttcttcggttttttaaccgaaaccgttcgaccgagaattttttgagtttagaaaaaaaaagttaaacaggatgaataacttaaattcctgaaaactcagaagattcccatctctttcataaatatgtattttaaaaaaccaatgaaatatcatttttttaagctattatgtgaggatttgggattaataatggagttttaaaatagttttgtacgtgaggacattttcccgactcgcaagtgccgccgactgaacataaaatggacaaaagattaattgaattgtcaaacaaattttgtattattgcttgtaaaaagacaaatgataggcatatgaataaaaaaatattcttttgggatttgcgaatgatttcaaaaatggactaaaaaataacaaaaattgagtgagtaacaaattgaaatggaaaataatcataaaatttgagtaaaaaaaaattgaaggcaagtgaacagaaaaagaagagagattcgtagaatttgttgaacaaattatttgaatgagtaaaaagggcaaatgaaataatatttgaaagcatttaaaaatgagtttgaccagcaatttgctggaatgcaaatgattcattttgtgagaggatttcaaagagatttcgttgcatctgttcactggctgaagaagttggaatcacattctgaaaaaataaagtaggtttttactactggaaaactaaaaaaaaattttttttttttttcactaaaaattgacaattttggacaagtttttttaatttagtggaaattaaaacaataagtccgggaaacttgagaatttttaaagaaattttctaaatcattgccaattgtgttttattttcaaattatttgttgttttttgacctgca

SEQ ID NO: 246 - DNA, 2794 bp, Heterodera glycines
attttgtcactatttcgacattttttggaaaattctttaacaaaaatgcaataaaaccaaaaaatacacccctaagaatcgacctaaaaattttttcaaaaaatacacccctaagaatcgacaaaaaaaatttcaaaaagcactcctaagaaatgaaaaaattttctcaaaaaggtaattttgtggcaagaattttaattttaaaaattattttttttatgtacctattttgtttttttgcccttaaaaatcccagccctactcatttgcaatgcaatcagtgaataaaaattatttttgcttaatttttggctgaaaattatgtcactattcgtcactatttcggactttttgtcactatttcttcactattttggcatttttactcactattttagttaactattttgcctatgttttcgcctttattattttcattttttacacatttttaactgtcatttttcccccaatttaagcgcaattcatttcttttccgttttttctacccaataaaatgcacaccacacgcatcgtgatgtcatcaaacttggacaaaaaccttgagaacattcgtcgaattgaccaattcgccagcaaagtgatcggatattccacccacgcggcactgttcaatttcaggttttacatttacatttttgtaaaaaattttctcatattttttgaatggctccgcactttactaaatgagtggaaaattgcggcacaaatgcaaaacttcaataccggataggaaaaaagaaattgcgctttacttttcttgattgattgttacccctaaaaatttttttatcaatttatcgcaaattttcaaaaattccattgccctcactccatgtttttagcaccgagcagaacaaatggctgaagacggaggtggacggcccgctgttcatctacgaacggcttgaccaaccgctgtactcgttggttgtcgtcaatcgccagtcgccccaaaattttgtggagccaatcacggacgggttgaagttgagctatcacccgccttacatttttgtgcatcgcgaagatggtaagaaaaaacaaatttacagcgaaatcctcaaaattgggtgggagggggttggggcaaaaaaatttcaaacattttggatgagggcatcgggggccaggatttcagcccccccccccccccttcggcgactaactttttttcggcgcattttttattggaacagcgggggccagcggtgttgattaaataccgccgggaaattttaaattgatttttcctcaatttttaacagattttgctggtagccaaaaaaaaaattttttttttttgcgcataatttgaccgtattttcgcacgttttcaggctatattcacagtctctgggtgttcggcgaagacgaatgcaaacgagttagtgcatttcattctcggttcatttatgtgcgaaaaatgggtgaccaacgtgcttttcaatgcccaatctttcatttttccccactcattttcagtccccataaccgggcaaaaaaaaaaaaaaaatttttttttgtaaccctatgattttttctgtaactgcccctcaaatttgtttttgacctttagagagtgtaatttttaaattgttataaaacaagcaaacaaataaaatatggccgttccaggctgtttcattaaaaaaaaaatttttttcaaaaaacccaaacaaatttttttttttttgccaggcgtttgacactctgacgaaattgagcatggcgcagaagatgataagtgccggtgccaccaccagcagccccaaaaataacatctccaacaacaacgacaacggtgccgtcgccgctttcgctgccgcaacgccgccgacgaaaattgtcgctgccgccaaaccgtcaacgccgccaccgtcgcagcagcagcagcagcaggcgatccgtgtcagtagcattactgctaccatccgtggtagccacatcaaatcaaacaaggcccaccacgtcggtggcatgacgaccacctgtaagaatttttcggggcggagggaggggtgtggagtaaagttgtgtactccacacgacggttcaaattttctaaaatcaattcttttaaatttcctagtggtaaattgttgggatgcctccgcttgtcactgtgacctcgaaattactgatggccaatgtttgactgtcctttacagaggtattttgtgtaaatataatttcgtcatatataataatataatgtctttttttcagaaggagcagctggttaccgttccgtcttcgctaaacatccgatttttctgaacaaaaaacacggcattttttactttgaaattttgataaaaagtctgcatgagcgactgcttatgggttttacggctaaaaagaaggggattatatgtgaacgggatgcggttttcatgctgtcttcacgcggcacacaacggcgaaacgaaatcgtttcgcagcatgaaaacagtgctttttatgttggcgattttgtctgttgtggcattaatttggcaaccaaccagtttctgtgcaccaaaaatggcgctatcttgggttattaaatttatttaaaaatttttttaaatttaattatcccaaatttgaatttgaaatgatttcttggtaataattaagatggttgcccctattttttggtggaaatttttaaaatttaaaagtcaatcaaaaaagtttatgggtttccggggtcgctggtcacgattctggcatccatttcgctcaatttcgaacccgaattcgaacaaaaagttgaaacttcaaattt

SEQ ID NO: 247 - DNA, 1664 bp, Heterodera glycines
catatttttaaaaattttacgtttcttgatggaaataaattgtaaatgaacaccgttttcatttttcataattttgttatcttttcatatattctccacagagtgcagtctcacttcgttctctcatcagaagttgaatgtttttctttcactgtgtaaccaaagagacattgttgaggcgaattttgggcccaatttcaaatttgatttaaaaagttttccctggaattgattttttttgtcattgttttatgttatttattattttatttatgttttgtttgttatttttgcttaatcttaaatataagctttaacaaatgcgttttttatcatatttaaaccattagtgtaagtaccttaaagcctgtaacagttcaatatttttccggcaaaagtgaaacacatttaaaccagttgtgatttagcccgttttccggcaaggcaaacacacctaaaccagtaattggttcaattttccggaaaaataaacggtgctgggacgttagtcaaaacccatcaaaatgggcgttagtcaaaaaaccatcaaatgaataatttttgacgaaaattattcataatttcgtctaaaatagatcaaattttataatatagatatttttcgatagccctaagtgttttctattatcctgcaaaattagaaaaaaattctttaagtttaaaaaaagttatgacctgagaatttaaaccagtagtggttccttttttccggtaaaagtaaatacatttaaacccatattgcaccatcaaacaagtaacgaaaattaaaaccccaatgtaaattcatttaaacaagtggtggttcaatccttttctgacaaatgtatttagaccaatactgtttaaaattaaaccacggcgtttaatctatttaccgtaaaaagtaaattaaaccaattgtaaaataaatactttaattgcctattttaaactgctaatctgttacccggctttgcttcaacgtggcaactcatttgaacacttttgtcaattttaaagtgaaaagggcattcacaattggtaatagaggtaaattaatgccttaatatatattccctaattaattaattgctcataaggataatccgattacaagcgaatgggcgaaaatgatggccacgaatggaaatcgaaatggcaaaactcattggcgtgccattaaactgcgcacagtgccattagcaacggcaaatggctcagtttttggcaaccaattatcacacttggcattcgtattggagacatcaattgcttcgcagccgttcgaaataaacaataatttttaatctccattaattaccctgggaaaattaaagtattaaaaaaggtattaattaaattacataatcaaattaagctataattttggaggaaaatcaacgtcaattttatttgatgagaatcgaattgccgagacaataaatggtggcaaattttttaattaccgtatattctctaattaaagccctgtctccattaatcccgctgtctccaattatcccccgggggataaatgggattacatatttttaaaaaatcttttttttaataaaaattaattaattctaaatttaaattcatttaaatgtttaataaacatgaaaaaataatacagaaaaatcatttacttcactcaagtccga

SEQ ID NO: 248 - DNA, 3349 bp, Heterodera glycines
tgacaatccctttgattgtccctcccctccttcacacttctcccgttttctcaccggttcgacgtttcgcaccggcgcattttgttcatgcagctaaacaggggaaattaactttataattgatttgtgaagcatgaaaggaccattcgaagtcggaaactggcatgggcagcacggaatcttttggcgctattggacgacgttttgttaaggggagaggcggaggcatttgaaccgagtgccatcgatcacagaaagagactatccaggaaagtaagtgattttgaagataacaaaagttttgtcgccagacataccaaaaccaatttaattaacacgctttgtcaactatcaatgaaagaaaacatttgcgaagcccgggaggaggaaaagagcgagtgccgcttaacgaatccgacggattgacacagcgagagaaagggggggggggaagggaatccaatgttgtggagaagaggatgatgaataaatggtacaaggggagtgaacccaacacctttacggcggcttaacaacggattagacgacaattagccaacagtgaaagccgatgggagggagggacccctttctgtcgagatattgtcatcatcgagcaaacgtggtttgtttgtgtgtccatcttcccaaatttaaaaaacgattaaaaattaatttgaatttcaattcattttcaaattaattgctctttctttttgtgacaaaagcacaataaataaatagtgtgcaagtggattgtgttatcggttttcgccttgaatatcacatttaaagcacaattttcattcattggccgtcaaacaaaattggcacgacagagagggcacgaggacttggaactggactggaaccacttgtactaaaaggggggagagggccaatacaaaagtcaatgggagaaaaacgcaccaaacaatcgccatggaattttttccgacattggcgacaccgaatttttggcaattggtaatttgtggaggaaacggtggacatgcaaatggtgcactcctccacgccctgcaggtgctggtcgatgctccgcttccattgcaaaatcccgtccatcatcactccgttctgaaaatttcggcattgctttttctccgtcgtatttgactcttgaagactgacttgtccgtttaggaaaacgcccaattgaagaagccatttgcgatgcaattctctgttcactatgctccgccccgtctccacttttggcgctttgatcggataattttcaggcaaaagtattgtcaaagtcattgtcgtctcctccagccgataagtgcattcgatctcacgcactttggacagaattcggacctgaaaataacaaccaatttcaaaatgtccgcttttgatgtgccatttgtcagattgaaaaagcggtgcaaaaagtatcccaaaagtcataagcgttaaataaattagaaaaagtaaatgtgataaatgcctatgacctctaaccgcccacgtttcatattttccaaactgcgcaattcacgttgaataagcaaatgactcaaatatttttgggtgtatcttaaataatttaaaaatgtagatttggttaaaaagggtgtgattactcattgactgtgttcgcttccgttttgctgagagtgccgtgccattcgcgaaacaaagcggggatcgtggccaaagtccggaagaagagattactcgtaaaatgttcacgatcgaaaggacggtccaccaatttataatgaaaagggccagtgaaaaggtcgtcgacattagaaacaacgcaaatggcatccgaagaagcaaaaagaaagtaattaattgccggggagggggggaaacctttatgccccggggggtcggagagagaattaaacaaatgggccaacgcattggaaagggttttgacatcgatggcatcgcaaaagcgaacccgggaaaggacgtccaaatctccaaaaaaacgcatcagaacatcccaggaaagcagcaaagggtcgacttcggattctggagaacatttgaaattggcgtggattgtatgcatacggtacttaccgttcagacgggagtaattggcaaactcaaaagagagaagtgccttgaaaagccgtggcagtgccaactgatgcgactgctcctccaaactcttcccaatgtcctccgcgtccccctcgttggcctcggactccaattcatttccgttcaaacttttcttagcaaatgcgccgcgtttggcgttctccgatgagaacatttcaaacaaaaagctgaattgttcaaatggcgaagcttttatttccctttccatttcttattcgaatggacccctttaaaacggtggcagaagcgaattgaatttcaggcaacgaattgaagaacaaaactgaagtcgggagaagtcgggagcgtctctcatcggaataactagaaaatgtaaggccataacaaaaacaaacgaacagcgaaaaaacccctcgaaattttgcaagaacgaaagttcgtcttcgggacagcaatcggtcgcccgttgcaaaaattcaattggaatttcggctttgatgagacggtcaatgtcaatcgattgggtggcattacatagcgttttggtgaaaaattgtggcggcattttgccaatgttggaaaaatgcaaaaaccaatgaaagacgtaatttgctgcggatggaccaaagaattcagcccattccttaattaagggaacatttcaatttacattaattaatcccaattaatgactctggcgatctctctgtagtcctcgttttgtctgttcattctgacaacgttctcataacgaatgaccaaattcagtgcggaatgacccatcagcagccaatgcatcgcaatttcatcgtcacattctttgattctgtcgttcgaagaaaaaaggttttctgtgcaattctgaaatttgtggaaaaggcaaattcgaacaaattctgaagcaaattgcctggaggacagtgattagagcgcaattgacaaagtctcttatcacagcaccgacttcagcaacgaaaggaacaatttgagcacagaatttcaaaataacgcaacagaataaatttcgaaacaaatcgtccctaaaagaaataaattaattaactgaaaggggggggggagacgcactttcgaacagtgaaaagccaatcttcgactcccttccgatgctgctcaatgaaagtggccaaagcaacgaaatgttcagcgcggttttcctccgttaaatttgcacaacgccattcaaattcggccaaccatcgcaaaacgacgcattcttcggaaggttgcgtcggttcatgcggaagcaaatccaacacaa

SEQ ID NO: 249 - DNA, 3451 bp, Heterodera glycines
ttttgacgagataatcaaacacaaaattcactgtgtccggcattctgaccagcaattgcgcttcgttcggtaaaatgcgcatcaaatgttctctttccgagtcggaacacttttcgcaaatgtatgccaatgccaattccaaaatgcgtttcactcgaccgaattccgattccaatcgctgcaagttgtggaaaatcgtacagaatgcgcagaaaagcgactcgtggccgagcaaatcgcaaaagtcggacagaacgaagtcaacggaatggaggcacatccaaacgttgtccatctttggtgggaaaatgaaaaaggcaattcgttttcaattgccactcactttaattcgctccgcaagggaattgtgtcggttttcggttttcgccagaatttggcacaaaatgttgatcaatcggactgtttcaaagtcaaactcaatcgaatctccgaccatttgaatacgaactgtgacaatggccaaaagatggtcgaatttggacgggtctgttcccgaagaaagaatggcttcagctgatttgacgagcagagaattggaaatggccgaagagtttgggcagacgagcagtttaaggccgaacttcccattttcttgcaaaacgtccaaaagtttggtgagaaaagcgtcgctttttgggagctgaaaaggaaaatgaacaaaacgaaaagcaaagcatttgaagaaaaagcaaatgaccagagacaaaaggtgctgctccaactccgagaacaattcgagcgcaaaagcacttttgccgggggacagtttgagctggagccacgcgacaaagtctgccaattttgcgtattcggacacaggaaaatcactcaaaacaaaatccataaattttgttacctaaaaagaaaacagtcgatgacatggaaaggcggacacaaaacaaacaaacaaaactgttaccctcaagaaaaactgcgtcagaaattccgactcgtcctcatcactttcgcagtcagtgccaaacaaaagtttaacgagagaaaatttgcatatttcgacgaaggcgcaactccaagaagaaatttgaatggttgtaaaagcgctaaaaagaaacgaaactctctgaaaagtttggatgaaagacaaacccatcgaaaaaggaatcggtcactgaaaacgcaaatttcacttgtttttggcgatcggaaggcccaattcggtcaaaaataacggagaaaagtggcaacaaagcattggccaacaattcccagtgactaaaatggacattttgtttttgttttgcttggcttcgcccacccttccttctttcggaccaaagacaacactttgggcacaatcgctttgtccaaggaaaagtgttcgaagagtgcgtcttcctgggccaatctcataaaacattcgaacgcattttggaaaagcgaagagtccgacaaattcaaattgttgaacagaacagacacaaatttgcctctgatgagcaaattgggatcattttgtgcaattttagttgcgagccgataaagggacactttcacctaattaaaggcgttttagggattctttgttaaacatttgtttacgctatttcccaaggccatcaaagggttcagtgactcggaatttgtgaaagtgtcgccgacagtcgccaaaagggacggcaaattcgaagagtgcgcagagagcgaatcgatgcaattgaaagactgggcgatcagtcggtcccttctctgctcgttactttcctcttcagtcaatctgaacgggtcgagcaacgaaatcgacccaaggcaaaacaaagaaacggacagttggggtgataagacaagccgatgcctccgatttgcgacactcagagaaagcgaaagcgcatcgtccgcaaagttggcgaacaccaattcctttttttcggccgcaaaacattcgttaagcaaagaaaaggccgactttacgacttggttggaatggtcagcagtcgaaaacagcagaaaagggagtgtcttaaaggacagacgaaaaaataaaacgacgggggaggggaagcaccaacaaaataagaggaggaaacacccaaaaaacgaaaggcttgtcgattggcttattctgtgccactcactcactcgcctgtttcaggcagttgctgggcgcctccttcttcagtctccaaatgtattgggccaaaagtttgttactcgccgaccgaattgtgctgttcgcatcggtgacgagtctttggtaaattggggcaaagtattcaaagctcaacttcagctggtctaaaggcacattcttcagcagttcagcaaattccttcaccgccttaactgttttcttattaactcaatgccaatcatttttcgtcgattgccttttctcgggtaagagtgtcgcgttttgtcagtttcttcagcaaaatacgaaattcgggtgccaaatcggcacattcattcgctgtcatttcgcccaaatccaacaatcccaaagcggaagtttcaagtccaatgaacggaatgccactcccagtggcttgcaaaagctgagtcgccttcgaactactcgcagcctaaagcatttaatcacatggaaaacagcgaaaagagggaaaggggaaaattaacataaactgattgtgccaagatttgttctcctctacggtaaattttcatttggcgaacctgggaattgtccttccgtctttggtgtttgcccatagtaaagaaatctttggcgcaaaaatgtaacaaaaacgctaaaatactaagaaaatgcaagcatattttatataagattcgataccactgaaaattacagaccaaaaaaaaagaagcaaaattcagaattattctgagatcgaggcgcggagagtgagtggggcttcggttgtgacatttcgccgaaatgtcggataaaaaagggagcagtatggcataccatgtataaaagggaaatacagatttcttttgtagcgaaagtaggccaaatcagtaaatatggtgacatcgacagtacctgaagaggcaaaggtggaagatgagtggtgagaaatcgttgacttctttatgcatcaatttttggggcgggtcttaggggtgtatttctcgtttttattggcatttttgttaaaaagttcatcagaatagggcaccgcattttctctagttatcagcccgggggcatcatttttcgatctcctcagaaaggggaggataattagagacgggggtattatcggcgacggggcgacagttagagaaactatggtaaatattttcttccaaattttctggctctagaaacaaaaatctagagaataggcactactaagtcgaaaagtagcctaacaacatactattccccaaacgaaaaacaaaacaagtgaatcaattacccttacatttacgatttacccaaattctgcgaacctgaaaatgttaaaattaaactatttggcga

SEQ ID NO: 250 - DNA, 1513 bp, Heterodera glycines
  unsure (1)..(1513): unsure at all n locations
ccgaaaagaaaataacaccgctccctttttttaccgctgaaaaaaccctattgtaaatattcacaaaataagcacctgtcctccgtgccctccactttcagtgctgggttcttcccagttgttgagcattcccccaacgaagtgtatcccatgtcgtagagatggcagtacgggatggacatgtccctaaggaacttccaaacttcggtgtaagtccagtccaacaaagggcaaacctttaaaaatggaaagaggagttaacagaaacgtcggttcaaagaaaccgaccctcaagaaactgggccaaccctgatctgtccattcgcatttactcttcatgaagcgccctctcggatctgtcgctctcgatcccatcaaaacagcctcaatgttcggtcgaacgactttcaactcagccaatcctttcttcaaagcgcctttcagctcgagcaaatccaacgagtagctaaacaacgacaaatgagttttttatgtaagctaataatgagtagcaaaagtactttggggaaatattccgaacaaatgcaattaattcgcaaaactcatcgccttctacgaaaaacccttcgattcgcttttctttcccgaattttttagtaacacaaatgcggaaaagatgcaaaagaagcgtgcaatctttgcctccattgaatgaaatcgccaattgatccaaagagctgagggggagggggaggatgtttagattgagatgcactcacccatatttgtccaaaatttcgtcaattgttgcgatggcattgaaaagcttgacagaaaattccttggtttgagtcgcgcaataaatgtccaatttatggacacaatcctcccacggttcgggatcgtaattcaccacccactctttgaatgaattggaaattacttttaatttatctggaaaattacctgaaaattcatttgccaattcttcataagccaaattgcctaattccttcgaaatgctttcaatgcttagacgagttttaaaataactgacggaaaggtaaataaagctgcgacacaaagctttcaagtttacttgttttccatggtcggatacgacccaattgagacgttttgatgtttggcagccaattgcgacagtttttgttgtaaatgaatttcactcttttttaagtataaattgttcgtaaacatttccaaaagtgacgaagggaataggtagtcctaaaattaaaaaatagtattaaaaggcgagaaatttcttgcatctcatttctatctccgagtctgtcttttttatctttagttggcttctttctccatccctcaaagcgaatttacttatttgaaacattacgcgaaaaataaacagcaatttgattatctattancaattcacttttatttggattaaatttggcgttaattcttctgctcgttaccttcaagtgacgaaattttgctcacaaagtgtggaacaccgggcatgcattacatttcgtattgtataaaagaaaatagtcaaatc

SEQ ID NO: 251 - DNA, 2585 bp, Heterodera glycines
  unsure (1)..(2585): unsure at all n locations
ttgagcaaaaatatattgactattcgccgcaaatcttcgctgggcaacaaccgatcgccaaatgcttcagccaatgcctcaaatgttcggtcgtcgtgggtaggcccgactccaccgatggtgaagcttaatcaaaattccatgaaaaacaaaggaatgctgctaacacaatgtcaaattccacgcaaaagtttcgaacttctttggcaacctccgttatgctatcccccaaaatagaaacctgggtaaagaggtattttgacaaataattattatgcttctgcctacctttttaacccaaactcctttctcaaataattgtttgcacaagaattgagaatttgtgtctcgcgtcgtcccttttaaaagttcatctccaatagctgaatttgctcttatgaaaaggcccacattcagaaattattaccaattattcctgcagtgattcttcgttgctctcctcctattgcattgtttttagttccaaaaagtgccataatatcgttatgtgtactaacattaaatgatttaaaaattatccgctctaaattcatacggattggcataatcttaatttgacaaacaaaaatatgtaacagctgaactaaggcgctaatttagaaatgacttttaaatatattttagtaaaatattgaatttgaattaattatagaaaaaaagctttttattttcaaatgaacgtggtgccaaatccccgcttcccccccccctgccttcgcctcctctccaatgcttcgttcttccgtttcactttcttccatgttcgtcctcctcggcattttcggttgtgccatttgtgtcctttttacttctcactgtccaaataggtgctaggacgaaaaaaggaaagaggacacaccatcccaaaaaacgagatgtgtaccaataaatagagagtgcagagaaaaaaacatctctttttttggcgtactatttctttatctctgctaatagagaaaaactgaatttacttcggcacatataactttttttctactcatacaatttacaccaaattttgcatgtcgatagagaaaaaaattctgcatcgaatgttctataagattttacgatttttctatcccatttttgcatgagaccgttatgaaaatttaaaagtcttcgaacttttttacataacgtaaaattgcttagcatttgcatagaaaaatcttctccttatcaagagctttcgaatgataccaagtttgtctaatttggttgcaaaaaagcttcaaaaataattcccaaaaatcgtcattttttaatatttttgacaaaaataaattaaaatattcatgttgcacaacggactcgaacctccaccctttgccctttactatcttacaaaaaaccatttcgccacatatgcaaatcttttttggtacaggagctcgttctgggatggtgtgaggatgaggatttatacatattttttaaaatatgcttactgcagcttttttaaaatttgataattttaaataataattttttataactgtaattattaattagtacataacacgctatttaaatttgtttattttattttaatcattttgaaaattaatttaaaattttaaacagatattttcgcaattttttggtgaaaaacgataagcggcacttgatgaatttgatgagattttttgaactcgccaatttatgcaacttatttaaatttaggttttttttattattattttttgcattttattaaaggtttttttttagcctacgtttaaaaaaagtttggtgttttggtcttttaattctttttttattaatattaattagagaccggcgcaggaccggatcctgcgcaggattttgcaggatcccagtccgcaatcctgcatattttggaaaatacaggatttgcaggatttcaggattaatcctgcgggatcctgtcctgtaaaaaattttgaattccaatctgcaacaggacccgcaaatttgatttttatgcaggattcagcaggatcctgcattgattttttgaaaatttttaaaaatagaatgccaaatattcagaaactttcttttttcaaaaatttttttcttaataaaaatttttcgtttaaaaacttatccttattcgaaaaaagtttttacaattgaattttttatgtgttttgctacctaaaaagcgttaataaaatttttttttactattttcatgcctattttaggatttttctgcctttttaagtgcctatttcgcgatttgtgcctaaaaatcccatccctatacataatggattatggcttttttgcaaagaaatttaaataaaaattattttactttaatttaagctattattatgagccacccaatttgaatacttttttatactttgaaagacttttttattaatacagaattttttgaaatttcctaaaatccgcattccntgcgcaggatccctgcagattttaaatgcaggatttgcaggattaatcctgccggatcctgtcctgtaaaaaattttgaattccaatcctgcaacaggatccgcaaatttgaaatttccggtctctaattatcaatgaaatttttt

SEQ ID NO: 252 - DNA, 2685 bp, Heterodera glycines
aaaaaaacgttattaatttttcatcttcatcattttttagtttaaaaaatatatttgaatacttttttatactttgaaagacttttttattaatacagaattttttgaaatttcctaaaatccgcaatcctgcgcaggatcctgcagattttaaatgcaggattaatcctgccggatcctgtcctgtaaaaaattttgaattccaatcctgcaacaggacccgcaaatttgatttttatgcaggattcagcaggatcctgcattgattttttgaaaatttaaaaaaaaagaatgccaaatattcagaaactttcttttttcaaaaatttttttctaataaaaatttttcgtttaaaaacttatccttattcgaaaaaagtttatacaattgaattttttatgtgttttgctacctaaaaagcgttaataaaaaatttttttttactattttcgtgcctattttaggatttttctgcctttttaagtgcctatttcgcgattttttgtgcctaaaaatcccatccctatacataatggattatgacttttttgcaaagaaatttaaataaaaattattttactttaatttaagctattattatgagccacccaatttggcaaatcggtctttttaaacgcattaaagaagaatcagtcgattgcttggagtgtaagcaaaaaaaacgttattaatttttcatcttcatcattttttggtttaaaaatatatttgaatacttttttatactttgtaagacttttttattaatacagaatgtaaaaaattttaaattccaatcctgcaacaggatccgcaaatttgaaaattccggtctctaatattaatctcctttttaggttatgttatagtttgagctcaaatatctttttgggcaggaattgttgatcatagatttagaaggtcacgtaatttctcgcgcaactcactgtaaatatattatttctaaaaaaatgtcagattcgtgctaattgtaagagccaaaaattacgctagaaaaactgccgttgttccttccccgtcctcctccaaatcgccaggtccatttcgaattcggtgttcccctttttctctgcccgaactcgccgtgtctccctacgcacactctctccacctctttccctcctttttccactgtctctcttcattatcggtatttgtcgccacttttcttcttcccattcatttggccattgacttctgtttttatttttgagttgattctttctttctcccaatgaagatggtacattttgacataagtgatcactcaaagggctttcgttgctcgaccgatttgaggcaatgaagaaattatgctaaaaaaagtgtgccattggccattcactgcgatgatttactttttcttttccgtggcattttctgagacggcgaacgcacaagagcgcattcattgaataaagaaaaaagagaaaaagcgcggccatcgcagacagaagcaaaaaaaagtccattgaatgtatcttcaaattttgatttcgaaatggaaaatttaaatttattgcctgaaaatacccaacgaaaagaacggtggcaaaaagcaaacaaacggtcgcctgagggaagaattaattaatggacacaattaaaacaaattctgagtaacagtgccattgctacacagattgccaagtcaattctgtgccgacttctgctcctttactcccttttgaatgaacggcaatttttgttaggaccgaaaagcaaataaaggccgaaaaagggcagcgcaagaaaagcgatgagaaaaatccaattgtaactgattttatggagagagatcacctgaggggagagaaaagtgatcggaaattggaggaacggaccaggaaaagagaagtgataagctgaagcatcttcagcagggagcaaagaaagcaatcggaaaaagcatgggacaattgagtcgaaagcatcgctaattggcagggggaaaagattaaacgaagtaattaacggacagagggcaaaattgtcaaaaatgtggcggatggaaaagcaaagaatttcgataattcatattcaaaagccaaatattcaaaattatttctaaaacaaatatttgtttttataatattcaaaaagaaaaagttatattttagcgaattttgaagcaattaaaagtcttttcttatcagtgttatcaattaagtgtttgttgttttgctctcattcgtcactttgttcctaattagtgagttaaaatatgtaagtctaataaatgtgaagtaaattaatgttttttaaaatgcctaagtgctcaattatacggcttcccagatcctcggatcatcatgccccacgaatcacttatccgtggattgaaatccgtatgcataaagatcggattcggtgatccgtggatcaacaatccatggattttttcgcggagtatggacataaatttttccaaattaagaagaaaattctcaagaaaatgatattttggaaaattttagggtctttagggataaaaaggccaatttttgttggtttttgggcggttctaataaaggcttttggaaaaatttattatggcatttagaacaaacaatatacaaatatggaccaatcccgagttttcgtggcttttaattatttccaccccagccccggaaaaaaagaatggattttccataaaattt

SEQ ID NO: 253 - DNA, 8076 bp, Heterodera glycines
tatatgcattttctattgccactttttcagttggagatttgagtgtaaatataaaggcataaatttgagagaaacttcattcatcaaattctcacaccacttcatattatctgcactattacatctacctaatttgtaaaactaatttgtattttcaatcttttctaatcctaaaatttcatcgttttgaagcatatacattgtacattcctgtacatacctgtacataatacctccataatctctccctcctccaactcttcgatatttcattactccatcggacggacatgcgcgaactgttgttcaagaccgccaaccaggaacagcacactttcactcttgaggtcgaggagaacgaaacggtgaaatgcaatttccgacggtgcttaaccaattttcccttcttttcccccttcagatcgctcaaatcaagcaaaaaattgaggacagattcggcctcgcgttcgaagcagatgagcaagtgctgttttacaatggaagagagctggacgacgcgctgacggtggacaatctcaacattgaagcgccgaatttcattgtcgtcttcgtgatggtgaggctcacgctgcttttcccattcattccgtcatcaattcaatttgtttctttttcagaatgatttggctggtgctgatgaaggtgagatgttggtgcagcctatgcacatgaacggtcatccggcggcggcgcaagcgggctatgtgaacgaccacgctgcacaccatcaccaccaccatcatcatcaacaccaccagcagcagaatgggatgctcatcgatcacaacgtgtggcagcagattcttgctcccgtacaacaacagattcagctgacggcgcaggattacccggccatccgtcgagtgggaacaacaaaaacatttaaattcaaatttatgattttccctcatttcagctcatggcgctgggctttccgcgaaatttgtgcatcgaaggtggggggggggggggtggacagttggaatttcaattgtttaattttcaaattcccttctttttcagcttacattgtcagcgaccgtaatgaagtgggaaactgaattttgctatttcaattaaatgtctgaatgcctatttttaaggagcttgctgccgagtacattcttgaacggatggcggaggggaacgggccgtgaccgcgttagaagagaaaagaaaatgaggagaggacattgatatatcgaatactgtattatattgtatgtattgtatatatgtatattctatatttcatatgtacatattgtatgtatttacttacgcaacatttaataaaatttaaagaagcgaaatttggtgaaattaagtttccaggcaacaaatttgtttgtctagcaacagggcttccgttttttcaaaataaggacaaacgaggttaaaactaagattttgaccccaaaaataagattttttgaaaaacggcttcttacaattgtagaaacagtaaaaaagggataccaactgaaaaatttcaaaatcagcatttgggggagtgcattttgtaacagattaattctctcttccgtaataggtaagaaactgcatttatgtattgttctcaaaaaatggaattcgaatttctgatctcaaattatgttttgcttcagatttaaaattcatttattttattaagattcttattattgtttttcttatccaatggattggattcattgtaaggcgtttcgaatttaaagcctgctgctttggttttactgctggttcgctccctccccctgtaggtaacaaatgcgttgcagttggtaatcgtggtggttcatattggttcacatcctgtggccacattgtttgtatcaattgcatgaaacagggcatgtttttgtaaattaaatgtccgcttattaatcagttacttaattcgttaattattcaggaggaccatcgcccgggcataaaggctcctgcattatctgtcaaaaaccggcatcaatgtaagtgtaagtaagcaacagcaaatgctttataactcgtgtcagcacaccgtcacagaatggaaatcaaccgctcaatgaagccagaaatcttgacactgttcaagccacaaaaggaagtgttggtggagaatacgcagcgaatcaaatcggcgatggatttgcagaacaaccatcggcaaatgctgattaggaaactgaccgaaaaggtttctacttctagcactgtgtcgcgttgagaacgatgaatcataaaagtgcctttgttttagtacgacagggcagccaaatttgcgagaggagcgcaagcggatattgcgaaacgggacaaacgggagaaggcgttgctggcggagagggaccaactgaagatggagttggacacggccaacgaccaaatccaacgattggaacaaatgtattccgaatttacgtaataaacatggggaaaaaaacaacattttcaggctgaaagaacgtgagaatgaaattctacgcctacggaagagtccgaatcgacgccacagcccacagcacaggaaaagtgagacgaacgggcaattttaagatctaatgagcgaccaatttcaactgttttagggaatatctacccgagtttgaacggcaacactcccatcacttcgttgtcctttctcgggtgcggtgcgatgagtacgcccaacgacgaagtatcatagaaagaacataaacaaataattgatataagcgaaaagtggattaggagagcactatgaacctctattttggccatgttgagtgtgaacgccaaaaacggcaaatttgttgggaaatcaaaactcatgttttagtatacagaggaattgggcatattattcgccattattatacaaattgatgattccatgcgtttagcccggcggcatgaacttcaacatggccacagcaacaccggcgaattttggcattcgaaacgaaaacaatgacgcggagcagaacatcgaagcgttgttccggacgcaaaatgtgcaggaggagacgccacttgcgggtcccgcgttctgtcctacgacgccttaccttttcgcaatggcgggaggcaacagcgaaaagtgagggacaaaagaaaaaagcaatttcagacaaatcaaacaaatttaggcgcacgggagtaacgccgaagtacttctgaactggtcgaatgtaataagtatattgtgcttcttttgttcgatatttgtgaaattcattcatattcaccggcgttgtataacatatacacatttggtatattaataaaatagcatatcttttgcctctatttatcttttcaacattcctattttttaattaaaatttttagtcgaaaatatctacaaaataggaacaaaaaaagagaaaataggaccaaagtctctaatttagagctgtaattatcaggaaagaatcgaccttattaaatttttcaccaaaaatgaatattttctctagtttttgactccaaaaattttattattttttgaaagtcaattttttttaaagggctaccgtatttctattccttttttaccaattaaaatcagacttgttcttgacaatatttggtattttaaggctacaccctaatttgggcttctctgtctattcgccctattttttctgctggaacgggaaaacgcgggattcccaacgggatttccttgcttcagttttaaggccattttgtatttgaaagtctaagggcaattggaattggaaataagaggcaaataactttcgaaattgaaaaaaagaattctcgacatcttagattaagctaaaacataaattaggattttaagtcacaccgttaggtacactgtgtaacattagaatagggacaccctattttttgggagtttgaccacttcccatgagccgatcgagttgaaattttaattgtacgtagcaattctgaaaatatcaagattatgaaagtgagaaaccgaaatgacgacggaaaaatatttaacgaattttttttccaaattggggtaagcattagaatagggacactttggaaaactaagaaaaatctcaacaactactaaaaagaaactaataaaacaagctaaataagaaagaacaaatcttttttcacatttctgtttattttgcgtacagaaatatgtcttttggggagagttatgttgaattttctaagttttcaggagaaattaagggccaaaaggcttaaatcgcctctaacatttgcccaaccgaatcaaactaacagcaatcattctgttttatgattaatagggctgtgaatttaatttgatcagtcactctcaggatggatgataagtgatcgatgtgtggtgctctgatcagaaaaaaacaaataatcaatgtgttttggtcagtaatcgggatcgaaagaaatcctgatcaatctgatcagagatgaacattgctcttgggaaggggtaacttgaaccttcagaggcgcaaccgaaatgagattattacagatcggaaatgatttggaattggtcaatattgattatggattacagatcagcggaagaataaatcgacataacaaaatccaaccggaaaaatctctaaattttgtggcattggggttaacggcacacattcgatgatcgcctccaattgttccatgccctgaaaattgtcagaaactcaaaaaccggcaaaatgccattgttccccaatgccaccttttgttccctgtcgattgccttcctcaaaatcagctgtttgctaaacgtatttaggcgcacaaactcgcggcccttcacaatgttcaacttcattgtcggcttcggcccgccactgcgcccaatgataggcaaagtgcccaaaatggcacctgcacaaaagtggggaaagaatgccattggatttgaccaaattggctaaacaaaaatttaaaacttttttggatgtacggaaaaacggattgaaactaaccattgggaaattgacattgcaaggccatcaaaaatttctgaaatcgcatttcaaattttttcgaggcccattatgggcgaaatttctgaaaatttgagaaaaaatgcaattttttttgtcttcatttcgaacattttgaagacaaacaaaaaacataaatattaaaaagcattgaaattcgaatcgaatggacttggagaaatctttcttggcattctccaccattgacatgtaaatggcacttcgatcgcgctcgagcagacaaacgggctgagcagcatgttcatcgtcttgatgaccaaaattgtggcgacagacccgattgatcaattccatccgctgtttttgcttcttgggaatgtgatcggcgccatttgagcgccagggactcatccgacgacgcactaatttgcccaaatgaagacgaaacgaaaattggtgttttgtttttgccaaatttttggcattaattttttattttcttgcattcgcactccatgggaaatcaaatttcatccttggatctactttatttaattccgtcttgttgtctgtagtttttcttgcataaattgtagagtcatcgttttgtttggtcgtcttattagaatttgtttaattaaaattattcaaaggccctagctacatacttcgggaacctatttcgtatgtatatattatggccaaaataaatcgtttaggtttacaaagttactatgctaagcgaataaacaaaactcaaacattaaaaaaaagttgaaaggaacaatattcactttaggtatttacaattcaatgaatccttttgacaggtgaaagcgatagcttccaaaataaagaatattggccaaaaattaattatactctgaaattgtatgctggggaaggaaaagcccattgaagcagaatggccacgaacttttacctacccaaatagcatttaatgtttaattattttacttatttcttttttttttgcgcagcactttgtcattatttattgtgtgccactttttcgtcggctttagttttaaaaaatggagcagggcggttttgaggtaaattcactcagggtatttgatgggcggggagttctgctgatttctttgccctttaactttgtgaatggcattcccatgacccattggcatgcatttattgaacaaagagtggcaaatcccttcccatacggcaaggcggggtcattcattttcatcccaaacactccaaaatggggaaaaatctgaaaaaaattcctgttgaattgctttttgaaactacaaaaagtcttcgatttgacatccgctgggccactgttcgggtgtccgcctcatttgaccactgtgttattaagtgccaatcagattggctcttaaaggaaattgggcgtctaatgattttgcatcgaaaagtagtaacggctggagggaacatatccaattctaattaatgacaattacaggctttccaatttattaaggttgagttcgtggcggaagagaaagcgcgtctgttccaagtcgtttctcagctgaacagcgaacgccgttctattgtccatcgtgccattgcgtcccattttgcggttgacgaacagtatggggcgaaactggtcaaagacggtgccactgaccaccagcaattttgcgagaagattaatgctatgattggcaatttggttgatcccaccgacgcagcaaaagttgcagtcgcaggagactgtatgttggcgagcacagaaaattttgaactttttatagcatagcaatccctcaagaaatcacaaaagtgacactttcttattttggttttcgagctcatcaattaaaatctgacgtccattttgtttgaggattggtttcatcaattttaacagtactaattactacatttatcactcagttttgcaccaacaagtccagtgtgcgtacggatctctagcggatatgaatcagatctcgaacctgaaggcgcacatttctgaacttcgtgctcagaacttgacccaacaggcgcaaattggtgcacagcaggttcagattgatggccttcatgcccaagttggtaatcagcagaatcgccttcaggctcaagttgttgctcaacagaatctgatcggtggccagcacaatcagatcggtgctcagcagaatctgatcggtggtcagcacaaacagatcggtggccttcatgttcaagttgctgctcagcagaatatgatcggtggccttcatgctcaagttgctgatcagcagaatcgtatcggtggccttcatgctcaagttgctgatcagcagaatctgatcggtggccagcacaatcagatcggtgacctgcaggctcgaaatactgctcttctggctcaggtttctgatcatctgtcactttttgatacccctgctcagaattcttccctgaggaagaggaagttggtttcggacgttgaaaagctgccgagtcagacgtcgagtggaccatcgaaattggccatcggagtttcggagacgaccgtcggaccttcgacgtcgatcgttggagcttcggagacgaccgttgaaccttcgaagtcggccgatgatttgtcgcagacgggcgaatcattgccgtctaaggattgagtgtcgatgaatgtggctcgtcaagatgaaaatgatctgacggttgaaaaacgaatcttatttttgccggcatttatttaaagttgttgattgttgacatcgttaaacttatcgcatcagcaaaaaaatgtttgggtttggtgccgatttttggtcggagtgataaaattgcaactggacaacccaaatactgaaatacaaatatttcaaggttaatcaccggaagattcgctttttgctctattgcagttcacacgaccataagaaaaaggcgaccataaatttttttttttttgcaactttaatgcaacaactttttcaagaagaacccaaatcaaacattcttagtatcattcgatagccctaagaatactcttagcctacaaaatttcaaaaaaattcgttgagtttcaaaaaatttatggccaaaattgtttagaaaatcagcttttttgaatttcttgccataaattttttgaaacccaatgaaattttttgaaataatc

SEQ ID NO: 254 - DNA, 5007 bp, Heterodera glycines
ccaatttggtatggagcggccgttccccccctcctgtcgtttcccatccaaaaaaatttataattttttaaaatttttcgatttcagcgatttttagaaacattttgaaaaattcggggtttggggaacgacgagaggaataaagtgcaaaagtttttatggggcttaaaaggggacgctgaagggatctgggcaccaatgctcaatattgggtattccaaagtgccgagaaccccacccattcatttttatcttaaataagggctccgatttgtcactccaatcgcctgaaaaagcactcacaaatttgccatgcgccttttgcccagccaaaggctaagagtggcacaatttgtcagcagcaacagaaagcagaggaggccaaggcaaagtgccgtatcggggggcgtcaacgacggcggccaaactgtgccgagcgatggcggtggcacacccgaacgcgtcgatcggcggacaatgcacagcgcaaagtctcgacctccggctgaattctcggctaatgccaccaattcggtggccggcgggaggcgaaaaagttcggcggactttgtggggagaaggcgcagcacaccatcaatgggatggatgtggaacaaactgctgattgggggaaggaaaatggcaaattgtcatcataaatgttgtggtaaataaacgcatggcgtgccaaaaaaagccggagacttggcaagtgcccaatttaccgtacttactgaaatagaacccctccctgaattatagccccccccccctccctttgagaaggggtgaaaataccagtaagtacggtagaataatttctgtagttttttgtggtgtgccgtaaatgccatattggctattaattaaagaagcgaaacatgagcaccgaaattgtactggaatgtctctatggatttaaagaataaattaaaatctttataaacaaaaataattttgaaaatcggtgcccaatttccgggattatttagctaatttgtaaaaagcgcactcatttccgcttaacaacgcataagtgatcagctgatccgcttcttctcgtgccgtgccatttccccgtgtccccgcgttttttgctttgatccgtccaatctcaaccgattgttctcgtccattctctcccaccgttggcagttcaaatccgtaaaattgcttttcaaatgcgaaattttgtcctctgatcggatcaaaaactgtcagacggatatccagtgatcggatggtcggaggccgttttgggcatgtcaatttgatagaaatatttgctaaaaagttggaaaacattgattgctctgatcattaaaaccatcgagcaaacgcaatacatctgtttaatctttttgtctatcctaatttaggctttgctttttatgagatttgtcaacaggtgtggcttattctgatcatgttttgtcctcacagcaggtaaatgaaatcactcacttactgaccattcgccagagcgatcagatatcaatatcattttagtgatcattaaaaaataatcatccaaaagctaaggcttaagactaatcagtgaccaaagtttagagtatgaacaggtcaatctagtgaacgaatttagatttaaaacataactttcagcaagaaatgcttgattaaattatggacatgatcggtcctctgctgagcataacttttgaacccaatttcactgatttgatcaaataaaataaactctaaacgatcgttaacgaatgactcaccggcgtattggccaattgccatccgtttggccaatctcagccatttcgtcctctgatcgatgaaaaaaggcaatttgttccgcttctgctgctgcccgttcggcatcactatttccaatgccattgcttctcctctctccgctgattccgtgccgcatttttcgtcgtccaccaatcgcattaatttggtgccaatggccgtgttttgcgacaactgatcgacggaataattttattggaatttatatcaatgcttcatccatgtaaattccataaaaacccaccctcaaaatgatcagttcgctgcttttgccctccccttttgcttcttcgtccccctccgtcggaggttggaccagcaaaaaggcggtggaattgcgctccgatcggtttgcttgtcgcgcctattttcaaatttcaaagtgatcatctctgattttttggaatcggaatttatgatcctgagaatattttaacagaaattttgttgagcagggcattttctgccgacattttggctttcacctgtacgatcagattcgccggcaccagcttttcggccagcagtttgacctcaccggtagctgatcaattgcgtagttcaccgcgtgttcttaattacaacaatatgtggactaattgatcgctctgatcaaggatcagttttttgttttcgcgtttcttccaacctccggaaagtgagtaaatgattggctcatcaaatgagcggtcggcatcccacgctctgatcggtgacggctcaatggccaagctgaagccctgaaagattggcattatgccaattttttgggattgttggcattgtgcaacaattttgaaacaggtcatttaatcctctcccaattttactctgtgttcactgcttttgtacatctgtgcctcgaaggtcgggttcagatcgtccacgtcgatcactgtcacgtccaatcgtgcgaaagtgcgcagtttgggtgtgccctggtcctccgcctcgataaacaccgtaaaatttggcattttttcaaaatcgatccgtccggcaacaaaaagttcgggtcgcaacgggtccgggatgtgcagaagcaaagcggcacagtcgtcatcagaatcggtgtaaaacacttcaaacggatgccgatcatcggaggagccttggccggaaaccttttggtgttgacaaatgcattgaaaagccgccaatttttagaaattctgagccgaggctatcaaaaaattttcttggggcaggtcaaagtccacaggccacttttcctcaacctgggtttttcctgggtgggattttccttggtttttgttcaggaaacccaggtccaggctttcaaaatatcgaactctagaaattatagtgaaaactgctgataattcccctcgcaaaagtgtttttgtcagggtttctacggtaaaagtaaatggttccaccaccgtaccatgcgccagctaccctaccgtatgctcctcatctgattgcgaacattccctcgcctgctgcttttgctcctctgctgctgctgtttctgctgctgctggcggtgatgagcgcacaattcggtaacgaatgcgactatttgaccccggttggtccgcgtcggtggcccggaagtccaatcggatcggcgtgccctcgggcaactcttcggcgatttgcacggcgaagcggcgggcgctgaattggggcgcgttgtcgttcagatcagtgacggtgatgaagacgctgatgttcagctgaatttgaagggaaaatttgatcagtcactctcaggatggatgataagtgatcaatgtgtggtgctctgatcagaaaaaaacaaataatcggaaatgatttggaattggtcaatattgattatggattacagatcagcgcaagaataaatcgacataacaaaatccaaccggaaaaatctctaaattttgtggcactggggttaacggcacacattcgatgatcgcctccaatgatcaaaatttgcattttctctggcggaaccactaaaaaatgactcaaaaaccgcgaaaaaattatataaatttttggataaaaatagtgtgccaaattttgatatttctaatattgaaaattttggaaggggttattctggttcgaattttgcatgtttctcaagttacagtcatttgggtcgtttttcattctgagtccaagtagaagtaaaaagcggggaaaccgcccatttttgaaggaaattaattatgtttaagcaattgtccgcgtccgacaattcgccgaaagcttccgcttctgttcagggctctgttcagggtcaaaagagtcgcggagaggagggacgaaaagacgagacgaaactttaccaggcacttcgtctttttatggaatttcctttcataattattttctatttcaggcagcgaacacaaaacgaagaagaacaagaaatagagaaaaagactctacgctggcattaactacgctaacaaataaataggcctatacatacatttatgttcacttttggacattttggtcttatttatgtttcattaatttatacattttttttgttttattttttgattttgccaaatgaagaataaagtagagttgagcggtactcggtaattttttccaattttgcgaaggggtctccggccatgtaaattaatgtaaatcaatgaccttttttgctttcaacaccgcttttttcgcggcacgtttttctcaagacttttggggaacaaggagggccggcggtgccgataggcgccgccgtgaaaaattttgtattttttaatgcgatttgttaacagaatttgtaaaaaaagaccaattgattaatttttgggtttttaggatgcttaaaatgaaagaaaaaaagttggaatattttttttaattaaaatttcaattaaaataatggtaaagaaaatatgaagaatattctatcccagtggggaattgaacccaagccgagaaataataaaatcagaaggtttagccacttgaccacttatgcatatgaacaaatgctttaaatgaaaataaataatttaatttttttttctcaaaaaatttctccttcttcaccattccctactcttttctcacccagacccccattcttaccagtgcaaatttttaccggcggtaccggtactagacaaaccggtaccgatactttgatttttgaaaaaaccggtaccggtaccggtaccaaataaccggtaattaccggtcggtaccggtaccgctcaaccctaattt

SEQ ID NO: 255 - DNA, 1385 bp, Heterodera glycines
tgaggacgactggggaacggctccaaaataaaggcccgtctaaaaaggggatttttgaaaagataaaaaaagaaataaacaaaccgtttcaattaactcgcgaagtgcttgcaccatacgctgagttgacggaaaaagttcggcattgagtgtttgaaggccagtccacgcaagagtttcaataacacttgggtaaagttcgcggagacggatgagcaacgcatttgaaccctaaatcgcgtgtttgaaatcacttccaattcggctgttgttgcttttccaacacttactgatccgtcgatagacgcataagcgtcctcctgaattttttatgtttagaaaaatagtaaatttagggaacggtcaaattcatgcctctttaaccagttcctgtaatgcggcaacaaaggcattgcaatttttgtccgtttttgccagggcggtaaatgtgcgccaagggatttcttccttgcagagtttgtgcagatcgattaactcgtaacggcgctgaaaaaagtaaaatggcaataagggtcaattcccattttttgcattgtgtaacatactaatttaaatatatttttccatctttcgatatggggcctcaaaaattccatgagtagccaggaagaagtcagaattctcgaacaattttggttaggatatatgtaaaaagtcatttcgtccaaaagttcaggcggcaaatatttcatattattatttgttgtggtaggaatttgggcaatttttcgtgtttcggtgaggggacaattttaatgggactgactttagaatgggttcgcaaactttaaaatatgtaggtaatctttttcaggtactcatgcactttgtatccacatttttttttttcgcatttttcaatttttttttacttttttattgtcacaattgctttaaatatcaaataaaggagatttatgtgcttattggatacaattccgcgatttgggtccacaaattaaaaaaaatgtccggtcctccaaattgcctacgccacaaaaaatcggaaatgtatgtggaaaaaagtgatctttgcgtgccaaatctcgttttgtgttgctgcttgaacttctgccacgtcgattcaattgtattcgtatgttgaccagagacaggatccttgaaattctccgagtgaaaaaattgaaaaatgcgaaaaaaaaaatgtggatacaaagtgcatgagtaccctttttcatttttgggtattttaaagagacataatgccaaaagattagcaatgaaaattgctcaagtggttttttaaaatttaaattcaacttacttggtcggctgacatgaatggagttaggtatttggataaaaaatgatttatgactcttaaaatcgttttgttagttaaa

SEQ ID NO: 256 - DNA, 5387 bp, Heterodera glycines
  unsure (1)..(5387): unsure at all n locations
gaatttgggctaaaatttgaaaattcatatctgncntaaggttgaccaattttgataanntaagncattaaaaatggagaaaaatcaggagaatttnatgggatttatttgggttttctaacataaatatgaaaaaaattattccagaaattctggaaaaattcggattttcagaaaaaaatttataactcgcttctgaaaagatattcaggaaaagtaaaatgctacaaaaatccgcaatttttagctctattttataaattttatttcacatttttatcacttttttgaaaaatgttataaaaataaaagtgattttgggattccagaccaaaggggggtgaccaggatttttgagtgaaaaatttttttaaccaaaaatctttcaaaaacatgtcattagggctattttatgacgctgatcacgaatacgtgatcagattttacttttaacatcgataagacctcagaatccctgtgtgattggggattctgaggcatcattttgagggcggagggggcaggttcggatccggacggtgtaaattattttcgttatatttatggttatttttaatgtttttaattcatttagaagagtgtttttttcttaataaaaataaaattttttaatttaaattaaattgtttttttgtgaaaaatgttttaaattaaaataataatttatttacttttattaaagaactctgtattttttaaattagaatttgtaaaattaatttcaatttaaataaatattcaatccttgtacatttcaaactttctttttaattaataaaaggaataatttattttattttttaaaatttattaattacattcaatattaaatcttactttttaataaacgatttccttaattatttaattttaaaaccatgattgtaccctttttaaccattattgtaccattccaacaattattgtaccttttcgacagtggttgtacctcatctaatcactgttgtacctcttctaatcactgttttacctcttctaatcacttttgttcaaattttaatcactgttgcacctcttctaatcactattgtacctcttccaacaccttttccaacaaatcaccaaatttaaaaaacgggcgcgaagcgcctgtacaaccagaacaaaatttgaaaaacgggcgcgaagcgcccgtcgagcccaacaaaatttaaaaaacgggcgcgaataattttaaaaattttttaaaataatttaaacgttttttttgttaataataaaaaatttatttatgttttaaattaatttttttgtgttgaaataaaaaaaaacaagaaaattcattagatttatttttaagcaaaattagatttaaaaaacactgttgtaccacttcccgtggttgtacctctttccccgtggttgtacctcttctaatcacaattgtacctcttcaaatccctgttgtacctcttctaatcacttttgtacctcttctaacaattttgtacctcttcaaatccctgttgtgcctttcccttccgtggttgcacctcttttaatcactgttgtacctcttctaatcattgttgtacctcttctaatcattgttgtacctcttctaatcactgttttacctcttctaatcactattgttcaaattttaatcactgttgtacctcttctaatcactattgtacctcttccaacaccttttccaacaaatcaccaaatttaaaaaacgggcgcgaagcgcctgtacaaccacaacaaaatttgaaaaacgggcgcgaagcgcccgtccaaggccaataaaatttgagaaaccggcgctaagcgcccgccctatgccgacaaaaactacaaacggacgggaagcgcccgtatgtaatttttattatttttaattttattatatatttttttaattcagctttacagtaatgccgaaacaagtgtcgaaatgttgctggcaattaacagatgcatggaattattaagaccagagttggcatttgccatttttagtggtcaaatttttatcaatatttttattagacgattagaataattaattaataataaagaatatttttaaggcaataaattacggtatttatttgcgctgccaatttgttatggctttgcaatggccatgttcacaaaacccgttctgtttagtggtgtttatttgtcgtggttttataacccatatgttggctatacggacgattttggagaaattgtaagaaaaattaattatgtaattaataaattttaacaattacagtactccaacacgatagcttctgcacataattacatcgttattattggtctatccagcatttatttgttgtttcctgtaattctttgttggcaaacctacacaatgtcatcaggcggccaccaaacacatcagtcatcttgggcagaaaaaatggcaataaacaaatatattttaatgactataatgaggttttttgtttaagcaaaaatgcaaaatttttgaaaaagctaattatcttttcaatcatttattataaatattcagatttttatccaagtgattatcataagtttgttcaattcaattgcctccgtaatttacatctcaatgcaatttgtcagaatcagcaaaatttacatcatcgttggcacttacgcatgggttttttcgagtggttagcatatttatttttaaaaataaaaataatttttgcaaaaggttgccctcccgtggtgtatttgctgctgaacaaacgaattcggaatgattgtgccaacttttgccgtgccattttacgttttttgcgcaatgacaataattcggtgtcaaacggaccaattgccatggcatggatggcaccaaattatgtcagaaacaatgccaacaacagaaacaataacaacaataatgtgcaacagcaatgctgactttttaccgattaaaaaatcaccaatttttgtgttactgtatatttttagtgtatattttttttgatgccatctttttacgtccttttattccttggaaataaattttgagtcacttttttggtggaaaattagaattatgtttgcttggaactcgttgttcccggtttttgggcaaaatgccgagactgggaattatcaaaaaacggaaatgcaggttaaaatcaaattgtacggatgtgagggattcaatgcggacaaaattccacttgaacaacggacaagctgatcggcaaccgccggaaccaatgttcccaaaaagttttttgaaaaaagcataccgcaaaaaagtgcacatgcggtgaaatgaggaaactgatgaacagaaacaaaataataatgaaaaaatactacaatcatttttcattgcatattataatttttttgtatccttgaatttaatgaaactttcacgttacgtccttgtaaattattatacccgtccttggaaagtccttaaccctaagttgaggcaaggttaatgaatttaaatttccccatggcgcccaatcggcggcgcccaatcgtaccggcgcccaaacggcggcgcccaatcggcgtcgcccaatcggcggcgcccaactgacccggtccgcggcagtgccgataggcgccgccgggaaaatttttggaattttaaattaaatgaccaaatgttggttgccttttgaagttttgaggggtcggcggtgccgacaggcgctgccgggaaaaatttcaaaatttaaatgtaatttgttaaaaaaatttgtcaaaaatgaccaaaatttgggatttttaacacattttttaagaaattggagttttggggggctgtcggtgccagcaggcgccgccgggaaactttttttggaatttttaatgaatcttgttacaacatatcgccctttttatacttttatcagagacctcaaaattcaggacaaatctgaaaaatcaggacacttgggagccctggctataactgattggtgagggaaaagggaaaaatgaagaaaagaaaaggggcagagggataaatgaatagggatgcgacttttagtgacgaaaaatcccaaaatagtaaaatagtgaaatgccaaaatagtgacaaaaagtccgaaatagtgacgaatagtgacataattttcagccaaaaattgagcaaaaataatttttattcactgattgcagttgcaaatgagtaggactgggatttttaagacaaaaaaaccaaatagttacctaaaaaaatttttaaaattaaatttttttgccaagaaagtaaatttttgagaaaattttttttcattgcataggagtatattttgaaaaattttagcttgattcttaggggtgtattttttgaaatttttttaggtagattcttaagggtgtataaaatgaatgcatcattactaaaaatgaggtgacaaatttaatggatgtaacggaacgaccgctcggcgtagaatgttgagaataaacggagaaaatcgatgcaccaagaaaatggcaaaagatgcagaaactacaattaatgtatatatatatatatatgaaaaaaatagatttttctacgacaaaaaaatgtttaaattttttgaaaatccaaaaaaaaatgccaaatttagcagattttcaagaattttatcggttttcaaacaattcagagaatttttcagccctggtacatccctgctgtcccatgatgaaagttcatccaacagactttgttgcctcatcccgaccaatttaatcatggaaattttcaaaaaaaaatttttttttttttgttttccggtgccagtataatgcacaacattcttgagctatttaatttttttttgtaaataaatcagggtatgaatttgtccttgtgtgccattggggaaaaaaagaaagaaaatattccataataaaaaacaattttatttaaaaaattacaaggaaataaataagggacagttaagcaaatgttggaaaaaatctaaaaatgtacaccttatgagaattggattttcgtgtgagaaaaaaaaagaagttcttatcataagtttgttccacacaattaccgccgtaatttatgtctcaatgcaatttgtcagaatcagtaaaatttacatcatcgttggcacttatgcatgggtttttgccaatggtttgtaggatttcttttaaaaaataattgaaaacttatttatttgtttttatttaaacagattcatattctttaaggttgtcatggtgtatttgttgctgaacaaacgaattcgaaatgattgtgccaactttggccgtgccattttccgttttttgcgcaatgacaataatccggtgtccaattggccaattgccatggcatggatgaaccaaattatgccgaaaacaatgccaacaacagaaacaataacaatgtgccacagcaa

SEQ ID NO: 257 - DNA, 8864 bp, Heterodera glycines
agcacaatacgatgatggtcatgctagacatcgtgaaacagcgtcggagggcacggaggacgagtacgaccacgttccgaaggaaagtccaattgctgaatcggtcgacacggatccatgcttcattcttttgaacgataggcacgatagccgcgatttcagctccgttttggatgtcatcattggcaggcttaacttccatggtgatgggccaacgatcttcgggatggatgagccaacttgggccgctccaccagagtggatgggaggtgagttcaatcacagtgcatccgcgtgaggcgacatcggctggattttgctctgtcgatatgtagaggaagcgaacgaggtcaacggcacggatttcttttagccgattctccacaaaacgaggttgctgctcagaagatgacacctaaccaaggactggtttggagtcacaccaaatgaatttgtggcgaatggcaagtccgagctgtttttcggcaaattgaagcatccgaatgccaatcagcattcccatgagctccatgcgcggaagtgagatttgatccctttggtttcattcggctcttggcaaaaatgagatgggccgtgattgcgtccccatgttgtgcccgaatgagatgcatgctccgtaggcatctttgcttgcgtcgacaaaggcatgtagctgatgcgaggccgcttccaacgggatgactcggcgcgggacacggaccttttgctggttccaagttgcggcaattgtgttccatttttgaactatgtcagtcggaagaggaacatcccagtcgagcttggtttcccaaagtgattggaaaaacattttggcatcgtgaagtgccgggcacactagtccgagagggtcaaaaacagaggcgagctgttgtagaacagttcgacaagtaacgcagcgactttcggtgtccatggacggaaagtcgatgtacagtttgtccggtttcaactcccagtgaaggcggagcactttaggcacttctttctcgagttgatcttccttcggaattcggcccatgacttcgtctgagttacagatgaattcgcgaatgttcatttgacaggcgcggaacatagtcttgctgctcatgtacttgttcagcgcttctgagatggcacccttgaccatcggtagatgaccacgttatccggcaacggtggtttacggacgtcgttaacccagagcattttgcagaattttcggtcgcgttccagcaggctgagtgaattgaaggccttttccaagtcacgccatagcgcaatcccagccaggcgaaagcgcatgagaattccagcgagttctggcataattacgggccctctgaacatgcatttgttgagagagttttgcccttttggatgaatgttgaagacggttgagaattgaagacaatcggcgatgggccatggcaaaatttgaaggcaggtccggcggaaaattcttccatggccatcccacgctgtatcttccgttggccaggcgcgtagttgtctggtcgaagatttgttgggccgtctcatcatcattttcgagggggtcatctctgatgccaatgttttgaaggtcccagaattgccgtagcgagtcaagatcagagatggattcgtttctctgagtcccactgacagctgaattggtcatcttgtcttcattggcagaaacatggacggtgacgggcatgacggacagtggatgatcggcagttggacgagacggaatttcatcgcgcccgcagattcagtggaaccgattgaagtttgaacgttgaacagttgcggagacactctttggacgccgttaaaaaacttccagaagtctgccattccaacgagaatgtccggttcctcgtccacaggtactaacattccctggaggaatgtggcacggcgcactgatggcacgatccagtccgttcgatgggcaaccaacgtctcgtagccaccgtcctctcgttggacgcacaacacgtgttgtggcgctttcatctggatgggctgccgagtgtcgataggattcacctcgagctcatcgtcttgcagtttcggaaggctcagttgccgtatgagggacgaatggagagacaattgccatgattgtagtgacaattgtcggctcagaaattgggtcagcatcattggcaacagcggatgacaccaatgacctcgagttgcgctcagttccgaaagtctgtttgttcctgggcgagcgctttgattgctttggacgagcagaagatgtccctttggcactagggcagattgccgaatgatgccgttctttacacgtgcggcatactaacattgatcggcactctctcagctgatgtcctttccgtaggcagataaggcatcggttctgctgcaaaaggcatctttttcgagtctctgcatctgtcactttgttgcactccgagtcgcaatgctggccagggcagaacagacaggaaggaactcgcttgtcatcagaatttctgactgactgagcaacggaaaaaactcgcgcattttcatgccgttctggtcgctgaggtcgatttggccttgcttcgtgccgaaatcgtgtttgtctgtcggcatttgttccgcgcagacaccgttcaacctcttctctgactccgagaacttcggcgagtccagctctgagctgaggagtaccccatgggatgcctgccgcacgttccatttgacgagttccagtggacggcagtttgctgtggatgatttggtacatgaatgggctgtcatccggcatgttgaggttcgaaagttggcggcacacacgttccaaagtctcgagaagtgttgcagtgatccaacgctatcgtcaccgaccgaagattgatcagttcggactgagtgcctcggcaattttccgtggatccccgaagagtcgcctcagtgcggcgatggcatggacgtaattttcttctccacggtaggctgtaacggcgcgagcagcctcaccacgtaagcacccgtggaggtaattgtttgtcgacgggctcgagggtggcacgatcgacagcactctcaaaactttgccaaaaggaaggccattccatcggttcgcccgaaaaaatgggaagactaagctgcggaagccgagcagtggcatgaggagcagctgccggcggcattggcatattaagagcattggcgaccggtactggaggtggctgataagcatgattcgcagcagccggctgctgaatattggcaccagcagcagcattgatcgccacaggtatggctggcacttgtgcaatggcttggttcacagcagctgctggctgctgtcctcccgctggcatgacttggttaggtggatttgcgagctctgctgctatgtgagccagcagctctcgcgcatcctctaaccaatccgtcagatgacggtcgtctctcacaaagttggcaaatagcgcttcctccgcctctcgtgccgggccttggagtgtgttcatgattgtaccccatgcatccagttcgacttccatccttgacaggattcggatgatgtggtctcgttcctgctcagggagtcgactgattgggcatccggatcgtcttcatccagcaagttctcggctgaggtgatgtgctggcgaagacggataagtgcagccatccggcatcgtgcagaagacattatgaatcgctaacggcaccacttgtcgcacaaaggggatggacaacgaccgggaggggggatgaccacgagggggcaacgaaagggctaagaagggcggcgggcggagagacgaatgggcggaaaacacgggggaccagccaaagagtgggggaataatgagcgagtagacggttagagaagtgcgctttattccaatgcagaacagtgaagtcaatggaaatggtgaagtgaagaacaggagaagtgagaagcatttaaataggagaagaaatgtggggaacaaagaccgaaatgatgattaatacaaaaaaatggacagaatttaagaaacatttaacatataattctcaacagaaggaaattaatcaccggccaaaggccaatccaaccacattatttgtcctttttcattcttaaatctgctgaactccttccccaaaattcgcctttgtcatggtactgccgaccctcaatttctgtatgatgtacgccctcagtgatcgcttggattccgatcggggaagggaagtggattggcatgttagaagatcaagggaccatcgaattggacttgctgcctccgaatgcagtcggcgatatctaccatttacagtttgttttagataggtattactgtctaaatgaccccgggaggctggcgattataaattcactgggccatcgacagattaaaaatagtaaaaactttgctttttggtgggtgtacgttcggaggaccaaaatgtgatcttcgcagggctttctcggtgtgattttttttgttatatcgtcgtgacaaatggggtcggggtcacttcgccgcggccatctcgccgcggccatctcgccgcgagaaactcgccgcgtggccaactcgccgcggcgctatctcgccgccgcccaactcgccgcggccaactcgccgcgccttgttttttggctatctcgccgccagattttttcattgaaaggttacctcattattttgatataaaattaaaaaatgcattaatttatttcataagaatcattaaaataacaaacactggtccataacacaatttgattcttttcgactttattcgaattcaggctggtgttataaataggttgaaatggagtgctcagtagagaccggaaatttcaaatttgcggatcccgctgcgggattggaactcaaaattctttgcgggacgggatcccgcgggattaatcccgcatttaaaaaaaaatgtgggattgcggactgggatcccgcaaaatcccgcgcgggatcccgtcccgcgccggtctctagtgctcagcgcctcaaaatacccaaagaaacttgttaaagaattcccagaaaaaaaaaattcgggaccaatgaccgacatgattgctctttaaatttgtggaaaatatagaggaatatatcgttctgcaatttttccttcctgcgttaactttcaatttgaagcatattaaattggagagaaactttgctgaaatataacacattgaatacaattaactgttaaagaatttttgcttttaatgcatttttttaacgaaaaatctggcggcgagatagccaaaaaacaaggcgcggcgagttggccgcggcgagttggccccgcggcgagaaagcgcgcggcgagttggcccggcggcgagtttctcgcggcgagatggccgcggcgagttggccgcggcgagttgggcggttccctgacaaatgtatgttttatcaatgtctatattttgtatgaatggaaacaatcagaaatgaaaattacaaaaaaaaactccgatctttttcaaacaacccttaaaaacgcgatttttttatgaaacgacctaatagaaatgttccattgacggacgataaatgaatccgaaaagattgtgccaactttggctgtgccattttccgttttttgcgcaatggcaacaataattcggtgtcgaatgggccaactgccctggcatggatgacaccaaattatgtcagaaacaatgccaacaacagaaacaataacaacaataatgtgcaacagctatgctgactttttaccgattaaaaatcaccaagacagacattgtgaacggatgcattttaaccacacttttttcgtttttgaggttttatataaccggagcatttgggatgggtatgaaataattgtttaatatttatttattatttttgaaattaaagctttgtgggtttgcggaaacaagtgacgaaatgttgctggcaattaacagttgcatggatgttgagatcggaacgattgtgccaactattgccatgccatttttcgctttttgtggaacaatgccaaaaacagaaacaataacaaaaccatgtgcaacggcaaagatgaacaaatcagcagtaaatactctcttccagatttttgccgattttaatggaaataaaacggaaaaattcccaatttttccaatattggcaatttttatttttcgttggaaaaatttatttgcatattcttacttttacgcggatttttttttttaataaattaagaaccgcattgactttttaaatttttaaaaattcgagatattttttataattgttatttcaatttttatatgataattttgtttaatgaattaaaagttttaccactttcttcatgtttgctttaaattattttctcgcgcttcattcacttttttttgccattaaaatttgtgtccttttaattgggtatgtaacacgcgtttttgtgacgataattgctgttgtgtaatccaaactatgatatttctttttcttaaacaaaaaaattattatgattcataatttttatgttccctaaaaataataataattttttattttttaataaataaaaaaaattcatcccgatggaattgttgctgtttcgtcatgacgaatttgacaaattgtacggctgtgagggatttaatgcggacaaaatcccacttgaagaaagaacaaacattgtgaacggatgcattttgatcacactttttttcgtttttgaggtcttaaagagaatatattaagaattaatatctatttttttaaattaattagttaattttaaattaattaatagttaatttatttatattaattaatttaaaattaatttttttaaaataataaaaaaagcaaaaataagaaaaaaaaagaaaataataaaaaatcaaaaaaatatcattaaaaaatctaaacgcaatcgtggaaaaaaacctacgaataaaaatattttcagggggtgattgaattagggctgctctagagtaaaaatttgttatattcggatagcgagaccaaaagtaaagaaaattctcgaaacttaaaatatgaaaaattaagctactttacattccgtgtatggtatcaatttacaaaaacatgaaaaacaatgcctgctacaaattgatgttctttattggcatattggacatggtcattttttaattgaataaatgcaataatatttatcattccaatttaattgctttgtctgcttcatgaattctcatattttattaattatgtatttgtattttttaattaaatttccatagtcggccttgttcatgaatgcgttggaaacgggaattcttggcattattggtgccgtttattgtgactatccattgctgatttatacaaccggagcattgggagcaggtatgtaatttttattatttctaattttattatatatttttttaattcagctttgtggtatgccgaaacaagtgtcgaaatgttgctggcaattaacagatgcatggaattattaagaccagagttggcatttgccatttttagtggtcaaatttttatcaatatttttattagacaattagaataattaattaataataaagaatatttttaaggcaataaattacggtatttttttgcgctgccaatttgttatggctttgtagtggccatgttcacaaaacccgttctgttcagtggtgtttatttgtcgtggtttttcaacccatacattggctatacggacgattttggagaaattgtaagaaaaattaattatgtaattaataaattttaacaattacagtactccaacacgatagcttctgcacataattacatcgttatttttggtctatccagcatttatttgttgtttcctgtaattctttgttggcaaacctacacaatgtcatcaggcggccaccaaacacatcagtcatcttgggcagaaaaaatggcaataaacaaatatattttaatgactataatgaggttttttgtttaagcaaaaatgcaaaatttttgaaaaagctaattatcttttcaatcatttattataaatattcagatttttatccaagtgattatcataagtttgttcaattcaattgcctccgtaatttacatctcaatgcaatttgtcagaatcagcaaaatttacatcatcgttggcacttacgcatggctttttacgagcggttagcatatttactttaaaaaataaaaataatttttgcaaaaggttgccctcccgtggtgtatttgctgctgaacaaacgaattcggaacgattgtgccaacttttgccgtgccattttccgttttttgcgcaatgacaataattcggtgtcaaatggaccaattgccatggcatggatggcaccaaattatgtcgggaacaatgccaacaacagaattgggccacagcactgaatggttacgggtgaaaaataaaaagagcgaatatttttaaactaaaacccatattaaatttatttatgcggatccgaacccagacaactggtatagtgcagggatgggccaaattgaaaaataaaaagcgaaatgcgaaaagcgaaatttgcgaaactgaaaaatgcgaaatgaaaaaaaaagcgaaatgcgaaaagccaaaatatgcgaaaagcgaaatgcgaaaagcgaaattttttctacaactttttaatagttaaaatcataaagcaaaaatcattttttaaaattttattctaaatttaaaaatcaataaaacgcttttttgaggcgcgctttttccaaaaaaactttttgggaagaagggggcaggcggcgccggcatgtaccgccgcgatagatagtgaaaatttgattaaaatttgttgacagattttcactaaaaaatgatcaaattttgatatttttatcattttt

SEQ ID NO: 258 - DNA, 2324 bp, Heterodera glycines
attaaattttgagttttagcttaaaaatattcgctctatttctttttgtcccatttgccattcattgctgtggaaaagattccaaaaatttctccgccacgcctaccgacatgattcaacaatttaatgagtttgatgtaaaactatttgctttttgaaataaattgaatgtaatataaattgaagttatcaatacaagaaaaagtcaatttcactggtgatcaatcattaccgtactgttccggctggtgttcgttgctgtggcccaattattctgttattggaattgttcacggcataatttggtgtcatccatgccatggcaattggcccattcgacaccgaatttttgttgcaattgcgcaaaaacggaaaatggcacggccaaagttggcacaatcatttcgaattcgtttgttcagcagcaaatacaccacgggaggacaaccttttaaaaaacattaaataaaaaatatattttattttaacttaaataaataaacaaaccattgctaaaaacccatgcgtaagtgccaacgatgatgtaaattttactgattctgacatattgcattgagaagtaaattatgactgtaattgaatgtatcaaacttatgataatcacttgtagaaatgtctgaatatttattttaaaacatttaaaattatttgaatttaatgttttttaattataaatagggttaggattttaatgataaataatgaaaaaattaaaattaatgtgtttttaacagcaaatatttgctattttttgcgtccacgatggctgaaatgtttgctgattttctgtcattttgtacattttccaacttagaaatgcagaaaacaacaaataaactgtggataggccaaaaatgacgatgcaattattcacattatccatggtgttgtaatactataattttaaaaattaactaaaattaattaaaatttgcacaatttgtccaaaatcgtccgtatagccaacgtatgggttgaaaaaccacgacaaataaacaccactgaacagaattggcttagtgaacatggcaaacttttaaaaaattttacaataaaatatattgcatacctcctcccaaaattccgcttgaataaatcagcaatggatagtcacaataaacggcaatgttctggattttagggaatttatccctgaggaattggtcccacaaaaactttcggctggtcttcatcgttgtggcatattattattattattcctgttgacattgttcacggcataatttggtgccgtccatgccatggcaattggcccatttgacaccgaattgttgttgcaattgcgcaaaaaacggaaaatggcacggccaaagttggcacaatcgttccgaattcgtttgttcagcagcaaatacaccacgggagggcaaccttttgcaaaaattatttttgtattttttaaatatagagaatataccatttaataaatatgaaattcattatttaattaatttacgcattttcaagcaccaaaaaattactaaaaattcctcaaattttttcaattccaaacataacccacatattagaaattaaaataatttgatatctttgtttatacagtatgaaactaatgatttaatttaaagatagcaaaatttcaattaaaaatcctacaaaatttatttacaaagttgtcaaattcatggcttaaatttttgacttaccatgcgaaaaaagccatgcataagtgccaacgatgatgtaggttttactgattcttacaagttgcattgagacgtaaattacgcaggcaattgaattaaacaaacttatgacgatcacttggagaaacgtctgaatattatttaaaataaatgatattaaaaaactgtaattaatttatttcctaaaatagttttggaaaattaagaaaatttaaataattttttttttgccattttttgtgtccacgatggctgaaaagtatgatggcttgatgccattgtgtaggtttgccaactgagaactgcagaaaaaacaatataaattgtggacaagccaaaaatgacgacagagtcttgtacggtatgcatcgtattgtggtactgtaattcatttttaaatatatgtattaataatctttgcacaattattccaaaatcgtccgtatagccaacgtatgggttaaaaaaccacgacaaataaatcccattgaacagaacgggttttgtgaacatgacaactgcaaaaccataacaaattggcagagcaaataaacatcgcaatttattgccttaaaatatttaaaataattaatttgttaaaataaacataatatt

SEQ ID NO: 259 - DNA, 1323 bp, Heterodera glycines
  unsure (1)..(1323): unsure at all n locations
tgatttggatatctgtttattattttactacgtttttttattgcgagtttgctcaacaattttaaaattaaaggtgtgaatttgtagttttatggctgcttntaatntattaaactgattattcggcagcctcagaaattcatgtgatgtttttatataattataattaatttaatttaaaaataataattaaaataaaacgtggttaaataacgtgttatttaagaataacaaaatatttattaaatagaaaaccttattatttttatttatttcattttgcatcatttattttttcattttcctttagtttttagaggcaataaagttattattagggctgccaattctatgtaaatacatatttttttcctggcttctccttgctctaaatagcaggaaaaacactttcttttttgtgtttgcgaacaaaaatcgggacttttatttacatattttggatttttttcatatatattttcatttatttacatattttgagtattttttacggaaatttttggaaatcctcaaaaaaaaaatccaaaatttctgcaaatatttttgtacatattttcatttttttacatattttgaaaatttataaagaaaaaataagtttgaaaatgttgcctaaaaataccaaaaaagtaatttttatgtcattttatggctatttcatattttacggggattttctttcccaaaaaataccattaaaaaatttttatttacatatttggggttttttgtacatacctattttgtgatttttcttacatatttatgtacatatttggaccactttttgtacatatttttggcagcccttgttattattacactaaaaactctcaattcatttcacctgctgctgtatttatatgattgtttgtctaaagtttatttttttaatagtatttttgtatttatttttatttattattttataattatgctcaaaattataatttctttaaaaactttttaatttaaatttttagtttattaaataaatgattattatggaatttagggttaaatgattttttttttcttctgcttactcataatggcctcaaaattattttaaaagtatctaaaacgcatatttatttttaataattgaatattgacaaggttttcgtaaatttgctgtggtttaatagcgcttttataaaattgtattaaaattataaatgataaatccctctgacaaatgtattcattgtttaatatttatgtttatttaaagtcttctgatacagtcatggtcataagtgctgccccatgatgctttgaaagaaatacttgcgtattaaa

SEQ ID NO: 260 - DNA, 12604 bp, Heterodera glycines
ttgtcattttccaatttcaacagataagtagcataccatcgtatagcattttttatgggctttccaatgataccatatttgcatttgtgacataaacatttatttgatttattttaccatattcacaatttgatcaaaatataggtggtcaaaagtgttgtcccatttcatttttaaaatattgcttctctggatcagcatttcaaagcatgatgggacaacacttatgaccatgactgtatctgatttactgcgatgttttgagcagattttattttattaaaagattattagtcaatttaaaaattaattattattcttttgcttttttttactctgaaagtttcatttgtttttccttaatttatttaattttctttttcaaatttatgcaaccatttctcgagaatatttgcaatttatttataacgaatccgagcattggaaatgatgataaattaatttattgcaaattaaaaattatttggacgaattttttgctggaatttttaaatgaaaatgaatgggggagaagggacgacggggcaatgggagaaggggcaattaacggacaaaaagcacaaaagtcaattaaaatgaatgcggaatgaccgcccaaatgaattttttgaaatttaattttgcagatggcgtaaataaaatggacgaaaaagcagtgaaaagagaacagaagcagagaagaaaaagcgaggatagaagagagggtgaaaagaaaaagagcgaagagagagtgtgggaacagagaaataagcaaatcctcccggggataaactcaattttttaaatttggacaaaaatagaaaaatggggaaaagcggaagaagagggtgattttctcggaatttttggtggtcaagataatttcaattatcagaaagcagcccaaatcctccgtgggaaaaggattggattttcgggattttaaattcaccgagcagaattgcagaaacttcgcgccggaaatttaccattttttattaaacttttaaaattcgtatcgccagacccaaaatctcaataatttttcatttaaatagactcaaaatttaataattttttgataaaatctattaaggttcgttaccctctttctctttctgatagtttttggtgaaatcattaaaaaacccttaatttgaagcatttttgtttaaataaataaactgtaaatttccctagaaaagaaaagaaatataatttaataactagccagatgaaaaaaatcaacaaaatctatttgaaatttaataaaaatatcacaaataaattctcagtctgtccattttaaattaataatgtaaaaagaattgtttaattgattgggtttattttttattcatttcttgaaaaaatatcaagttttgaaaatgtttaaatagttcgaatcttttttgattcagattatcattttcgtaattttccaatcatatcccgcatataaattatttatttttaatttgttttatttcaattgtcaccttcataattatttcgccatatttattattttgttaaacaatgctaattttagaagcttatccaaatattcattgtttcttgctgttttttatgggttggggactgaatttaatcacaattttaacaattaaaatcataaaatattgtcatttttggactaaatttgttcgcaaagtgcactgaaaatttcaaaattttccccggcggcgttgactcaaaaacgcgcaaaaaaactaacgaattttttgttttgtgcgttttgaaatgataaatattttaccaaattgaatcaaaataaaaaaaacaaaaattagttaagaatagagtcaaaacaatttttaaacaaaagcgaataggaaaattttttgaaaaaagtctcgagtctcgggttttttgggtctcgagtctcgggaaatttttggtctcgagcttgtcaacaacattttttaaatttctcgagctataccgacaagtcttgtctggggatttgctatcagctcctcaacttttctatcccagagaatcggggaagaaacctagataaatcttgctctagggttcagcgaggatagcattccgaggccccaaaaattttcggaatggaaatcgagaccaaaaatcccgggaatcggatgccaaaatcggaattcgtgaagctggtgttcagcacttaaattatcttgttattttgaaattataaaataaattttgttcgcaattaagcatgtcgcaaactctttccttatatctgaaattagaggagacgtattatggggccaaattttccatcttgttttagaaaaaaatttttaatgtttttttaagaaaaatttttattttttccaaaattgtatgcaaatgtccgtccgcaaatgtcccactgcgttccatgtctatgaaaattgtttcaattttagaaaaaataataaaatattaattcagattttgttattaaaattattagtttttttaatattctctttaatttataatcaaaatagtttttaagcttttaaaagtcaattcaaattactgtgtgcttttttaaaaagtgccattcttattaattttcggaataatattttattttttttttcgctgtttcgtactttcaaattcaacgtctgattttattaattgaattatctattaccaagttatttttcattaaaacatgctttacttttttattttttactatttttttaattacttggtatttacattcaaaaaaaaattaataaaaaagacagcatatgtattttaaaaagtataaattttgcatttttgtacaaatatatttgcaaattttttcacttgaaggcaaattcgttttgtaatagtgttacaatttttggccccaagatacgatttttaaggcttggtgttcttgatgttcatcagatctttttatatcgctaaaattttttggatatttttactttaattttttatttttacgttaattttttgttctttagtatttttgtttgtcacttttttattctttttctcatgattcccctcttcttattcttcttagtcctcttcatttcttaattttcttatttattttggtttttacattatataaattaattattcaattaattaatgtgcaattttcaaatatttattaattagtttctttttattaaaataacgaattattttgagaaattaataattattttgcttttttaaaacattttcactgatttatgcgttaataataatccgatgcgaagcttctaaccaaaataatttttaggttttttatctgaaacgcaaaataaaacattggtaaaaaaccaaaaatactaatatatttatagaaataaattgaaaatgatgacaattaatttattgtaaattaaaaattaaaaagaaaaggtacttttcggttttgggcttacacctcaaaagccgattttaaccattattattcccatagcataaattaacggagcggtaaaggtcctccactcccaattttgcgcataaatttatgcccccaaaatagggcgcatattaaaatgccttcagcgcgccctttgttgacaatttttaaaattttgagctgtaggcccaaaaccgaaaagtaccaaagaaaatacctcttgtaaacaaaaaatttcggattttctaatattttaatttgtgaaattccttttcaaaagggcgttctgaatttttctgaaaaatcgcaaaattccatatttatggaaatacaatcctcccgattttctttattttaagctttatcccactaacattgtccaaccctgaagtgagtttttaatttccaaaaatttgcataaatttcccgggcttaaaaagaaaaatttaaaaaaatttcaaatttctgaaacgcacaggtgttttcaaacaattctccaacatagtaaaacatatacataattttgatcaaaaatgcttaaactatttacaatccaagttaatctccttaaacatcattagccctatgctcattttattcagcatcttttcggctacttttcaagttaaaattttcaaatatgcattatttgaattcatagctgtttccagcagaagtaatgaccgaccaattcattcaattaaataaaatatattttaatcaaaatatttatattatattgattttttttattatttagcattatatatttaattatttgatatggcaaaatgaccaaaagaaataattttgattttttattggctagcaaaatggtaaaatgagacttcttttgagaaatttcttgtttttgagcaggtttgtttcagtttatagaagaaaatatttttggcctgggatattttgaaatatgtatatatttggcttctggaccagtcagccgaggacaactcacaaatcagctgacagataattccgctgatggacaactcagccgtacaataaaaattacaaaataaatcctaagcttaagcctaggtccaagcaagcctaagcctatgactcgcctaaagcttaggtaagcctaggcctagcctaagcgattgtacgagttgccttttgtaaattctcgtaaagctgagttgtccatcagccgaattatccaatctgctgagttatcctgacacgatatatttttcataattggcgtttttttagcaaatataaatccgttcaaatataaatccgttccttggatataacaataaaaaaagatgttgaattgctttggtttattttttccaattttttttattatttcattattatttttaattattcatttgaatttttgtatatataatcgaatcttgttttccaattttagaatatttattttctttaaaaattgcttgttttctgaatgtcgagttaataatttatttatttatcctatagaaacattgttgcgacttttgtgtttccatctaatcattttatttttcgtcatagtttattttatgtgtaattattagagaccgagatttccaaaaatgccgggccgggccgggctggtttttccaggagtaaccgggttccggtcccggcctctcaaaacccggtcaactcgaaacccggtcaacccggcttttcaaattgccgggcccgggaccgggttggtaaaaattttaattttcacatatatttcaactccaaaattgaccaaaaagcgggtcaagtgttaaatttctgcactatttcacttcgggcgtaaataaatgacatcttcaattataaacctagaatttttcaaaaaaaaatcttagaaaatttttctatgagaatttcaagaattaaaaattaaaattttatagcgatttttctaatttttgtaatgaataataaaaatattttcatttcattttaaagcagggctcagatcgaaaaattttcaaaatcaggacatctggcccaaaaaattaaaagccaaacgactttttttgcttttaaaaacgcttttttgtggcgcgttttttaaagaattttggggacaggagggtgcggcggcgcagataggcgccgccgggaaacaatttgtaattattaatgcgatttgttaacagattttgcccaaaaaattactaaatttagcaaatttttcaagaaaattaaggatttttaaggtccggtttaattatttttcttactttttaaagaaatgttaaaaatttggaaaaaattaaaccagaaaattaaaaaaaacatttataaacattatgccaaagagattttcaaggaaagagaacaaagtttgattaaatcataacccggtaaaacccggtcaaaaatgccgggttccgggtcgggttgcactttcaaaaaatcatagaaaaagtaattaaatttttcatttttcactgatttaaaataatttgaaaaattcttaagtatttatgaatccgtttataaatgtaaaatttttaacctatttttaacaaaaaaagagaaatggttagaacatttttggagaagaaataagcaatcgaatagaattaaaatcgttgcgattgaccaatcattaagcattagccaatttgggccccgccccgttccttttttcgtgtcccccgtccctggccaacattcattctgttcgggagagggattggcttagccaatcccccaatctctctccctcctcccactaattatcccgagaccgaactgggagtcccttccccatcccacatttattcatcatttactcatcatatatattgtattgtgcgcacattactgaaataaagagcatattcaaatgccgccgctgggatttttggggagggacccgtcgcctatttcacgattttgcacaaaaagaacaaaattttcgcctttgagaaaaatttttaaaaagagtttttttagaaaaataaataaatataaaacaaatttatggaaacatttttaaaaatattcgaaaataacagatttaatatttcttttaaattacttaaaaattaaaattattacggaaataattattttctttattttaaatttaagcttttttctttttttattatcatatggtatatttaatatgtataattaattaagtttttgttttttaaaattatattttgtaaataattaatgaatgcacctttttaattcttatttttattattttgttcatactttattaacaaaaataaatctactttatttgttaaggattaattgtaaaattagatttaattgggttaaacatgtcctcttttattcaggtaactcacgtaagaaatgctgaaatcgataccatctagttcaatctctatgaaatttcaattttataaaaaaattaaaatatttattattttaaatttgttactaaaattattaaatgtaaaaaatattattttttatttatgtcatatgtaaattgtatttaattcattttattatattttggaatatctccgattatttcaatatgtatttcataaacaaatatattaagtcatttatttatatttattatgttattagttaaatttaactttgagaaaaaccgtggccttccctagtattttggtttttagtgtttaaattaaatttgtataaaaaataattgaattcagtttggccggattttggtccatctttttcttcaaattattattgaaacaattattttcttattattttttttttgtgcttatgtgaggatagttaataatgtatataattaatttaagtttttactttctaaattatatttgtaaataataatgaatgcacctttttaattcttatttttatattgctcatacattattaatagggttgtaaattatatagattaacatattttttctgcgcatatgctatgaagaaaggggcttaaaaatagcatttctgcgttaaaattttttgatttggtgaaggtttttagtccatataaatccatattttgggggttttcgggaataaatccatatttcgccatttttgcctttttagtccatattttggccattttttggaaattttcacaagaaaaatgaaaaaaaaacgaaaaatacacccctaaagattgattttttggaaatttttaaaaattacaccccacaaaacacgaaaaatttgagttttcatcgtcattttggcattttcaataaatattttcgtcatttttttgcgaacatttcttttttttaatgagaattttttcgaaatttggcaaacttggaggtgtttttgatacaacgaacaataataaaaaatatgcatttttaagttttaaaccccattttttggttgtttattgtactttttaggtttatttaagcaaatattaaatatgcacaccttttttgggatttttgggggtttacaacatatattttggcattttttatccatattttggtccatatttggccatttttggcctggagaaacaattcagtgaggaggtccttccgttgtcaaattctcctatttctaaaaagccgaagggattgcttgatttttttgatcatacgctgtcagcatcgtcagtagtcgagacaaactcacgtaaaaaaaccaatttttttcatttaaattttgagttatagaagagcgaaatgcaatgagcgaaattaatgcttattgttctaccggcacaattccgaccaattctgatcctttagagttttggaaggaaagagccaatgaatttccgggtattttaatgtggttaatttattaaccggttctaaggttttacacattatttagctttggcagaagaagcaaacaaatttctttgcattccggcgacgagcgttgcaagtgagcagttgttttcaacagcgtgcgacacatacgactaccgtcgccgccgcttgcgtccaagaaaggccgaaattctgatttttttgaatcgaaatcttccaaaaattcaatataaatattaaaaacattttactgttaataaaaatggtttattgctttttggtaaaataaataaacaaatttaaaaaaaccgaaaaatcgaaataaaccgaaaatttttctttggttttttcgatttcggttttttaaccgaaaccgttcgaccgaccctcttgtccggtctctagttttaattttaacgagagaattaattagataatgttaaaataattcaaatattattgtattaaaataaattgtctttcaaatgttgttttttggcttttttatagtaataaatttaaattataatacatttttcaaaataaataagttaatacattgttgatatttattatgctattaattaggttattttgttagtaataattattttccatttttgtcttttctaatttttttttattaaatatattatcacacttttaatttattaattaaatctattagctattgatcacttgatcagttgaagtaactggacatttgtgccgtgttacccttttaagaaattgtttaaattaaatttcattgtcatattattatatattaattctaaactattagcaataattcatttttaatatatttttaattattaatgcaaataaattaaaaattcaaaagagatcattttagatgttttcattttacttcattgaagatttgttaaaaaatttcaacaaagtgcttaattttcactttattaaaatttaaatattatttatttattttttataatttagaatatcgacattatttatttattttaaactcatgtattttccccgtctaccccctcggctcattcgccggctgccattttaagtaatatttgatattaaatttatttttatgaaagattttgttttaataacttttttattaattttcataaaatatttttattttaatataattagatttcacatattatttaaatagtgtgttttggtttttttctgcaaatattattttttagaaaatttcttttattttgctatttaatgatgtaaattaacatttattccatttgaaaatatttataataaaaataattattttctgtaagtatcttttatatttattttttggcaatgattaattttgcaaatttcattttttagtctcgtaattaatcaattttctgaatatttatcgtttttttaattttttgatttgaactactattttcattagccttcttttcggtaattgttcaatattgacaaattcttgatgtattttctagaattttcccaaaaatttcatattattaatattttaaagaatttaattttctttgatattaggtttgtccatctttaatttttatttgttgtataaattcaattttttaattatgtttggtattaaataattaaattttaaattgtgtttttttatatatttttttttattatggtttgttttaaataatttatattaattatagttttgtgatttagtcactcgtccttcgcatcggagtatttaccggagtgagtgggttattttaggatgtttagcatttattggtctgtcttgtcttgtgaaattgtaattatgaattttcttcgtttgattataagtagggtcgcaacttttagtgacgaaaaatcccgaaatagttaactaaaatagtgagtaaaaatgccaaaatagtgaagaaatagtgtcaaaaagtccgaaatagtgacataattttcagccaaaaattaagcaaaaataatttttattcactgattgcattgcaaatgagtagggctgggatttttaagggcaaaaaaacaaaataggtacataaaaaaataatttttaaaattaaaattcttgccacgaaaatacctttttgagaaaatttcatttcttaggagtgctttttgaaattttttttgtcgattcttaggggtgtattttttttttttttttttttaggtcgattcttaggggtgtattttttggttttattgcatttttgttaaagaattttccaaaaaatgtcgaaatagtgaaaaaatagtgacaaaacgccaaaatagtgatttttaactattttagtgacgaagtcgccaaaatagtgatttctagtgacgaaaagtgacgtccaaatgaaaaaattttaacgcagaaatgcgttttttgagctcctttcttcaaaacaattgagcaaaaaaaaagttttttcactaaaagttgcgaccctaattataagttattatttcttcaaatcgttttttcatgtttattttactaaaataggggtaataatttttatatctttttaatacgaagttcagaactttcataagagaaggaggagaacatatatcttttgttattttctcatactttttcaatttaaaaacaggttaaaccataaaatattttatgcttaatttcgagaatttaaatataatatttataaataaaattaataaatctctgactgttaaaatttgacgagaattatggccgtgcgtttttccaattaatgatattgtttaatgaatttttattttattttttcttctgtaatgtctttctttattaaaaatataatctgcgactgatgggattatttcaaattttagttcaattttgttattaaaattccacttttattattaataaaaagtttcccaaatatttagcaatttgattatttaaaataataattattattttgttaatttatgttttttattttagaaatcgaaatcagaacagcgggctcaaaaaatgggaacaggtaactctcgttcaatattccaaaattgatcgagtaaagttcaatgatgaaatttaattaaaatatttagatttgttattctttttaacctttgtaatatgtaaattaatttatttcattttaaataaaactttttggtttggggtcattaattctgcgccgcaaatgtcatttagacttggcgccgcaagtgtcggcgccgcaaatgtcggccaatccaaattaattccattgtcttgttcttttgcagcacctcataattgtttttaatttacttttttatattgaaaaatttatgtttgattagttttgcaaatttaactttttatattgttaatttatttttatcatttggaattaaatctaagcgttttaaagtttttttaaaaaaaagaaatttttttagcaaaaaaataaaataaatataatacaaatttgaggaaatattcttataaaatattgaaaaataataagtattttaaagttttcaaactatttgtaaattaaaatgattacggaaattattttttatttaaaatttaaacttttttctttttttattgtcttatgggatattaataatgtactttttcaaaaaattttcatatcactaatcgagaagcgtctagaaaattgatgggactcagaaaataatttcggcttcatcgcattaggaccttttaaagagatagaaattttttaacaatattctatcgtgcaaatttccctatttgtaaaattcgagaagcgtctacaaaattgatgggactcagaaaataatttcggcttcatcgcattaggaccttttaaagagatagaaattttttaacaatattctatcgtgcaaatttccctatttgtaaaattcgagaagcgtctacaaaattgatgggactcagaaaataatttttattttgatttacatttaaactttctttctattatttacatttttgtttttgatgtccgaatgaaaaaaatttgaaaaaatatattttggtgttttgcccaaaatttattaccaaaaatgcaataaaaacgaaagatacacctctaagaatcggccccaaaaatttcagaaaatacccctactaagaatcaacctaacattttcaaaaatatatccctaagaaatgaaaaattttctcaaaattattaataaatgtattttattttttatgtattcattataaaattaatttaattgagttatatgtgttttttattcagtaacccacgtactttccaaccacaacggctaaacttacgcagaaatttttaattatttcctctaatgataattatttatttttattaatttatttatttttattaaaatatttattgtttaaaggactaaaatctcactgaaacattaattgtttccgaattatttgccacattaaatattaaaaattcgaatatttattattttattttttgctaataggtgcccattattcatc

SEQ ID NO: 261 - DNA, 2201 bp, Heterodera glycines
  unsure (1)..(2201): unsure at all n locations
gcagcacctcataattgttttaatttactttttatatgaaaaaaatttatgttgatttagttttgcaaatttaacttttttatattgttaatttatntttatcattggnaattaaatctaagcgttttaaagttttttaaaaaaaaagaaatttttttagcaaaaaaataaaataaatataatacaaatttgaggaaatattcttataaaatatgnaaaaataataagtattntaaagttttcaaactatttgtaaattaaaatgattacggaaattattttttatttaaaatttaaacttttttctttttttattgtcttatgggatattaataatgtactttttcaaaaaattttcatatcactaatcgagaagcgtctagaaaattgatgggactcagaaaataatttcggcttcatcgcattaggaccttttaaagagatagaaattttttaacaatattctatcgtgcaaatttccctatttgtaaaattcgagaagcgtctacaaaattgatgggactcagaaaataatttttattttgatttacatttaaactttctttctattatttacatttttgtttttgatgtccgaatgaaaaaaatttgaaaaaatatattttggtgttttgcccaaaatttattgccaaaaatgcaataaaaacgaaagatacacctctaagaatcggccccaaaaatttcagaaaatacccctactaagaatcaacctaacattttcaaaaatatatccctaagaaatgaaaaattttctcaaaattattaataaatgtattttattttttatgtattcattataaaattaatttaattgatttttaattatttcctctaatgataattatttatttttattaatttatttatttttattaaaatatttattgtttaaaggactaaaatctcactgaaacattaattgtttccaattatttgccacattaaatattaaaaattcgaatatttattattttttattttattttttgctaataggtgccattattcatcaatcgttttaaaactttattttctttcttcattttgtaacgagtttatttatttttatttaatttcttcactaaatttggaattgttgcctttgccaattatttttccattattttcattgttacaatttttgtgaaatttactttacttggcgtcgacgccggaaaattttggaaattttggctcaatttgttaacagatttttttttattaaaaaaatagcaattttggcaaaaaaaaatataaaacaaatttttgaaatataaaattgaatgcactttttaattcttatttttattatttgctgatattttattaataaaaattaattaatttatttataatgtattaattatataataaattattggattaaatatatgctctttttttattcagaggcaactcacgtaagagattgcgaaatcaatattatctaattccatgttccttacggacatttgcggacaatttcgggaaaaaaataaaaaattcataaaaaaaattattttttttctaaaaaaacgaatggaaactgcaagactaaacaaaaatttgtttttgttttttgggctttggaaggcctcaatatctcatttttatatttctaaaattaatttcgcaggtcaaagtgaggttctagtttcttaaatgatgagttttattggtctccaaataactattttttggattttatgaagatttacttcccaaagagtatttgtcaacaacattttttaaatttctcgagctataccgacaagtcttgtctggggatttgctatcagctcctcaacttttctatcccagagaatcggggaagaaacctagataaatcttgctctagggttcagcgaggatagcattccgaggccccaaaaattttcggaatggaaatcgagaccaaaaatcccgggaatcggatgccaaaatcggaattcgtgaagctggtgttcagcacttaaattatcttgttattttgaaattataaaataaattttgttcgcaattaagcatgtcgcaaactctttccttatatctgaaattagaggagacgtattatggggccaaattttccatcttgttttagaaaaaaatttttaatgtttttttaagaanaatttttatttttttcaaaattgtatgcaaatgtccgtccgcaaatgtcc

SEQ ID NO: 262 - DNA, 3466 bp, Heterodera glycines
ttttaaaagaaaacccaaagtaaatcgaattagaatcccccccaggaaagttaaaaagaccattgatttatttaatcacttctagtttaattttattcaaaatgatttttgcttgtgatgaagtgacaaatttagtcgctggaacaaatgactgtgcagtaactcaagaaggaaaaattgaatgttcttatgaccaaacaacccaactctctattacacctgaacacttaacctgcttaaaactcgacaatacaaaaactaacaccactatggaaacactacaaattacaatagaaactttaacaataatttgcaccgaaaaatctgattattttacgagaggttacgaattatcttcgacatcacaaaaaagatgctcaggcgctgggaaatgtaccggccaaacttgtcaatcagtaaaaatgtcagaccggaatcccgaagtgaatgatcacgctaataatcaaccaggctattcatactgtgtaccatcgtgcggaggatggcattgtcaatgtttcctcgcaactgatggatgtctattttacagaacttatgccgaatcagttggtgacgaaattttcgaagttgttaactgtccatcttggaccattcaggcgacaattaaattgtctatcaatccagaattaacctattctgttgacttgaaacccggaattttaacacacattggtgacgagtctaatagttctatatctgtcacactgacttcgacttcaattccaccgacgccgttatttggttcgacatttattatagttcgcgaagaattaaaagcagcaatagttgcgaacggaaatttactcaaaaatatattacggtgtaaaaacaaagaagaagcgcaaagttttagttgcacttttccaccagaagcatgtcaatgccacggaggtgattccgttgtacattgtgaatgtgaaaaaagtccacttaccgaaatatttgctaggcaagagaaccttttacccattaaaacacagggaagttacgtatacttcgattcccaaattaaagctaaaatacagcaaacaacttctcttcaaatgcaagtcacacttaaaggacataaggttaaagctatttatgataaaaatatttgtaatattgttacaatatcattggaaggatgttattcctgtactagtggtgctaattggactctatcatgcaaaacatgtcccgatggtaagactgaaattattttgaaagctaatctggaatacatacaccaacaagatacaaaaatcattcccactaacaatactaatgaaaaccccactattggaatttcatttgaccaagtaactgatatattaaattttatctattcccttattaaagccaattttttcaatatatttattattatcatattcatactcattatgattttcctaattccatgtctactacctattctatatagaattatgtgtcgttgccttcctctttcgcgcgggagtgtcgcgacaacgcgaaatcctaagataaaacccaaaataaaaaagaggaaaaataaaaaacaatagaaaataaaatggggaaaaataaaacataaataataaaaaatatttttacatttattttggaaaaataatattataaaaaactatcgaaaatataattacataaaaatgaaaaaaaccttttgaaatgaataacggaaaattgtttgaaaaggaaaagtgcatttcctcaggaatgaaaggaacgaaaattaattaatattaaattgcgaattctgttaaggattgttcgtaaacaaattattaataattaatatattaaagaaattggaattgtaaagggaaaacggaaaagcaaacaattaatgggaaaatggcaaatccaaacggataacacacaaaaacatattttaattaaaatgagaaattgtagcgtactttggtgcaaaaaaaatcgtatttaaaggggtggacttttccggaaatttcagattcgagacaaacggttccctccgaagtttcccggcacccgcccaccgcctttcactgcacccggccttcgctgctctctgtctgtgcgagtgccctccctgtccgcgcctgctcgagtgccctccctttcctttgccattgtgtggccccttttggaccagccgttgcccgaatgcccttccttttcccatcgccgtttcgccgttctgaccccttttgattttgccacattttccatttgtgatttatttactgtcaccgtttttgtgcccccttttccccgttcacattatcatgtttgtcccccatttttcgtttccctcaccgtcccgattgggacggtttaattacccaagtttgaggtcgacacaataaacatactcttattaaaattgtgcccaacttggtctatttgcctggacgaacaccggcacgactcatcgctctccgatcggtcccgaccccctacgttcccccgaccggctactctgcgcgcctcgcccatttcatccccttcccgtccccttcaccccgcagagttcgacgcaaattttttgtcgccacgacaaaaagtggtgccacgacccgggaccgtgcctttcccgctgtgcccatttgtcctgccgtgcgtcccgctgtgctcgttcgccctgttgtgcctgtccactccgctgtgcccatttgtcctgccgtgcctgccgctctgcccgtttgtcctgctgtgcccattcgtcttactgtgctgcctgtccggtctgcacctgattgccacgtcaaaacgtcaaattcaccgttgcgcaactgctcgtcatccggaagtataagggtcaccaagcccatacaaaatcaagggttgacaaacccaatttaaaaaaaaaacacacacacacacacacacggatcaccaaacccaatcaaaaaaccgaaaaaggacaccataaaaagccaaacataattaaaagtcataataaaccctacagcaaacccatcactaatttaaataattaagtggacagagcgactcctaattcaattactccgacgaccaaagccaacacgaaaaagaaacaagtggcgaaaagcactacactgactgaacttataaaattaaaaacacaaacggaatacaaattaacgaaacttcgcccaaaacatacggagaatatattgaaagaattttatgaaaaaaaggagcaaataattaacaaaaacaaataaaattctgtgatcaaatttttaaatttgtgataacaattattaattctgtgatcattaaattttaataaaaattatttaaccagtgataaaacaattaaaattcgactcgatactgattatccactaaataaccataaaagggtacttagttaattattttgaatttttaaaatacaaactatgtccggtacgcttcgtagcaaaatacccctccttaatcgcgtattaaaaagggaaatagaaacgatcaaaacaaaattgaggaaaac

SEQ ID NO: 263 - DNA, 8270 bp, Heterodera glycines
attgtgtggccccttttggaccagccgttgcccgaatctcttccttttcccatcgccgttctgaccccttttgattttgccacttttttccatttgtgatttatttactgtcaccgtttttgtgcccccttttccccgttcacattatcatgtttgtcccccatttttcgtttccctcaccgtcccgattgggacggtttaattacccaagtttgaggtcgacacaataaacatactcttattaaaattgtgcccaacttggtctatttgcctggacgaaaaccggcacgactcatcgctctccgatcggtcccgaccccctacattcccccgaacggctactctgcgcgcctcgcccatttcatccccttcacgtccccttcaccccgcagagttcgacgcaaatttcttgtcgccacgacaagaattggtgccacgacccgggaccgtgcctttcccgctgtgcccatttgtcctgccgtgcgtcccgctgtgctcgttcgccctgttgtgcctgtccactccgctgtgcccatttgtcctgccgtgcctgccgctctgcccgtttgtcctgctgtgcccattcgtcttactgtgctgcctgtccggtctgcacctgattgccacgtcaaaacgtcaaattcaccgttgcaactgctcgtcatccggaagtataagggtcaccaagcacatacaaaatcaagggttgacaaacccaatttaaaaaaaaaacacacacacacacacacggatcaccaaacccaatcaaaaaaccgaaaaaggacaccataaaaagccaaacataattaaaagtcataataaaccctacagcaaacccatcactaatttaaataattaagtggacagagcgactcctaattcaattactccgacgaccaaagccaacacgaaaaagaaacaagtggcgaaaagcactacactgactgaacttataaaattaaaaacacaaacggaatacaaattaacgaaacttcgcccaaaacatacggagaatatattgaaagaattttatgaaaaaaaggagcaaataattaacaaaaacaaataaaattctgtgatcaaatttttaaatttgtgataacaattattaattctgtgatcattaaattttaataaaaattatttaaccagtgataaaacaattaaaattcgactcgatagtgattatccactaaataaccataaaagggtacttagttaattattttgaatttttaaaatacaaactatgtccggtacgcttcgtagcaaaatacccctccttaatcgcgtattaaaaagggaaatagaaacgatcaaaacaaaaattgaggaaaacaaattcgaatatgatcaaaataatcccggagaatgcatgcggatattcaataaaacaaaggaaattatccaaaaaatagagccaaattttgaaaaattaaaagccttaaataaaaggtggcaaaatttaatgagaaaaatgaacaaggaagaatggaataatgaatggaaagttcaaaaaatctttcgtgaaaaacacgactaccttaaaaccattaaagaaatagatgaaattctcgatacattaaaagacgtaaatttggaggtaaaaaggagattaaaattacttaaagcaaaatcatcttcagactcagacccggaagatgaatcaaatgattatgaacatgaaaatgaagacgaagtagaagaacaagaagaagaaaaggaatatgaaagtgacaatgaagacgaatcgccagaactttctttgaatgaccaaatacaccatgatcgtataccatttgtcaattaccgatcaagaataaagcttccaccccaaacgcttacgcattttaatggcaaattctcccaatggcccagtttctgggatgatttcaaatcctcagtggacaatgacccaaatttagaaaatatacaaaaactcaaataccttcgagggctcttacatgatgaaccgtacagaatagtgtcaccgtatcctcttacgaataaaaattacactatcgtaataaaattactaaaatcaaggtacggaaacccccaattaatcagagaaaatcttcatagcgaattacgcaacctcaaaagacccactgaatccacaattgattaagacgatttattttgttaattgaccgaatcattttacaaatgaaatcccaaggggaagacataaatcaccctcaaatcaaacaatcaatcgaaacgaaactcccctataacattagacttaaattgaaggaaaaattcaaaatctattcaacaaaagaaataatggaatttttgaatgatcatacccaagcacgtgaagacatagaaagaatggaagaatcgaatcgccaaatccggaatttcccctctaatagaccaccccaaaacggagtacagagacaattctatccaaatttcccacacaatcaaatgaaaccaaacccatggaatcaacagaacacatcttcctctccttttccatatacttctgcatttacaacgaattcaaacccagtacgcctggcacagtttaaatcaaatccaacacaaactagaacacaaaataaaatattttgtcgcttttgcgaaagagaaaaccatgcaagtaaagaatgcaaaatttattcaactcccgaaaaacgaaatgaacgtgtacgtgaactcaaactttgcctaaattgtctaaacaagggacatatggtcaatgattgcaaatccacttatttatgttttaattgtaaatacaaacataatactctcctctgcacccgtaaacaaactcagtacaaaacgaaggaacaaaaaaccagagtgaatatggctcaaaattacgaaaatcgtgaagagacacagacattcatgactatggattatgataaaaatttatataattatgaggaagaagaattacttatgactactgaagtcaatgttatcaatccagacaagcctaaaataaaaaaggaaataattttatttgataatgggtcacaaaaaagttatataaccgaagaatgtgctcaaactcttcaattaagcacaattgaggaaaaattattagcaatttccactttcaatcaaaataagccaaaaatcattaaatcaagactagtcaaagttggcattaaaacactaaaaggtgaaatagagtacttaacactacaaacagtggagaaaattactgatgttacaaaaatggttaataaagaaacagttgatgtattgggagtaaaaattccaatcagtcatgcacgtcctcaaattctaattggaatcgaccattattggcacttcatgttaccaaattcacaaattcaactacttccatcaggattttactcaataaatacaaaattaggaaaaatattatcaggaaaaggaaatattgaggacacaaattgtaattcagtgacagaaaaaagaaaaagggatgaaacgaaccaaatacttcagaaattttgggaattagaaaacattggaattatcgactcaccacatatgacggatgaagatacagcaatgatacactttgataaaaatgttacatttaaaaataacatataccatgttcgatggccttataaaagagagaacccaaatttaccaacaaattttggattatgtttgggaagactaagaaatgtagtcaaacaactaattaaaaacaaaaatttggaaaattacgacaaaatattacaagagcaaatggatactgacgtaaatgaaattgcggaattaaaatcaaataatttgcttcattatcttccacatcatccggtaataaaagagagctcaaatacaaccaaaatacgaccagtttttgatgcgtccgcaaaacttaaaggaaataattcactaaatgatgaaattcaccaaggaccaaaattactaccagatttgtgtggaatgattctccgatttagactcaaaaattacgtattaattggtgacttggaaaaagcatttttacgagttggattaaatgaattagacagagacacaacacgatttttatgggtaaacaaatcgtacttgaatgaaataaaacaaaaatatcgagaaattgaaatgagagacatcgaattgagacgattcacccggataccattcggagttaacgcttcaccatttttattaactgctgtagtcaatctccatctctcaaaaatagatgagatgtttgaaaaattcaagacacttaaagttaacggagaattatgcctaaatgataaagaagaagaatttaaaaatctttgtatagaacttaaacaaaatgcatatgttgataatttcgtaatgatgtgcgacaatgaaaaggaaataaaattcaaacattattggagtaaacagatatttaaactagcatcaatgaatctgagagaatttatctctaatcatgaacaaagtaataaagaaattcaaaagctggaaggatcagagataccaaaagtaacaaaaatgttgggtataaaatggaatgttgactctgatgaacttgatcttcaaataaaaattccactaatgagtaaagacacaacaaaaagacaaattttgacgatgattgccaaaaatttcgatcccatgggatggatttcaccagtaatactgaaatataaactatttttccaaaaactatggcgatcaaacaaagattgggacgataaattagatgatcaagaaattattgaatggaataatatttcaaacacagatataataaccataccacgttcgcctttcacaagtcaatatttaaatcattcaatattacacattttttctgacgcttccgagttggcttatgccacttcagcttatttacatacaaacgaccaagtgaatctactattcgcaaaaacaaggcttactccattgaaaggcctaacaattcccaaactcgaattattggggttattgatagccgcaagagccgccaagtttataaaaacggaatccaaattgaaccttgaaaatacctatatttggtcggactcaaaatgtgtactcagttggttgaaatgtaaaaagaatttaccaatttttataaaaaatagagttgaagagatacaacaaattgccttggaattacacatcacttttcattatgtaaaatcagcagataatccggctgatttggcttcacgaggagcaactatgagtgaattaaaatacaacaaattatggtggaatggaccaaaatggcttaaactggaaaaggaaaattggccacctcacagcttttacagtcctgatcaagaagaggctccatatttagataatacagaggaaataattaacactcaaataaatttaataaaaaacgaatataacggaattatcgaatgggataaattcagttcatggcttaaaataactcgcatttgtcaaactttattaaaattcatatttttcaaattagagaactctaaaaaatttaaagaaaaatttatttactctaaattcgaaaatgcattacaattaaaaatcatggcacaaaaaatgctaattcgaattattcagagggaaatggaaccaaataaagaagaagaaagacagttaagaatttatctcgataatgatatgatactcaaatgtgaaggacaattaaaaaatgcacaaattcaaggtgtcaatcccatttttttaccaagaaaacactatggaactcatttgataatcatggattatcacacacgaaatttacacgcaggtacaatgacaacattatcggaaataagaaaaacttattggataccgaaaggaagaagaattgttgatcaaatacggagacaatgctatcattgtaggagatataatgccaaaccttttcaacaaccacaaatgccaccattacccaaatcacgagttgaaataacggaaccatttcagaacattggactagattatatgggaccaatacaaataaaaaatttcaatgaaaaatgctggataatcttatttacatgcttcacaacacgaggaattcatctcgaattagttacttccttatccgtccagcattttctcaatgcatttagaagatttatatcaagaagaggcacacccaaacatgtatggagtgataatgcagcacaaataaaacttgcatcaaaaattttaccagaagtgttaaaattaagagaaattctcaaagacgaatcaattaaaagttattttttaaatgaaaatataaattggacattctctatagaattagccccttggcaaaacggagcaattgaacgacttaatcagaatgtcaaaacagcaatgagaaaagtaatcggaaaaagatttattgagtttgattcttttcaaactctgacttgtgaaattgaagcgttagtaaactcacgaccaattacatttatatatgatgaaattaactcttatcaaattcttagaccaatcgacttcatacttccacataaaaatttatgtattcctccgattttggaaaatcaggaaactaaagacccaacatattacccaaaaaagacttcatacgaccaaacaattgaattatggaagaaaaccacgaaattattagatgactattggaaaatttggactgatgaatatataccaagtctaagagaacgttataaaatcgaaaacaaaaatccacgaaattgtatgaaatcttttccagaattgaatgaaattgtaataatacatgatcaaactcccagagcaatgtggaaaactggcattgtcaaaaatgtcataactggatcagatggtatcgtaagaggcgctaatatcgaacttccaaataaaacagtactaaatcgacccttaaaattaatttacccgttagaaattaattcaaatgatgataaagagcaagaaactctctctaatctaataattaatcaaaaacccaattatttcaacagaaaaaggaagatggataatcccttagtccctataaaaatgaatagactgtttcaaaactcgttaacaattatatcattattaacattaatttcattatgttcatcttattcatacgaatgtccaaaggaacctaaaatatggaaaacgagatatacaactctatgtatcgaaaacggttttacaatcagacaaaataaaataacaaaagaattttgctataaacaattggtatgcaaagacaaacatattattaaacgacgcccaccttattgtggtgaaaaatgtaaatgtccagagggattcaaattttgtagttttgcatcttacaataaaatcaaaaatgaatcagttgaaaaaattaattaccaaagcattatttcgttcttcaaaccaaatatctgcgcaccaaataaaactgaaaactgcccaatcatgaaaagaaaattatttaattcaattgttcttcatgacaattcaattcacatagtgaaaacattaaatttacttttttcccaaattgactcaataaacaattttcgttgttttggggagggcaatctgacgattggtactccaatttactgtcgagaacatgactgttttaaaaataattcattcaaacaaatatatggaacgaaattttgcttttacgatccatacgaaaaaatttaccttgttaaatctgatgaagaattaattcaaatcaaagcatggggaactattgaaaaaatattttacttgccaaataatttaaatcaaccattcattgaaaatagacggaataaaagagaagaaaactcttcaatcactgaagaatcaaccattgagtgtttaaaaggaggcattattattaaagcaataaatgatatacaagaattacaaatttccattgaaaattatacaattataaaaaagaaccctcaaaaagaggaaataatttatttacccccaaaacttacatcctttgaatataaacctgtaattaaatttataagtaacccagataaatcaaatgagaaacaaatcacatgtcaatcatctcccgtatgtgaattaattaactgtcgattttgtatggattatcttaaaaacccacaatgtgtagaccagattcactgggcattaatgcttgtaattataatgataattttatgttatttcattaagcctccaaattattcgaatactcacacgttttatccattggattttacaatttatttttaattgttttaaaagaaaacccaaagtaaatcgaattagaaatttcagaccaaagttaataagaccattgatttatttaatcacttccagtttaatttttattcaaaatgaatttttgcttgtgatgaactggcaaa

SEQ ID NO: 264 - DNA, 1739 bp, Heterodera glycines
ttttttgaaaaaaaattttaagagacaaaacccaatccaggttttgtttaggagtcagcaattttttttcaagggcgtccattttttttgccattttttcgtataccccgaaaaaagagatagtcgtttttgaaaaaaaattataacgagcaaaacccatccaggtattcgttagggagtcagcaattatttttttccaaggacgtccatttattttggcattatttcgtattaccccgaaaaaagagatagtcgttttttgaaaaaaaattataacgagcaaaaccaatccaggtattcgttagggagtcagcaattattttttccaaggacgtccatttattttggcattatttcgtattaccccgaaaaaagagatagtcgttttttgaaaaaaaattataacgagcaaaaccaatccaggtattcgttagggagtcagcaattattttttccaaggacgtccatttattttggcattatttcgtattaccccgaaaaaagagatagtcgttttttgaaaaaaaattataacgagcaaaaccaatccaggtattcgttagggagtcagcaattattttttccaaggacgtccatttattttggcattatttcgtattaccccgaaaaaagagatagtcgttttttgaaaaaaaattataacgagcaaaaccaatccaggtattcgttagggagtcagcaattattttttccaaggacgtccatttattttggcattatttcgtattaccccgaaaaaagagatagtcgttttttgaaaaaaaattataacgagcaaaaccaatccaggtattcgttagggagtcagcaattattttttccaaggacgtccatttattttggcattatttcgtattaccccgaaaaaagagatagtcgttttttgaaaaaaaattataacgagcaaaaccaatccaggtattcgttagggagtcagcaattattttttccaaggacgtccatttattttggcattatttcgtattaccccgaaaaaagagatagtcgttttttgaaaaaaaattataacgagcaaaaccaatccaggtattcgttagggagtcagcaattattttttccaaggacgtccatttattttggcattatttcgtattaccccgaaaaaagagatagtcgttttttgaaaaaaaattataacgagcaaaaccaatccaggtattcgttagggagtcagcaattattttttccaaggacgtccatttattttggcattatttcgtattaccccgaaaaaagagatagtcgttttttgaaaaaaaattataacgagcaaaaccaatccaggtattcgttagggagtcagcaattattttttccaaggacgtccatttattttggcattatttcgtattaccccgaaaaaagagatagtcgttttttgaaaaaaaattataacgagcaaaaccaatccaggtattcgttagggagtcagcaattattttttccaaggacgtccatttattttggcattatttcgtattaccccgaaaaaagagatagtcgttttttgaaaaaaaattataacgagcaaaaccaatccaggtattcgttagggagtcagcaattattttttccaaggacgtccatttattttggcattatttcgtattaccccgaaaaaagagatagtcgttttttgaaaaaattataacgagcaaaaccatccaggtatcgttagggagtcagcaattattttt

SEQ ID NO: 265 - DNA, 1796 bp, Heterodera glycines
tggatgcttgattcatgatcagcgaccctgaataccattggaaacatattttcatggcttttgaaaattaaaaatttttttctacggggtgtaaactgtacaagtatctccgcttcctcctccgcttcttcaccaatgttggcactttcctggtgccgttattgtgccgtatgctcctcctcccccatgttttgctgttcgtctgcttccttttcgcccttccgctgttttgcgctttcttttccattcagatcaggtcagtaatactgtcgcctatcttttattccgcggcggactggccaagtgtggcttggtccagctgaggcggagttggttaccgctccttttcaccgctctcgtccctttcgtctcagcgccaaagggggacgagaatgggaggggggaagggtgactaatttggactggggtgttggatattgtcagcgacttgctgcttgcttaacggcaccaccgacaagattttggtgaagggcttgtcggaccccttgagctgctccgaacggacgggagctgctcgacaagatttgttgtaaagggtagtgcactttaggcgtccaaggttccgtttctttggccataacttttttctcacttggtcaacttggtcaataactacattcttgatatcaatcgaaagcttaaagtctttagaatattttgtagacctaaattctggaagaaaagcaacagaaacaaaataattcttgaatgtactcgaaaaagctacgttacgagttttctcgttgtaattcttctcttatagccaagtatttgctttttttacatttaaattcctgggactttaagctttagtttgataccaagaatgtaggcattgaccaaataagaaaaacatggccaaaaaactgcacattggatgcctaaagtctacatagagcaattgcttctcttttccttttgttcttgccgcctttgtccaaattttctatttgcatattattattatggcattagcacaattctcgatgtttgtccaactttcgggactatcgatgtcaatttttcctcaggtgaatttgtggctttggactttgcattgggtcaaaaatgagttggcgcggagaagtgagttaaatgatcagcaaaaatgctgatcagtgaatcaaatggcggagaacagatgaaacacattaatgagggaagtgcgcagccagcaaaataaaggcacaaattgttggcattttgttacaaatccatttcgaaaatttggatcaattaattgaacggaaagagtcatttcggcaaacattgcaaggtaattaaggcgcgccaacgattcgtcaactcagccaaaatgcgacgattcgtcaactcagccaaatgtcaacgattcgtcaactcaatgattcgtcaactcgacgattcgtcaacccagccaaaatgtgacgattcgtcaactcagccaaatgtcaacgattcgtcaacccagccaaaatgtgacgattcgtcaactcagccaaatgtcaacgattcgtcaactcagccaaaatgcgacgattcgtcaactcatccaaaaatagttttaaaaagcagtttcaagagcttttaatggcgcttagcacaattatagcattcttttaggctaatttagaaacaagaacacataaaatcacgatccttccgatgaaatattcaatcaaaaacttgcataaacaaattttattaaaccaaaattcaaagaaaaaaacgaatcaaaatgatgattatcagggattgaggttaaaacaaatttcaactgatattatagggtgaat

SEQ ID NO: 266 - DNA, 8650 bp, Heterodera glycines
  unsure (1)..(8650): unsure at all n locations
ttttgcccatcgtatttcaatctcgaccaattagcagaaaatattaaagtgattactaagtctgatgccccgtttccgtaaaagccatttttactttgtttatttggacggccacacancgtctttcatgtcattctantcgaaaataaataaattaaagcttttttagaaggattcacaattattaanaattagcgagtgagagagagaaaatggaagtgccaaccgttggagaggaccacgaggacttggaagaggatgcggtgagatatatcgtattgaaaaaggaagaggggggggggggggagaatttccagatttcgtgatcagaaattagccgcgattcggggtgggatggggaccaaaaacgggatgattttctcgactcggacatcactcgcgatgctcggtctaccctgtttaaagtgccantacataaaatatgccatttcaaaacgaccattattggaaaattttattttttatattttctcgaaattaagactcgaatcagtgccctctacatgggcattgaccacttcctccatccccccccccccgcctcccgccttctctctttcttcctctccctttttcaaattcccttctttctcccatcctcttgctctccctcgattctctaaattaatattcggatttttaaattggatttgtgccgttcggtgactaccaaaggtggcattcccatgacccgaatgagaccgaacaatgtttcattgttcttaatcaacggcacggcagaaaagccgtccactcagaaggacaggtggcgatcactgatcgtcattcactctctcccaaaaaatgaaaatgcttccaaatgaattactttacgaaattgttcacagtcttccgtttgacatccgctgggccacctccgtccgtgtgtcggcttcctttgattattgggtcattaggcgccaatcaatttggctaatcattgagcataagcgtttaatgattttgaaaaaaaaggtctgagacattgactttttgctccatggcttatgcaaaatttgtaaaaaaaactccaataaacaccacgagaaaaaggcacacagattggcatactttttatttggacatttagctaatttatacaaaaattttcaaagtcgtgtgcccggcagtgccgaggcatttgttgttaagaaaatcggtataataattttttcaaattaaggtgggaatgctaattgttgagggccaaaatctgcgcaacctcgtccgccgattgagtccggacaaaatttcttccgttgtgcgtctgttgaccgcccatttcgctgttggacgtgacttcggattgcagttcgtcaacccgaacgcgttcacaccggcgcaactcgccatccgacaaatcaatgcgctcattaacaacattgaccacagtaacggaacagccgtggccaatgcgggtcattgtgagtaaaaacttaaaaattacattttatattaactgtaggatttgaattaaaattattaaataatcaaaatttcatttccattttggaagtttcattttttatattttggttttattccattttaggcctttttatttaaattcatgtttaacattatgtcataatagtatcttttttgatcaaaaattgttggattcgatggaatttgagttttgggaaattttgcatcaaatcttatcttgtttagtctcaaatccggcataaaattaatcaaaacttttttggggcactgtatcattttcatctttttcagtcttacacgagttggtgaatgcatttgagtgaagttcggtcgacggctgctgagcagtgatttggcttttgctttttcctctgttttatgacaggtcactgagtgccgcgagaattgccaatttttcttttcgggaaaaattacatgaattttggaattccattcccaagaattttgacatgacaaaatacctaaattcatttctttgtgcttggaaatattttttctaaaacggctaagccaaaaaacaaagttggcaaaagcacaaaaatttatccgctttttcaaagtcttctttcatcattttttcttctttgtccgattcttcggtcaaaatttgttggatttgttcacttaatcaaatttacatccatttggccgccattccatcactattatttgttgaatttccaaccttttgtcaaacgctgaacatttctaatgccttttccaattttctaatatttttctctgctgatcaaccactcttacagaattttgtcgaatttacaatcattgccaaattttctctcaaattatgccctccttttttcaaatgcttaatacatatgcatttttaaatcatcataaattcccgtttttgttgccattgcttttaattgtaatcctttgtttcaaataaactgcgaattgaatgaactcaaatcagaattttatcaataagaccattttatatggatatgacttaagccgtgcttaaattcaaatcgaaaaatcccattcaagagccaggatttagggtgacccgggaatttcgggataaatcaatcacattttaggctggttccctgtgctgacatttcgtcctcacgtttattgaatccaatgcgatttctttttttttgcataaataattttgtcgctcgccaaatttaacaacaacaaaacaaaaaggaaacggagaacaaataaaacaaaaacaaagtacaaaatgtgaaatgagtgaacagaaaaaaaagtctgagaaaggacaagggacaagggacaaaaacaaaaaaatgtaataaaataaaaaaataataaatagacgaaaaacaaatgaaaacgaaaagaatggacaaatgaaataaaaaatgatgagcgacaacggatgcaaaatgatccaagctgatcagagcaacaacaaaaaaagcggtaacacaaagtgtgatgatggtatgtgtgtggctggggaggggagacggacgaaaaaaccaagacccattccaacaatgcacgaatttgaatttgggatacctttctagaataattgccaaaagtagtttcggcacttttccgtcaactttctcatattttgtagccgttaaattgcggtattccattaatggttttgcatttccaaaattacaattttaaattagcattccgttaccaaaattggtgtgtgctttttgactgactccgttttcgagaaaggtcgaaaggcccatgttttccggattttaatttccggtatggcgggggattaaattccgaatttcgtccgtccccggaaatttggaatgaattttgagaatggttctgtctgtgagtggcgtgcagcggggctcgtcaatgatcacaattggtactgtgtgcccagcctttgcttcaacggttccggaatttgagcgacaaaattgttccaattctcatctcccacttgtgacttgaaggcgtaaataatctgaaaataaaataaaaatgtggaaaaataattatttaatatgacgtttgctatcatttaatttagtgaattttcatcaaaattcgtaaaaaatgcgaattgatacgtttttctccctttccgtcgaaaaatgtttacattttggacgggagacaataattttgcagaaaagattgttaggaaatgcattagaattctttgattttcgcattccaatcttttcattccaaaaactaatttgtttaaattttcaaataaaaaaaattcaaattttttacaaaaactacaataaaatgcccgtctccatgtagttaggctacacattgagacaaattattaaaaattggttggaaactaagaaaaatttgaggtaaactatgctataattgcccaattaggaacactaattggggggggggggggttgggaaaagcggtgctcaccctgccgaacatgaaaacacacgggcaaccacttggttgatctcgggaacacggacggttcgcccgtggtttttcgttgcgaccagttcgccgcccgtagaaaaatgtattcttttggccgctataattatttcacaaaaaatttttgattcattttatttttcgagttaattgttattgatgaaggaaggtgaaactattaggcgaagcgttaaaataattaacgatagtttcttctttatttttggcaaattattgtatcagtaaaattctggcgatggatacataccagggatgtgccgaatcggaatcgtaatcggaatcgcaattaatcggattttgggccataatcggaatcggataatcgtaatcggaatcgcaattaatcggatttttggccataatcggaatcggcgatttaatcggaatcggattttgtctggctcggcacatccctgatacatacggaggaatgattgaaaaaggcgaagccgaccggtttaaatggtgctaggtcattgcgcgaaaatagcaaaaatggcgtttcgcgaaaagtgcaattttaacaaaagagagcgggccttatcagtacgattcttgtgataaaatgatttttaataatttcaaatgtttgttttggtccttaccataaacacaccactgcaaaaaaacaaaccaaattataaaggtttataaaattaagttctttttaatagcaatttataaagaagcagagaaaatttaaaataatttaatttcgcccagccgttaacccgccaccgtacaaaagaaaaactaaataaattggaaacattgaaattttttattattatttattaacattgattatttaaagaattcatttattattatctgaaaatctccgcgttcatagtaaataaagtgaacatttaaataaattaaaaagaatttattgttttaaaaaacaacaaagaatgttaaaattccagtaaaaatgaaaagtaattaaaagtattcaaaaaattgaatgaacaaaaaacataaattattaaacaaatattaaagtttatttatcgagagtctcggacctcgagaaaagtctcgtgttttttcgatttcggtcttcaagactgagacttttttgcatccctaaagattggcttttagtgaaaaaaacaaaaaaataaattatttaattttttttttgtataattctgaaagttttgctttcctaaaattttcttataaatttgaaaaatgaatttttgaggccttgtctaacaaatttgctttttttaattttaattcaattaagtgtacatttattatgttttatcaatccaaaaatccacaaaacaaaaaagttgtaagcctttttcgttcgtaaattggatttttccctttcgcattggtgaaccggggggtgggggggggcgatcagcgttggttgattttttaaaactcgagaaaatttgtttgtgacttttgagtgaatttaaaaaataaagaatttagatcttcggcgataaagagggcaaattctgaaactataatgtaatttgaaaaataggaaaaaatggacgatggctaaaataagcaaaaaaaaaaaaaaatattttataaataaaaattaaatattttttatttcttaaaaatcagtgaattatcgatttgtatattaatgccaacaaaataagaaaaccttttagtaatatttgatgaaataaaattacaatattaaagaatatttttatacaaatacttccattatatgtaaaaatgaattggtggcatttaattttatttattatatttttatttatttttgtaattgactccggcaaaatccgaccgaattttgatgaaatatttggcgacggatgggacaaaaaaaattaaagtgaagaaattatggctctagtgcactttatgagtccaattgagttttatgtgtccaatcaattgacaatccctggtttttatacaataactttgttcatgctcgaacaaaccctatctttttggtatcattcgaaagcacaaagtctaaataatgtaataatacgagaaaacaagagaattctaatatttcaagaaagttacaaaccgaaataatcaactatgcgttatatctcatcgatcttctttatgataatctccgacaaaccaatcgtgaaatctgtaccgtaattcacagacggatacagactcacgatatcgtaaacgctaatttttttcttctcgtccgattttgcaaacaatttcatcggtccggtcctccctcccgcatatgccatcctcggatcaatcggccccttctcatttcctctgtcgtcgaagaagcccctcatttcctcatcctttttcaattccttctcaatttgacacccctaaaaagtagaatttataaattcaaatgtcaaataaacatacccaaacttcttcgacatccaaagtcttccgtagctccactaatctctcctgagtctcatcgttcaattcctgggccgtccttcctccaatcagttccgccgccgggtcataacaattcaaacatccatgtatgtaacatcccatcacttcaatgcacttgtccctagctccttcattcccaataaatccatccaatttgtaattcccaattttaacttctcgtccgttccccgcgtgccgtatctcaattccatcccgctggctccgccactccaaatactttattgccatcacactggcgcgatcacaccgctcatatcccttctccggcacaatcgataactgctccgtcaataaaaacattgccttaaaaatattcatcgcaacccccgcattcgtacaactcctcggtagtgggtcaaatcctttcgtaatgtcgttaatcaatatccttctaaactcaataattgacagcaataaaatctccgtgtcgtttcggcaataatttttcaattcatcatccaaataaaaaggtgtctccttgttttcgttgtacctgaaaaaattatttattgttaattttgtccttcttttcttaccatttttcgaattttataaatttatccttgttcatagatcccggcgaatagtcctccatcggtggcagatgttccaatcgtattccataattttctttcttgttgtaataatatgggaaaaagggcttgtcctcacagtccaaattaaatgtcgccttcagcgactcaagcttcaccggcatcaataaacatgagtctctccaaatcagctttgaatgtttcttcgagttttgcactttaaattcataaattttcaatccattgatgagcggtagcgggttcttcccggtacggcagaggtaattaaaaacaaaatgacctaaaaatttaggatttaaaaatttagattaatttttttcattaccgtcaaaacgtccggcgttatgtgcaaatatgtacgtatcgtaattcgtaaaagcagttaaaatccactccacaaaatccttggtcggctcatgtccctccgcctcgctccaatccttgatcctctcctccccacaaattttgcaattcgtcctgtttttgtcatcacagcattccgtacacgtaactctcaccgaaatataattaataacatgctccttctggtcccccttgtaaatagaatcctgcgaagtctccgaatcctggagttagacttattattgttgattttatttgtagaacttacccaaactacaattctgtagacatctttttcctctttctcctcgatcggcataatataacacccccgcttggggtcatggctcacactacaaagctggcaataagtctcaccgcattcatgtcccttcttcgtgttaaataaatatgtcttgtcacaaatcacacaacgtttccataatttgcaagtctgatgtccctgatgataattataacactcccaattgtaaaagtaacggtgacactttgggcattcaatcttcactccactctccttttcacatggcattccccccactctattgcaataataacatctcgcccggcaatcgaaagtatgtttgacatccttgtcaaaaaagcactcacaatcaatacaaaattttctcccacgattaaaaaaacagacgtaattcttcagaccatcccagtgaccattctccaaaaatatcggtacgaccttctctcgtcccataggggccttccacaaaacacggatcgatttccgcggatccgcagatttttcaaacgccacaacccggtactttccggggtaaatctcatcctgaaaaatttattaattttgcattttttcatttaacccacccaatatttctgaacattcggcaattgctccacaccatagctatattcgttaatatcaattccacaattatgtaaaagctcaatagctgcgtccctctgtctcataatattgttcataaatcgattaaaaatgtttcgatgcacttccaaataaagctttgacgccaccaaagcataaaacaaacaaaatttatccgcatttgtaatccttaataaaattattattatttacatttattttttctttattatttaatttatttttttaaatttatttttttctgttttttttttgctgctttgcttaataaaaataattatttcttttttttctttactttaattattatttaattttttttttgattttttaaattttattttttatttatttaatattttttaattatttattttttgattttttaaaaatgtaatttttatttattttttggctctattaaattattatt

SEQ ID NO: 267 - DNA, 931 bp, Heterodera glycines
ttttccatttcttcagcaaaaattatttctgaacaaaaaaaaaatttttttgaaataatttcttaaagggtattatcttataattgtatttataattgtttaagaaattattttttttatttaatttattaaaaatcacttacccgattgatcggaaatcccattttttggccaatgggacggtgggttggaaggagttcacgcgtttaaaagacattttaaacaagaaattgcagcagaagaattaaagagggtagagagattttaaaagaaaaaagacgtaagtaaatagtaatagatttaattaattcaattaaaaatagagcggagtgaattaaaattagagcgcgaagagagtttaatgaaatccaactatttagttgaatgattttcgatttgggccgggtgtacggattgggcgagaggggaggggtctagtcacgtgactgtctgggtttgccttattttagggggtcatcaatcatttcggtagacagctgtcacattttattcaaaaaccgtgcaaaaatcgtttggatattccttatttcgaaagtcatcaatcatttttttttgacaggtttgcaaaattacgggccatattgcgaaatagttggaacagaaaactaaaaataatggagacatttaaataagaaaccaatcaatcacattttattgacagttgacctaatttaggggagatattgcgaaataatttgaacaaaaagtcacgtgcagattgagaaataatggaagaaaaataaaaaacccatcaatcaatttttagttgacaggtgaactacttttgaaaaagtttttaatttatttattcattctttgattttacttttaaattggatttaaatagtaattttattgtccaattcataatcgaaattatttgctgccaataatcaattaatttggactt

SEQ ID NO: 268 - DNA, 1559 bp, Heterodera glycines
  unsure (1)..(1559): unsure at all n locations
actacnctttttatcacttcacagtgttcttggcgtaataaaaatatattttttagctgaatttattttgcatacataatatatttcatttaatttatcgttatttttctttgtaaagccaacgctgataaaataattattatttaagcctcacctttgttgtgctcaatgaaaataaattagaagcaatgcaattttaagagcataaccgtaaaagtcacaattttatttaaaccgtttgtttttcttttcttccgaaaatttctccattaaggtattcctcctcaaatgtgccccagtttctgaaggaatatgagtataagctatatttttaccgttcaactgtcgtcaaaatattattttaaaaattatcattttattactttaccaatccataaaactactacttttttatcacttcacagtgttcttggcgtaataaaaatatattttttagctgaatttattttgcatacataatatatttcatttaatttatcgttatttttctttgtaaagccaacgctgataaaataattattatttaagcctcacctttgttgtgctcaatgaaaataaattagaagcaatgcaattttaagagcataaccgtaaaagtaacaattttatttaaaccgtttgtttttcttttcttccgaaaatttctccattaaggtattcctcctcaaatgtgccccagtttctgaaggaatatgagtataagctatatttttaccgttcaactgtcgtcaaaatattattttaaaaattatcgttttattactttaccaatccataaaaatactactttttatcacttcacagtgttcttggcgtaataaaaagtcattcgacctctccggtatgttatgttcgaatccctaataatttttatgcggctatcattccctaatcgagttacagactcatgactaaactgtccgttgcctcaaaaacctcggggatgacttaaataagaaattattttggcgacccaaaaaaaaaacaataagaatactcacttttacattttggaaaagaaattttagaaaaagttaaaaacattattagtgaagtgattaaagttaattattattaaattttgtctttccgttggccccaacgactcttcttaactgccacttttgtttagaatttttgaattataaaaatagcgcctacttttagagattttttttagaaaattagacttaccgtattttgaaccccctcccccccccgcccgggttctatttttcaaccccctcgaaaggagggttctaattcaggggggggggggttcaaataccgtaatatacacatattaatcaagcactattttctaaaacatatgttaggagttcagcaaaataacaatggttccagggcttcgatcgctgaacacagatttcaaaaatccagcaaatgctagcgtttccaggccatgactagcaaaaaatttatttaaaaattccttactgtggtgcccaaatttccacatgaaatggccgcactaaaaagcgctgccgattcacaattttctttccccatcacagaac

SEQ ID NO: 269 - DNA, 1301 bp, Heterodera glycines
ctgcatcagtgagcccttgcaacggcgcaagtccaggcactttcggcgccgaacgcgccgctcgcccggcattgtgcacggcgtccatgggccccacaagctgaagtagccttcggactggaaaattttcagccaaatttttggtttcaaagagttaggcccctgtaaaaatttttttgaccccttcaaagcgttcttctggcgatccgtcatccaacgccacaatttcatgctgttgagtggccgccatcaccgtagtcgttggctgtggtggtggcgacagtgtcgagacggaagagccggagccaaaggcgggtacggtatgcaacgacaccgtttccgatgggaatatttcggtggagaaaggctgtgaaaaacattcaaaaacttacttagtgaaaaatttctatgaaaatttctgtgcagcatatcgccggcgtgaaattttaggcataaaaatcaataaattttgtaaaaaaaaatatatgggaaacctaggcgtcaaatcctgacttaattttgcaatttttcggagtgatgcccttgataacataaaaatttcattgtaattgtttttgggcctgatttcagtgaattccagaaaaccctcaaattgtagtcgtaaacgcctccccatcctcggttcgattttttatttctcctaatatgggcatgcttttccaagttacctttattttttggcacaactttttggcattttgactaacccttggcctctgctgtcgctctttgatcagtttcaagtgcaaacgcttcgtcgactcgggccccttccgactgatcagacggatgccggcggtgctgatattattattattgctgttggctgaaaaaaggaaggcgcatttaattttgccaaaaaaaataaaataaaattacaaatttcgaaaaaactttttccattaaaaattaaatatttttcaatattttaataaaaatgttttatttataaaacccaaattttagggaagctctgggcggctttgggcttattcttcttgggggggggggggggggggagtcggtcggagtcatttcgtcgccaaccgcgttaacactcttatttatccacataaaattttgtagaattgataggtgctatgactagggatgggaatttaagtcacgaaaaatctcaaaaaagtcgacttcaaaagtcatgaaaaatctccaaaaagtcacgaaaaagtcataaaaatgccaaaaagtcacaaaaaatgcaaaaaagcactaaataaacccaaaaaaagtcctgaaaaaattagcctaaatgtaattaa

SEQ ID NO: 270 - DNA, 9587 bp, Heterodera glycines
  unsure (1)..(9587): unsure at all n locations
tttcgncaaatttggtcaaaacggacaaagtgtcgacactcaaaacggacaaagtgtctacacacttgctgggacaaagtgtcgacaccgtgttttttgtgcgtgtagggcagtggcaagtgcatgactgtctgttttagaccatttggtcaccacagggacaaagtgtctaccccgtgacagtgggtcgacgcgatgtcatccactggccatttgacaattttcttttattggcttccactggccatttgacaattttcttttattggcttccgctggccattttataatgtttcttttattgtcatccactggccattttcttttcttggcatccgctgaacattagacaattttcttttcttggcaaactgctcacgggtgccacgcatgcccattccaactgctcacggacgccacgcatgcccattcgccaagccttcggattcaaatgctgcacgggcgccacgcatgcccattccaactgagcacgggtgccacgcatgcccattccaactgctcacggacgccacgcatgcccattcgccaagccttcggattcaaatgctgcacgggcgcctcgcatgcccattcgccaagccctcgggttccaactgttcacgggtgccacgcatgcttattcgccaagccctcgggttccaactgttcacgggtgccacgcatgcttattcgccaagccctcgggttccaactgttcacggttgccacgcatgcctattcacaaagccctcgggttccaactgctcacgggtgccacgcatgcccattcgccaagccctcgagttccaactgctcacgggtgccacgcatgcccattcgccaagccctcgggttccaatgctgcacgggtgccacgcatgcccattcaactgagcacgggtgccacgcatgcccattcgccaagccctcgggttccaactgagcacgggtgccacgcatgcccattcgccaagccctcgggttccaactgttcacgagtgccacgcatgcccattccaactgagcacgggtgccacgcatgcccattcgccaagccctcgggttccaactgagcacgggtgacacgcatgcccattcgccaagccttcgggttccaactgttcacgggtgccacacatgcccatttcaactgagcacgggcgccacgcatgcccattcgccaagccctcgggttccaactgagcacgggtgccacgcatgcccattcgccaagccctcgggttctaatgctgcacgggcgccacgcatgcccatttcaactgagcacgggcgccacgcatgcccattcgccaagccctcgggttccaactgctcacgggtgccacgcatgcctattcgccaagtcctcgggttccaatgctgcacgggcgccacgcatgcccattccaactgctcacgggtgccacgcatgcccattcgccaagccctcgggttccaatgctgcacgggtgccacgcatgcccattcaactgagcacgggtgccacgcatgcccattcgccaagccctcgggttccaatgctgcacgggtgccacgcatgcccattcaactgagcacgggtgccacgcgcatgtgccggtagctgctgctgcacgaacatccagacacgcatctttcggtagctgctactgcccagtcaacctggactgtgcacccgttactggctacaactcgaccggctagggtaagcaagtgcacgctccccacgcatgccctcagagcggctagttatctatatataaaaaaatggggggggctctttgcaaatgtggcccgcacattgcgaattctgcacctatcgacccaattctttttgcgttagccaactgatctccccttactccaacttcaccgtgcaaaaaaatttgggaggccctcggcgctgagcaacgctaacctgttttcgctaagtgttgcgcagcgcccggcggcgcacagctagcggctgggcgccgcttggcgaaatgcgtgccatgccgtggggagcattttaaaaaaaaatttggcccgatccgacaacttggcgccgagatatgctaacttttattggcctgtttgcgccatgtgcagccaacttttgcgccgttaatgctagagagtcagaatttttttccccgcgcgtcccccaccctgaaaggcttgaaaaaaaaattgccgtctttcgccgggcgctttgcgccgagatatgctaacctgtttttgctaactttgcgtggcgcccggcgctgaagtttggcgccgcttgacgaaatgcgtgccatcccaaggggagcataatggaaaaaattttggcgccattcgactactttgcgctgagatatgctaacttttgttgcccactttgcgccatagagagccaacttttgggccagcgatgctagagagtcagaatttttttccccgcgcgtcccccaccctgaaaggcttggaaaaaaaattgccgtctttcgccgggcgctttgcgccaagatgtgctaacctgtttttgctaactttgcgtggcgcccagcgctgaagtttggcgccgcttgacgaaatgcgtgccatccgaaggggagcataatggaaaaaattttggcgccattcgactactttgcgctgagatatgctaacttttgttgcccactttgcaccatagagagccaacatttgggccagcgctgctagagagtcagaatttttttccccgcgcgtcccgcaccctgaaaggctgggaaaacaaattgccgtctggcgccgggcgctttgcgctgagttgtgctaacctgtttttgctaacttttcgcgaatggcgcctagcgcctggcgctgcagagtagctgtcttgcggttgcttggcgaaagttgcgccgcgccatggggagcattttaaaaaaaagttcgacccgattcgacaagtctgaagggtcgaaccccctttagcccctggggggtgcaaaatgcaaagtcgctattttcgcgggaagcggtgtttttttagtgtaaaggatgggcgcagacgtaaaaagcacatttttcgcaaatttggtcaaaacggacaaagtgtcgacactcaaaacggacaaagtgtctacacacttgctgggacaaagtgtcgacaccgtgttttttgtgcgtgtagggcagtggcaagtgcatgactgtctgttttagaccatttggtcaccacagtgacaaagtgtctaccccgggacagagggtcgacgcaatgtcatccactggccatttgacaattttcttttattggcttccactggccatttgacaattttcttttattggcttccgctggccattttataatgtttcttttattgtcatccactggccattttcttttcttggcatccgctgaacattagacaattttcttttcttggcaaactgctcacgggtgccacgcatgcccattccaactgctcacggacgccacgcatgcccattcgccaagccttcggattcaaatgctgcacgggcgccacgcatgcccattccaactgagcacgggtgccacgcatgcccattccaactgctcacggacgccacgcatgcccattcgccaagccttcggattcaaatgctgcacgggcgcctcgcatgcccattcgccaagccctcgggttccaactgttcacgggtgccacgcatgcttattcgccaagccctcgggttccaactgttcacgggtgccacgcatgcttattcgccaagccctcgggttccaactgttcacggttgccacgcatgcctattcacaaagccctcgggttccaactgctcacgggtgccacgcatgcccattcgccaagccctcgagttccaactgctcacgggtgccacgcatgcccattcgccaagccctcgggttccaatgctgcacgggtgccacgcatgcccattcaactgagcacgggtgccacgcatgcccattcgccaagccctcggattcaaatgctgcacgggcgccacgcatgcccattccaactgagcacgggtgccacgcatgcccattcgccaagcccttgggttacaatgctgcacgggcgccacgcatgcccattcaactgagcacgggtgccacgcgcatgtgccggtagctgctgctacacgaacatccagacacttacgtgaaaataaggaagcgaaaaatatacgacaccaatgacatgaaaataaggaagcgaataaaatacgaccaatgtcaaagacaaaaccttaaagcactaggcgattggaatatatgaaaaataaagcaaagtcaaagttaaaaccttaaagcactagtcgattggaataaatgaaaaataaagcaaagtcaaagtcaaaaccttaaagcactagtcgattggaataaatgaaaaataaagcaaagtcaaagtcaaaaccttaaagcactaggcaattggaataaatgaaaaataaagcaaagtataagactaaaccttaaagcactaggcgattggaataaatgaaaaataaagcaaagtcaaagtcaaaaccttaaagcactagtcgattggaataaatggaaaaaaacaaagtcaaatacttatcctacctaatttcatggtgacgaggcatttggctacctttaagactcccttaagagagacccttctcttctcatgtgcaagaatattgctttctcgcctgagcgggatttcaatttagaggtgtttaatcataatcctttaggtggtagcttcataccattggtctatcgaccaagcccagctcatgttccctattcattggcttaacattcagagcactgggcagaaatcagacacggtcagcgcccttgcgcttatgctgccatcctttaattgccgtaagcgaataaacccttggctgaaatcatgcatgtctaattgtgtcaggaatgaacacatcgttcagacaggataaaccaaaaaactgacagcgagcgttaccggcgcttatattacagcctttataacagccaaagtttcaaccaaacaattccttacgtcactacatgcctgacaaaatgctcaagccagcacttgcccccgacgggtgcgctcaaaagagcgaaatactcacaaaatccaaaaagtgcaaaatggaaaagtgtaaaacaatagtattaagttaaaacactagtccatttatggaaatattgttacgaatgatgttcgtaggaatctgttacgagtgatgttcgtatcaatgtgttacgagtgatgtccgtaggaatgtgttacgagtgatgtccgtaggaatgtgttacgagtgatgttcgtagcaatgtgttacgagtgatgtccgtaggaatgtgtatcgagtgatgtccgtaggaatgtgtcacgagtgatgttcgtagcattgtgttacgagtgatgtccgtaggaatgtgtatcgagtgatgtccgtaagaatgtgttacgagtgatgtccgtaggaatgtgttacgagtgatgtccgtaggaatggttgttccaatcgactagtgctttaaggttttgactttgactttgctttttattcaattaacttgtggttaactgttttgagtttaattttggttttgaatgtgtggagtgaggccgtctggggcaagcagtacgtgagtactctgactgcagtaggagaaaacgtattgaggaataataggtgtcagaagtccaagcctctggacttactgtagccgttatcagcttatcggtttatcttgcccagcgatgtgttcagttgctgatatcattagccatgcaatgaatttgtgtttaatacggggaaagaagacagtgcatcttttacacttgtatgttagtcacccgagagcctaagactgtgcacggtttttggttcgtttggatggccgtcccgggtaaaagcgtacctgtatttaagatgcacttccgcgattctgttgagcttgacatagttaattaaagagtttgatggatacgcttggtggagcgttagtgcatagaatcaaatggtggtagtagcaaatattatcagcacatcctttgggttttgtgtaggtagcttgcgggttggcgccgccgcaggctatttacgccgagctcattggatgtgtctctatgatgaactagcgtggtactaccaaatgcccgtccgccgcttgctgacgacagacccgttcgattgggtctgtgcgctggtaatgattcatggatttattgctgggttggtagtgaatggtaacggtgaaacgcgttagcgcgtcagtgatttgtttttggaatctgttgaacttgacaagaattttttacagagtttgaaggttacgcttggtggagcgttagtgcatggaatgatttattgacgtttgctttttttcactataaatccgagttctgaaaattagctagactcttgatcagagctattttgtacaaatggaaattgcgtgcgagtttggattatgtatttctggtgttaatgttaaactagcgtggcagcacaaaatgcccgtctgccgcttgcggacgccagaccgttcgagggggtctgtggcgctggggataactgtttttggaatctgttgagcttgacatagttaattaaagagtttgacgaatacgcttggtggagcgttagtgcatagaatcaaatggtggtagtagcaaatattatacgagcgattagccatgcaatgattgcaggtctaagaggtgtcaggagtccaagcctctggactttaaactctgagggtcaagggccggtccccgcctcgggactctaaagatgcaggtggccagccgtgccggtccccgcctcgggactctaaagatgcaggtggttagcaagagccggtccccgcctcgggactctaaagatgcaggtggccagccgtgccggtccccgcctcgggactcaaaagatgcaggtggctagcaagagccggtccccgcctcgggactctaaagatgcaggtggccagccgtgccggtccccgcctcgggactcaaaagatgcaggtggttagcaagagccggtccccgcctcgggactctaaagatgcaggtggctagcaagggccggtccccgcctcaggactcaaaactctgagcacattgtacggtgatggctgctgctggggtgccgcttttggtggtcttagtttctccagcttttggcagctgtcgaaaaaataaacatcagctttgctgttgttaaagaaatttggcgagttaactgacttgtgtaaatgtggcttaaggcacaaatgctgtgcaggaactcagcactatggatcctgtgattgttgtcagagaattgacgtttgctttttttgctcaataaatccgagttctgaaaattagctagactcttgatcagagctattttgctggggataactgtttttggaatctgttgagcttgacatagttaattaaagagtttgatggatacgcttggtggagcgttagtgcatagaatcaaatggtggtagtagcaaatattatcagcacatcctttgggttttgtgtaggtagcttgcgggttggcgccgccgcaggctatttacgccgagctcattggatgtgtctctatgatgaactagcgtggtactaccaaatgcccgtccgccgcttgctgacgacagacccgttcgattgggtctgtgcgctggtaatgattcatggatttattggtgggttggtagtgaatggtaacggtgaaacgcgttagcgcgtcagtgatttgtttttggaatctgttgaacttgacaagaattttttacagagtttgaaggttacgcttggtggagcgttagtgcatggaatgatttattgacgtttgctttttttcactataaatccgagttctgaaaattagctagactcttgatcagagctattttgtacaaatggaaattgcgtgcgagtttggattatgtatttctggtgttaatgttaaactagcgtggcagcacaaaatgcccgtctgccgcttgcggacgccagaccgttcgagggggtctgtggcgctggggataactgtttttggaatctgttgagcttgacatagttaattaaagagtttgatggatacgcttggtggagcgttagtgcatagaatcaaatggtggtagtagcaaatattatcagcacatcctttgggttttgtgtaggtagcttgcgggttggcgccgttgcaggctatttacgccgagctcattggatgtgtctctatgatgaactagcgtggtactaccaaatgcccgtccgccgcttgctgacgacagacccgttcgattgggtctgtgcgctggtaatgattcatggatttattggtgggttggtagtgaatggtaacggtgaaacgcgttagcgcgtcagtgatttgtttttggaatctgttgaacttgacaagaattttttacagagtttgaaggttacgcttggtggagcgttagtgcatggaatgatttattgacgtttgctttttttcactataaatccgagttctgaaaattagctagactcttgatcagagctattttgtacaaatggaaattgcgtgcgagtttggattatgtatttctggtgttaatgttaaactagcgtggcagcacaaaatgcccgtctgccgcttgtggacgccagaccgttcgagggggtctgtggcgctggggataactgtttttggaatctgttgagcgacatttgctttgaaattacacatgaatgaatattggagtagtggttggcgctaagggttcgccgcacgtgaatggaatgatacgagcgattagccatgcaatgattgcaggtctaagaggtgtcaggagtccaagcctctggactttaaactctgaggttggctccaacgacagacccgttcgattgggtctgtgcgctggtgtgtccagggcgggtgggctcggagaaattcctttatatgggttggtaagcgagacttgcttgtcgttgtcactattctgttatggcagatggatggcacgtttatcaaactgttcaaggcaaaagtagacgagtactcactctcctgaccccaatatactgagcctactggagcacctggcgagaaccctaatagggccatttacctgggggttaagcttggaatctggtacagtggattgggtgttgtgacactcggagttggtatactgccctgtgctgcacatgttgaagccaagtggtaaggctgctgtgtggcaatgggagatgccgcctcgattccagtccccgcctcgggactctaaagatgcaggtggccagccgtgccggtccccgcctcgggactcaaaagatgcaggtggccagccgtgccggtccccgcctcgggactcaaaagatgcaggtggctagcaagagccggtcctcgcctcaggactcaaaactctgagcacattgaacggtgatggctgctgctggggtgccgcttttggtggccttagtttctccagcgtttggcagctgtcgaaataataaacatcagctttgctgttgttaaagaaatttggcgagttaactgacttgtgtaaatgtggcttaaggcacaaatgttgtggaggagctcagcactatggatcctgtgat

SEQ ID NO: 271 - DNA, 4542 bp, Heterodera glycines
  unsure (1)..(4542): unsure at all n locations
cgccaataaatatacctttttaacattaaaaattttgaatcgggagcagtgaggaggggggggggcttgaggacccactgggaccgtccttgaaaccgactgactcgattccgtgggatccgctgcagaaagtccagatccgtcttgtccgacacgccgccatgggccacaaacaattctttgtccacaacagtggccaacgggagcctgggacgacagacatatattagttgcaacaatatgtctgtctgtgttaaatgactaccaagaaaaaatgtcttcaagcaaccgtatgatggcggaggcggagtccttgtactgtaacgtaaagcaagaattactgtaattactgtaaaattaataaacaaataaatttttccatgattgtctaacacatacttttgtctgcaactccttgacgaaaccgtacctaaatcgtaaaaaaattatatggtcccggatatcataaagtcaatacagtaaccagaggcaaaaaaaaaatggaaaatttttgtgaaccctccaaagcaacgaaatttttcattcttgaatatttcgatagccttaaagttctctctctattggactactaaaattacaacaaaaaataataataatttaacatttaaaaattatggtcaaaaaaacttcaaaaaaaacacacacacacacactagtatatcttatatttttggtcataactttatttaaaaaatcaagcgaaatttctgaaaaattttacaggctaacagagagagagagagagagagagagagagggagagagagagagagagagggagagagagagagagagagagagagaaagagagagagagagaaagagagggagagagagagagagagagagagagagagagagggagagagagagagagagagagagagagagagagagaaagagagagagaagagagcacttagatttatcgaaaaaattcaacagcaatttagtagctttttcggaaattttgaataatttttttttgtgcaattttcctattaatattggactgaaaaatgccaccacctcaaattcattatgtggtcttcatggtttccccggttaagcgccaccgctgtcggatgaagcaccataaaagttaggagcacagcaagcacctcgatggactgacctccccggtcttaatttgttgttttaaaaaaagtgaaatatttttatttaaaaatttaatatgtaagcaatttttgaaaaaaagaaatattccaatttaaataatttaaattaattttgataaagatttaaattaaaaaatgaatgtttaatcacaaaatttctagaggcaatcaattgaattaaaatgatttttgttggccaattaataacagtaataatttaaatgtcaaaatggctaattaaaactgaaaaaatgaattatttcacaaaaattcttcttggaaattatttgaatgaaaattataaatttttaatgcttattaaaattttgccttaaatatcattccttaattttatataattcttaaaattcaacaaaaaattattttgcttttaatggaaattttgaaaaaaaactcaccgacaaagtcaccattaaacacgtaactaaaatttaaaaaataaatttaattgtataattaattatatttatgactgtttacggattgtccaatgatgggaaaccattctaaaaaaacgggttttcaatttaaatttttttttggtgcgctaactttgtgcaaaatgatgcacaggtcgtcaaatttgccgtgcaaatcgccgcatatcgtaacctggcccgacatgttggtggacagatgggttacggtaggcatcactttcagcgatttacgcgcctcgtgcagaatggtcagaaggtagcgggcgggcaaaacctgaaggcacacaaaatttaaatttggaaaatggttttttaagaagtaactaactataattttaactaccgaagggtcccactgaatttattcctatgtatagtatctcctcaaatacagtacctatccccaatatagtctctgtcccctcccagaaaataaatgtgtccggacattctgtcaatgaaagataaatcggtcagcaaatttcatttttttcgcaaatttttcaaaaatttttgtagaaaaatattttttaataaaaaattgtcacaataaatttatcattttatagaaaatctttaaataatttttcaaaaaaaaaaatttccattaaatccatataaattctttgatcatttaaatgcccgataagttgtaaaatttgtttaattttcgaattttaattagcaaaaaaattttaaaataaataaaaacattttaaaaatttttggcactttattttgtttgaagtattcaagcattgtttccacatgtgcacttcgcaacggcaaactgatagtcggccctttgtacgatttgtcgacccgaaaatgttcagggtttgcaagttcccacaatttagcgtccttttccgcctcgtcagccgctgaaattttttttataaaatataattaatttaaaaaattttggcacttccattattcaaacggttatattcaaacagaaatttaaaaacaaaggaaaagctagataaatacagtaaatttaatgggctacagtaggttaatgtaaatacactctggtaaacaaattactattctctaaaatagagcagggttacggtaattaacagtgcaaatcctactataaaaaaagaattttaatttttaaactgttatgcgtataaaaatgttattagtgaatgaatgagttatggtagcattcggggatggaattattgtattacagtaaccaacatacgccacaaaaacccaccatcaaaggcgagtcgagcaattgctgaaacacaatggcttttgccaacagttgaatacagttttttgccaactcaaattagagaccggacagttctcattgggcggcatccctttaccgtaatcataacggtagtggccgatcgtagctcggccacagaatcattgccacttccctgtgtaataagtccccgatcggaaactctaatcccccgtccggtctctaaccaatttggcaatgttttttcaaaaattctgatcacatccttgcttctgatcaccccattgatcagtcgtcaaattgggatcttttcccgattgagtctcgggactgagtcccatccggctgggtctcaatcggtccggtctctaatttcaattgccatttgcgcaccaaccgtggcaaatgtcgttgcgcccggttagatcttcacgctccgccattgctgtgatgatttcgttgaagaagttgtacagctagaaaatattattattatttattgttttatttacatttatttaaattcgattttattcaaaaatatttaatcaaaatatattatttaaaaaattgaaaaaaaaaatgttttaaataaaagttttgaaataatatttaaaatattaatattatgcattgtttaaatatttttttaatatgagaaaataattattttttcattaatttttaattaaacaaaatatattttaattttcagccacgaaattttcaaatgattaaataaaatgaaaattgtattaatccttaacaaattaaagccgatttatgcgggaaaaaagtaattttaagaggattaccattttttaatccaaacaataaatataaaaatattaattttagttaaatcccttcttaaataatatcattagtttattacctttaattggtcctgctctcccgcgtattccaaagcggtaaaaatgttccatgttgctaaaataaaataattaattattattgaaaatgtctttgttagaaaatgaaaataaattaaatttaaataaaaattcaattattaaataaaaaacaattaaatttgtttataattattgtagttttttcaataaatattatacacattatttgctaaaaaaacttaaattaaatttcaaaaataattaaatatatttttggttaaaattaaataaataaatttaaataagccataattcaaacctcttcttcgcgcttccaaacgtgccaaacagcgccggtaccatttttgaatgagaatggcagatcggattgctgaaattggtgcgcaaaaaataaaataaaataattattatattgtaattaattagccataaaaaatagtgcgtaattgtgtaggatagggaaaagaaaacagagagaaagcaatggagcagaaatagtgaggcgagacgaaaggcaggaaaagaaagcagagagaaaaaagaaaaggcattcacgagagagcggaaaagtttatagataaaaagaaaaaatgtgagtatgcttctaacttgggataaagcagacaatgaaaagcacagtgaacaaaaaaggcatttcggtgaaagatttttctaatccagaatcccaacttcaatcagcaaactggaccacaccagggatggcattccgaggccccanaaattttcggaaatcggaattccgggggtcaaaaatttttcngaagtcggaa

SEQ ID NO: 272 - DNA, 2399 bp, Heterodera glycines
  unsure (1)..(2399): unsure at all n locations
gtgaggcgcttgactcagacttacacagttccggataaacatggtgcggcgccgcgccgtcgtntagcgccgcgttggaggatgtgcgcgagttgggcgaccgtcgccggcgagcggcgtccgcagcgccggcccgcgtcacgcgtttgccagcgactgggggcaatggcggcaacggacacgtgatcacctatgggagtattattgatcagtaattgattgatttggttgacgatcggaaatttttagacctggaatttgcaaagcataacaacagatacggtaagacaaatcatgggcttgggttacggtaaatttaaattttgaaaatttcatccaaatcatccaattcaaaatccccaatttttaatttgtaaaaaatttcccctctgacgggaaaggttgaaaaaattttcaatcgattaaaagccacatgaatatcctgatcactttttggcgtaatcaaaaatctccgatcactttacaaagagggaaaaaaagtttggcacgtaccttaacatgcacatccggcatttcggcaccgttaacagacgcatgtttgtagttgtggtggttgtgatgatgcacaggtggttgttgctgttgctgttgttttgatgttgatgggccacaacccatgctaattagtgcagcaattaagtaattatgcaattaattaattgattggtgaatttcgttgtttttagcacggctgatgggtattcaattatttaaaaatttatttaaatttaaaaagataaaatttttaatgaataagtttttagagagtgccaaaatttttatggaaaaatgttaaaatatgaacaaatttttagaatgtgctccaatttcttgaaaaaaaaacatttattaagcgtgctcaatttattttaaaaaaacatttaaaatttaattaaaaaaattttttgcattttatttttcgctattttttagtcgtctgtcctcaaaagtgaattgatgagactgatttttgatgatggtgatcagcagcaagaagcttgaagaaaaatagagaggtagaaattgatccaatttcatctctttttgcgtcatttggtcagtgacaaatgctcacggataaaaatatatcagcctcatatatattattggatggaaattatttttaatttaattttttaaaaattttttatgagacgaacccttacaaatttttaattaaattctcaaaatttattaggtcatctcataatttatgtgaaccgcccaaataaaaaattggcataatttttgaattcttacacttttcttggcaaaattattgtctttaaaaggtgtcagctattttttgatcactcgttttcggaaaattcatttcttaaaattttttattgaattttttaccaaggctgttaggctcgaaaaattcccgtaaaacacatgaaaatttataacaaaagatttacactaaagtactcttaaatccgaattaaaatttaggaaaatcggaggtgatgtgtccgattctgccgtcagatttgtcagtgtgatttcaaaaatcaaaatttttgtcaaataaatttatcttaactttttaagggagtgcaaataataatgattctttatccaataattaaataattgaagctatttttatgaaaaattaaatatttattatgaattttctttatttaattacatataattaattaattaataatttggtgccattaaatatcgtcaaaattaaggaaataaattcttctggcaattgaaagcaaaatttaatattaaaaatcgcattagtgcataatagctgttttgtgtttaatggcttcaaaatgttagcccattaacaaaatgtcaaattgaagaaaaatcccattgcttcttattaatgaaaagtggcttaggaaaatgccatggaaaagcaatagtctcagaggatggaagaacattggaaatgccgatgaataaattggaagaatgtgaaaaatcccgcccccgccctaagaagatatataattcaaaaaacagaattttggtcaaaaacctggcaacattccaaatgaaattccgcgaaaatccaaaatttaaatttttatctcggagaatttgagttaacacaaaaattatttgctgaaaattcgagaaaatttttagatggaccgataagatttatcttaaacaaaaccgataagtgaattttgtttttattttatacttttttaaattttgttaaatgaattaaaattcaggaaaattaaaaaaaaagcaaaaattttatatgaaaaagcattgggatttttaagaatttataaaacatgcgcaaaattcttcatttanaggaactanaatttttaggcacttnaatttgcacaaaattgagaccaaaaaaatgaattttaacgataaaattc

SEQ ID NO: 273 - DNA, 7680 bp, Heterodera glycines
caggaaaatttatgatgaagctgatgacaaaaaaacaatcatttggccattacaatttgccaaaaatggcgctaatttaaaatggaaacaaatgcgtaaaatgtgtgctaattgcacatttgtttcccagctttagcgccatggtgaaatttatacaaaaaaaaaacaggttggccaattggtcattgaacaaatttttgttgtttgattttaggcggggaaaaaattttatttatggaaatttgtaatctcaaaaaattatggcttttaaaattttctaaaatgcagagggtgagtcagggccaaaaatgccgcaatgtcctccagggatgtgtgccgacgccctccaattcgacagtctgaaattggaattcagacggcccaaaaaagttcaaaaatcggaaatcggcatgccgacacatctctggtgtgctcatttattaattggtaagattgggttttaattttgaaagatttttacggtttgttcggtaaacaataccagggtcaatggcaactcgtacaacaaaaaaaaaatctaagaattttcaactaaaacttagaattttcagataaaaaatatataaatggattttttagcctagaaaaactttaaaaaaaattctttaaagttttttaccaatttttcagctgactttttttattttcttaaattttttgaaaatttaagtgttttaaaaagtttttctaggctaaaaaatccatttagattttttttaatctaaaaattctaagttttagttgaaaattcttagaaatttttttttgtacgagttgcctgtgtacgagttgccatgacaccacaataccaaacccacaaaaaagtgagcaaatgccaaaaaatgctaaatttattttggaacagaatgggcaattagcaaaaaaatcccattagaccgaacgacagctttttggggccacacctgctaagcaaattgttagttgcccagattcaaaatgatgatgattttgatggcatttgatacagtgtgtcgtgccgtagacacattttcacgtcatattagtggagtacgggtgggattaatttgtgccctccggggaacaaattaaatgcggcaccaaaaaagcatcggagaacatccagctccacaaaaataaatagggaatgaagaaaatgatgatgatgcgataatgatgatgatgatgctgttgatgataaaatggataatgacgaggcatgcaaaaaaaacgaaggaaatccacaaattttggtaattacaaaaaaggttgtacataacaaatatttttgaaaaatattatattcttttaattttaaagttactcttttggaaagtctaacataattggcccccctgattatcgaaaattaattttaaaaatttttctaaaaactcgaggtttacctaaaaatcgcagctttagattaatcttttttgatcatcctttttgggttttttaaatatttttatgcaaaatttggattggattttccctgcatttattcgcgcaaacgatgatgacaatgatgagagagagagagaggataatgaaaatttggcatcatcgccagacaaaggatggcatttttttgtgcggggtgaaagtcattgtcattaaggacggcatttcagaacaaataaattgttacattttgcgtgccgtcgacagacgacgaattgagaaggggggggggattaaatgccaatgtcagttttatggcgatgattcatcgaaaaaattttcggattagcatacagcgaatgaaggtaatccatgttgggttaacgggaattgttcccttaattgtcgagaattcatgtttcgaaaatggcacaaatcagtttgacctatctatttaaattttgaaaagaatcaagaaaattttaaagaataaaaattaaaaaagggcttgtcaaactcaatctgatcaatgaactataagtgattaatccatctggtcaatggaccgtcagatcaatgttatgatcaataattgatcacttctctctcgattggtgactttagagcagcaaaattaattcagtcctcgaaaatccctagccaatttgagcagtgtgatcagcttcaagtttcgaaaggcagtttcaaatgggataagactgatcagatcagtgcattgatcggctgtttccacccgatcagcggcttccacttacaagcgtcgatttccgattgttgtacatggttagctgcaaaatgtccgttttcaacaacagatttgcttgatgaggatgaacacttgtacagccggcgttgaatgcgcgaaatcattgaggaatcttaattcattaattgattattttaattgaatttgagtaattaaaaaaaaaatttaaaaaaacaatacaattagtctattaaaattacaaacaaaaaaattcattttgttgtcagcaaaatttttcaaaagcgaacaaaatacctaaaaattttgccaaaattctttgtcgtatttttcggtgctggtgcatttcctaaaaacggtgctatgtcgttacttaaaaaaccatcattatgatttgatgaaaaattatttataacttagctgaaaaacaacacaatttttatttcttaatatgattcgatagccctaagtgttctctatcagtctacaaaatttcaaaaaaatttcattaagtttcaaaagagttagggccaaagatgctcgaaaaatgctcgaaaaccaaggttttttgagttcctctagccataacttttttgaatcgtaacgaaattttttgaaattttgtagacttatagagaacactaagggctatcgaatgatatcaagaattaaaaattcaattgcttttcagctaagttataaataatttttcatcaaatcataatgatggttttttaagtaacgactccgccccctaaaaaccgatctgtacatttctgtgttcccatgcgcgactgatcaatcgatcgatcggtcgagggagggagagagagagggacgaattgggggagggcgccttagcctaaccctttttaactggtcgaaaatgagtgcgtttttcaggaacgcattgctcagaacgccagaaaggagcagctccgggaccgggctgttcgcttagacgattctctgacggcattggtcaagcaggcccatgacaagctgaatgagtcggctgcgatgcctcagtgctatgagcaactgtgcaatggactggctgaacagattgagcttgccgagcagtttggcgccgagaatggcatcacagttggcgaagaacggattgcgcaggcaaaggaggtgcgcgagcagctggcacagcgatggcaccattgggacgagtttgtccggcttcgagatctgggcaccgcccaactggataaggcgcgtgttgcgattgaccagaccgagcaaaagacatgccgaagcgtagcggaggccgagtcggaccatgacaacctgctggtaagtgtccaggctaattaaaaaggggatttgcaatgcaatcggactgactgatggtttgcaggaggcgcagggttcgcttgcttctttgaatgccaccatcgaccaactgcagcagttggctgacaagcttgatccgctggcgacgactcatgctgaagtgcgattcctggatgtggaattcgaacagctggagaagcatttcggagacgtgcttgaccaaatgcacaacgaaattgagcaggaaaaggcactgatggcggaaactgagcgagccggacgagaaactgacgacatgacggcacagctgccgacgatggcgaacaatttgaaggcattgcagcatgctcagcagacagccatccctgccctggaggcgaaagtcgtcatgctgcaacaacagagcgagaaggagaagccgctcagacagtacgtgctccgctccactgccgctccttctccggatgaactcgcgcagcgcttagcactgagcaaaggccgggcacaggaagcggcccaacagctggtggacacagcagttgtccgggtccaaaatgtgcttttggggacaagccaagctgctgccgaacttccctccgatgaacaaattgatgaatgcgccaaagagctgcaggacaacatcccgcttgaacatccgcacaatgaacagctccgacagcaattggagcagctgagagagaaggtgatgcgcagggatgccatccgatcgcatattgaccagcacttggccaccattggcaaggaattggaagggttcagcgagcagttcatcagcagcagcaccaccaacggcaaaaaggtgccgccctcctccaaaaaggaggccaaaaagaagaagggcaaaggaggcgaacccgagcagcaaaaacgagctgaaaagatggccagcagagaagagcacatcgacgagctgcgaaaagcactgggacgcctggaaagcggcattttgcctgccttgaacacgcttcatgacgaggccgtccagcagggcattcctttacaaccgacagaggaacaccagcatcagctgatgcgagccaatcaaattgtccaaagtttaaaggtgtgcttttgttgaagcattcattgattttcgtccatttccccaatcacttgcaggaggaccttgacaagagtgtggccgagaacgagcgggcgagcgtggtcatcaacgacatacgccttctgaaaagcattgttgatggcacggtggtggaagcagaaaccgcggcggaagaggcgactctccaactgctggacgtggagtccgtagaacagcataagcgagacatggaagaggcagccaaaaagttgggtgaacagctcgccaagatggcggcagatgcacatcaggtcagcaccagtttggagccggaagagcaagcactgatgaagcgggtggaagaggaggctggcaagaagatggacaggctgaactccctcaactcggtgctccagcatcagatggaagtgctccgagactgggcacgcgataaggacaggcttgagcagcacacgtgctcactgattgaccagctgaagagagtgcaggaggagcgggaagaggctggccctgccccagcagaggaagagttggccaagctggatgccctgcagagcgaagtggacgaggccagggatgagatgaagcggatgcagagctggctggtccaaaagctgcccaagtgcgggagggctgcggtcgaactgcaacttcggccggtcgaagagagcttagtgaagctgaacaccgacatggacggcacaatggagcagctgaagaagaacgtgcaaattgaacgccgtctgttggaagagcgcaccgcgcttctcaatgctgccaacgagctggatgagcaagttcagcaagcccatgcgtttgaagagccgcaggagcagatcagcgagctggacaagctgcacaaccaactggagcaagtcgaacagcaaatgcgcactgttgaccaacaatccgagcagtacccaacgccacagaaggcgacaacactgagcgaacaaattgcacatgttgtgcacaagacgaggacaaacattgaagatgcccgtcatcagttggaggtgaggtcatttcgtctgttgatgattggaaatcacccataaacccattgatcacggatctgtacatttctgtgttccttcagtcacacgactgatcaatcgatcgatcggtcgagggagggagagagagagggacgaattgggggagggcgccttagcctaaccctttttaactggtcgaaaatgagtgcgtttttcaggaacgcattgctcagaacgccagaaaggagcagctccgggaccgggctgttcgcttagacgattctctgacggcattggtcaagcaggcccatgacaagctgaatgagtcggctgcgatgcctcagtgctatgagcaactgtgcaatggactggctgaacagattgagcttgccgagcagtttggcgccgagaatggcatcacagttggcgaagaacggattgcgcaggcaaaggaggtgcgcgagcagctggcacagcgatggcaccattgggacgagtttgtccggcttcgagatctgggcaccgcccaactggataagcaccgcaacagtcttgacaatgtccgttccgcgcctttaatctccgaattgaacgatgctcagcttcaactttcctctttaaaagtgcttttcatttttgtgctttttcattttgcattttttaggacaattcgcttcatttttcgcaaattcgtcaacttttgtctgatttggtctctctttccaagtccctttctcctctttccgttgtcgatgatattctccgttttatgtttgtggagctcgaaagtttggaatcagccaatgaggtgtttttaacattttctctttttttcatttgatttttaaaaatttatttagcaaattgtccatcgattcgaagccgaaattgaacatcgaaatgaattggaacaaatgtttgatgggatctcttctaatgtcagtacttctgagaacaattttgatcattttctgcaacttcggaattccgatcgaatgaatgtaatttttattcttttcttttttttttgtccttttaattaatgtttttaacaaataaaaaggacttgctgactgaacttggcgagatcggcgcacaaattgatcagcttgaacagagcatttggcaagggaatgatcagcaacggatttttgtgcaaagtttcgacaagaaacgcctccgaattttgcgagaacgaatcgaacaattggagaaaaacatttggggggctttttccgaactgagtgaagggccgtcgacggaagcggcggaagaacagccgaagtacgacgtggacgcggcggtggaaattctgtcggcgatttacccgggccgagagccactcgaagtgatgagggaacacgggctggacaagttggagttggacatgaacgatgattatggggacggacagacggaaggggaagaaggtgaggacggacaaaagggggaaattggagaattttaactgatcaatcaattcacaccccacaaaaagagacatgcaatttgtgggtgtttaattaggaatgaggagatgaaacgcgcgcgaatgataatgcgtaataaattaattgtcagaaattaattgggtggcggggccaacctcgcccttcactctcgaaatatgaaattaaccgttaaattcattttcttttcgttttaatcaatttaatttatttattgccctttccgcagatgctttcctagccgagctgagtccacaaccctcgcgtccgtcggtgtcctccaaagattcgtccatttcgcccgtccccgacgacccatcgcacgccgcgggggcacagcagcggccaatggcacagcttcaacagcagcagtcgcggtggaggcgagtgctgcgcacggcactgccacttcaggtaaagcggtgggcacagccaatggaaattcaaaaacggaagttcggttttcaggcgatgctcgtccttttgctcggtgccgcttgtttggtgccgcactgcgacgacgaatattgttgccatttgttgaacaacttcgcgcgcagctttgacccgcagttgcatttcgccaacggaacaccgcccttttagcgaacgaagaaaaattattaaatgaatagggatttcatttacacaattctcactcttttttattagaga

SEQ ID NO: 274 - DNA, 2336 bp, Heterodera glycines
tttttaatccattctttctcatacataatcccgatatatcttgttcttttttaaatgagatcgattcctttgagaccggtgaaaattaactgttatatttaacttattccactggatcggtgttttaagaaactagaaaattacataaaagataatagtttataatttaaaatatttactaaattttaaaaaaattgttaatcattttctactcaattttcttggttatttggcgtgagttgaaagtgaaaaacaaacgattaatcagcaaataacacacatccagaaaatgagctcctgtagcaaagattttcatgtgtggcacatgtcagtggtttttgtaggtaagtcaatggaaaagggatggagttttgcaggtccgccataagcagagctgccagctgattttcaaaatcagcatttggccgacaaagaatcagcaatttggaaattttattacaaatgcaaaaaaaaaataaaaatgttcttctgcggcgcacttttaaaaaaaaaaatttgtcaacagggggccggcggcacctgtaggcactgccgggaaaattttttaaaatgtgatcaattttaaaaatcatgggaattttgagggtcgatggtgtcgataggctaaaaatgttaatttttgaagatttacttaaattataaatttggtttatccaaattgtatattaaatattacttcataaattaggcttacaattttttctattggtgtgcaaaagttggttaagatttcatattaacaaagataaagaaagagaacgccaaaatgatttatgtattttcctattttcatttctctctttttcgaacggtgcgtgtaaatgggttcgcttatttgttagttttactggagcgatttgtcatttttcgatttaatatttggctttttcattttgtttgcaatgaatggaataattgccacgttttataaaaagcatttcgcttcgcattttctgtttcccccagttttcgctgcccgaaacagcaaaaggaaagaaaaaagaggaaagggagggagagcaacgaccaaacgcttcgacaattcctccgacaatccctccaccctcccaattccctcatttgtcagcccctgtccaacatcagcccatccattccatccgtcgcgcataacgcagaaggacaggcgagccgatcgcagcgatgacgacgataacgccccaacaaaaaccaattcttaaagcggtgattttagtcggcggcgcccaaaaaggtggcgaccttccctttcattcagtgtccccctcccctttctgcccatccctttcattctccacggcgactggttgcttttcgtagagtcacttccttccattcaattcattgatcaaaatgtggatagccgggtcggctctggtggcactttattcaatatttctgttgttgcctgtgttaattctggcgtttgtgatccaaaagtgtccactgagactttaaaacagaaaaaccattaattgctgatcatttaatccctaattgccccgaaggtatacaaataattgcaaacaactgttatagactttgcacattagcttgcacttctgttaaggcactcgttttcggcccctctctctccaacttccgaagccattgttccccgttgccggtgtcccactgattgagcatcacatttcgcagctttgcgaagttaatgcatttatcgttatgattttttcattttttccttttcagcagttggaaaacctccacgaaatttttattgttggattttacccggccgaacaatttgcgaactttatttctgattgtgagaaaaagtatcgacgcgtgccaatccgatacattcaagagaactgtccgttgggcactgccggtggccttttgcagtacaaagacattctaatcgacgtacggatttgtgttttaacttttaataatctaccatctgatttgaatcattgttgttttaagagaaaacctccggatgcactctttgttctgaatgcggatgcttgcggagaattccctttccttgaaatggtgcaggagttgaaccaaaagacggaggcgaaatgcttgattttgaccactgaggcgacacgggagcagtcggtcaactacggatcggtagcaattcaaatttggttattccgaacccgacaaaaatggtaccatcgaaagctcaccaagagacaaaccgatgtaatggggggggggaagtcgatcagacaaacgcccatttgaacactcattgactcccatcataaaacactaaactcatcgagagctatcagttaatacaatatttgtaagggatttgtccacggataaaaaca

SEQ ID NO: 275 - DNA, 778 bp, Heterodera glycines
gagagagactgagaggagcaattaggaccaatttggaagtgaattgccatgccaaacagtcgcagtaatgcgctgcaacgcgtcggtggcgtgatgtcccccccctccctcattttgcagatttccaaaagattcccgttcccaataatcgaaagtgctttttgctttcttttccccccccccccccccttttgcgtccttatgttttgtgtgttttttttattattttcccttttaattgccttagaagacaaaaaccaaatatttgtcactgctggaatcatacataattaactgtgtaattaattgctttgcctaattgcttgtggtccatccgatggttaattataattatggtgcctcatttggtccatcgaattcttcccaacaaatctcattattaaaaaatttctaacaaattcctcctcttccgttcattcatttccaattccgtccattccttcgccaaattttgttttcctccaaaattgcataaacaaaaacaaattatctcaaatctcatgcatagtcaaattctttgcatttttaccatttggttatccttttttggatgaatggcgcaccgccgccggcggaagaggcggagagagtggggagggaatagagagagagagcgacagagagaggagcagtggcggagggggaggaggaggtggatacacaaaagcgccaattaccaatggcaattcgtcattatcgaggccaaagaatgattcacgcttttgacctaatgcagcggattctatcaaaatttttt

SEQ ID NO: 276 - DNA, 1519 bp, Heterodera glycines
  unsure (1)..(1519): unsure at all n locations
gattgatctgcgacgtgtgcatttcattaagaacgagcactatccgccaagcggncacggagcgcctttcaacggcaacgccgcgggcaagccattggcatttcctttggcaattcctttggcattttgttcgttttcgttttaggcacgtgccagctccctccaagcattatctcctaattttaacattatcggccttctccgaacgggccttgagcaatcggtgccaccaaatgcgcgtgagtgtgccaaaggcattcatttcgccgctttttaatcctttttagacattttatgcactggccgtttgtttatctcagaccactcgtgcccgagactacaaaaatgtgattatttccgagtttgacagcagagaagagcttatccaggtgagttccaagagagggactctgttgggaaaggggaaatgtcccttttgttcccacgggcattgacctttgtccattgcttttcctttaggccatcatttgctcctgcttcatccccttttactgtggactgagtgcgccctgttaccgtggcgagcagtacatcgacgggggcttctcggacaatcagccggccgggcaaattcgaccacggcaccatcacagtcagtccgttcagcggcgagtctgacatttgccccagcgatgacgacagtgccaggtcagacagactgccgtgccatttggttgccccccggcgatcgcttgctttagcatgttcggcttcgacttttacggcacgcccattcaattcaccactcagaatttgttccgaatggtcgtcactctttttccgccttcgcccgaaatttgctcccgaatttgtcgccagcagggctttgaggacactcttcgttttctgaccaaaaattgtaatatttttcaaaatgtttcctcctccaatgactttgccaaggcatggctccgtgtgtgaaatgtttgacggtccaatcgaatgtcatcccagtgacacagcatcagcagcagcaaaaggaggaggaaaagccgatcagaagcagagcaattcgggagaacaaatggcagacggaggaggaaaagcggtggcgaaagacggcgtcagtgagcagaatgagcaatttgtgagaaggggaaaagcaaatgatcaacaaaagtcaattagggacaatttgcaagggaaaggcaacggcgaaatgtaattcaaaattatcgcttaattaccccccacaatcaggcggaatgagtgcaatcgctgctttgaacatgtcgaccgtgccggtccgccccgtttctcctcagttccgttgccgaacaccattcttaaatgtgagactaattgaacacggggcgaaaaatggacaaatttaaattgggccaattaatgtataattattattaattactttttattttagcgctttccgaaatggaagaacgaaattgcacttggatgaattatttgcgtcgccaacgcatcttccgctggtggtaccgtcttctgatccccgttattttgccctgtgaaatggtgc

SEQ ID NO: 277 - DNA, 1324 bp, Heterodera glycines
ttcattggctattgaatttttgttttgttttgccactttttctcatcaacgttaaccgtcagttctctcattaaggccgtaaagcttttgcgattagtgctccttgtgttcattcgttcttcggcacataaaatgccttaggcaagatgactaattatgggaggggcggggggagggaggggggaagtgacgacggaacaaaacgaagaagcagacgaatgggacattcgagaagaagcagatggacggaagcaaaaagccaaaaggacaaggaaatttgaacaaaaaaactgaagaaatttttaaaatgggagagaaatgatcagaaattatccaatttttaacaaaatatcttaactgctttataaatattatactgactgtttaaaatttctcaaaaactttattttgggtaatcgtaccgatgttagcctcctttttgaaaaaaaatttttatgcgtttttgaggtttctgatcaggaattgacattttttcaaaaagatacgaaattgctctgaaaatcggcaataatgaagaataaggcaaattgtttgcatagtcaacaaaaagggatttgcgcttacaaattagaccttttctctctaatggcatttggcatttgctggcacattttcataataaacaattattaatttgtgttcccacagcggatgcaattgtcggtacttacctatacagtttaggccacatgaattttttttgttaaaagacacaaaaaatgtaaggggtttttggggttgctgatcagtgatcacgaatatgacatccatttcgaccaatttccatttatgaaaaacggaaatttaaatgaaattagaccaatattttttaaaattatttctcatcagtgaaaaaatgaacagtgacgaaagagagagaaaaagaaagagagagagagagaagagaaaaagaaggagagagagaaagatgggaaaagagagagagagagagaagagaaaaagaaggagagagagaaagatgggaaaaaagagagagaaggagagggggagagagagagagaaaggagaaaaagaaggagagagagaaagatgggaaaagagagagagagagagaagagaaaaagaaggagagagagaaagatgggaaaaaagagagagagagaaagaaggagagagaggaaaaaaagaaggagagagagaaagatgggaaaagagagagagagagagaagagaaaaagaaggagagagagaaagatgggaaaaaagagagagagagagagaagagagagagaggagaaaaagaaggagagagagaaagatgggaaaagagagagagagagaa

SEQ ID NO: 278 - DNA, 1809 bp, Heterodera glycines
tttcgaccaatttccatttatgaaaaacggaaatttttccttaattagaccaatattttttaaaattatttctcatcagtgaaaaaatgaacagtgacgaaagagagagaaaaagaaagagagagagagagggagagagagagagagaggagaaaaagaaggagagagagaaagatgggaaaaaagagagagagagagaagagagagagagggagagggggagagagagagagaaaggagaaaaagaaggagagagagaaagatgggaaaagagagagagagagagagaagagaaaaagaaggagagagagaaagatgggaaaaaagagagagagagagaagagagagagaggagaaaaagaaggagagagagaaagatgggaaaagagagagagagagaagagaaaaagaaggagagagagaaagatgggaaaagagagagagagagagaagagaaaaagaaggagagagagaaagatgggaaaaaagagagagaaagagaagacaactgtagtccaattagacggacataaatgaaaaagtgccaacggcaacacaaacaaatagcaaaagcatcccttcccttccctttccctttctttatttttactccgctgcttttcctccgcccgttattttatttctctgtttgaccgtccgccgtttgtctgcggctgttaacgaatttatcggaaaatcacaagtcaaaccccgtgaattttcgtttttagtttcttctgtaaactgtgaaatgcgttggtaattactaatttattttattttttgctaattttccttggcacttttttttgctcctttttcgctttcacttccccccccccccaattcctttctcattttcatcgctttgtttgttcattttgcacattctcccactcattaaatgcattttttggtattaatttgtttggaattcctttctaaatttttcgtcccctcccattttttgctgatgtcatcaaaaaatgggtaaatttgtcaaattatttaccttttaaaaagcgaataatttttttatttctcaattttttcgttcaaaaaaaccgcagaccgaaaaaaacaaaacaaaaaaagcaaacattggaaaacaaaagttgtttctcttctttcttccttccttccattcttccgcctttttcccattgattttccataatttttcggtttttcattggcaaattcttaaaatattccgttacatatttattgtttttgcgtttgcttttgttttttctgttttctattttagtcaccctttcattcctttttcccttttttccattctttcctttgccttttcttctctccctttttatttaaataattattaatatttttatatatgttttatttttattttcggttctttctttaattgaccaaattgcgcaattaatctttcttttttctctgtgttcgttgtttatttattttaggaaatgtcccccttttccgtcctctttttgctaatttccaattcgtcccctttaactaagaattccaccgggaaatttaaatttcccttttccttttttataaaaatattgcaattttccgaaaatcattactttcctttatacttttttctttaattagttgttttcgtatgtttttctaagaagagaaatgtttttttaagcgccgaagggaacaaataacattctctttccgcagatcgccgttcttcggatgatttgttttaggggaggaatgaatggaaaaagcgggggacagagagagacggagagggaaaatgggagagggagggaggggaaggaaggatacgga

SEQ ID NO: 279 - DNA, 1229 bp, Heterodera glycines
ttaagcacttttaaaaattttaattttttttttgaaagggggggggggataaactttactattaccgttggcccggtaaaatccgccgggacctcgggctctaatttgttgaaaattttatttttatttttttcaaggtcctattacattgctttttccccattcagatggaacgtgccaagcgctacattgtcgaccaggagaacagaacggagaaggacgcacgtcgcacactgctcaaattggctgaaatgttcgagtcgcccattcccacaacatcgaatgtggcccgtttacgcaaacagtttgacgacgacgacaacgatgctgatgacaattagagaccggacactgcttcaatcgattaatcggggaaagatcgtcgatttttctgtatttttcttaagactaatttacataaaatgtatttttaaataaattaactttgcaatttattagtgggaaaaattctgtgtaaaaaattaacatctctgcttttcttggtcgagtttgctgaaaaatgctagggtttggagtttgcggatcccgctgcgggatttttaataaaaaaaacttttgctggacagtatcccacgggattaatcccgcaagtccacttttaattttgcggcgcgcggaactgcagtatgttactaagcaaaagcatcccttcccttcccttcccttcccttcccttccctttctttatttttactccgctgcttttcctccgcccgttattttatttctctgtttgaccgtccgccgtttgtctgcggctgttaacgaataaatttgtcaaattatttaccttttaaaaagcgaataatttttttatttctcaattttttcgttcaaaaaaaccgcagaccgaaaaaaacaaaacaaaaaaagcaaacattggaaaacaaaagttgtttctcttctttcttccttccttccttccattcttccgcctttttcccattgattttcccataatttttcgctttttcattggcaaattcttaaaatattccgttacatatttattgtttttgcttttgttttttctgttttctattttagtcaccctttcattcctttttcccttttttccattctttcctttgccttttcttctctccctttttatttaaataattattaatatttttatatatgttttatttttattttcggttctttctttaattgaccaaattgcgcaattaatctttcttttttct

SEQ ID NO: 280 - DNA, 4994 bp, Heterodera glycines
gggatgaatctcagcttaaaacatcgggcagacgagactctcgagggttgctcatcggatcagtgcactctcacgcccctttcctttcatcggccgttctcttcagcacaatttccattctatttatttcctttttattatcgtacttcttctgcacgccgacatttttttttttgatggacggatctttcgaccgaaaacattgcctaaggcgcaacgaatcggcggcagaaaatgcaaatgcgacgcaacggagaagccccggggggaggaagggaagccgagcattggacggtgggcaaattaagggaaatgattaaatgtgttgttttcgtataaatctcacaaaattggggagggaaaggaatttggggattattatttatctgctgtttactgagggggccgtgaatccacgcactctccggcggacaacgcacacacaaacaaaaacacccccccccccccctgcgcacgccccaatttgaaattggagcaattgccgggggcatcgaaaggcgacaacgccccgggcaattttcaaaagcattacagaaagcgaattccgcgctgcgatcaaacacattctcgagacgggtgacatagaaggggaggacgcgaaaggaacgaaggaatacgaacagagacagcagcggaaggaggaggaggagggggagacggactcctccgcatcgtccatgtccagtcacaccgaaacgatgaaaagcagcaggtccaaaactgactgatcgctgctatttgttggcactttccccaccgttggtgccatcctttagcattgattctggcactaatcatttgccatgttaaaactgacaccaatgaatccgattttcgctgattacccatttgctttgcagcaacggctccgattggcctttctgctccgatcggatgaaaatgatgcagaagctggccaaactgaacctgaacgaggcgggccccgcccctccgagcccgtgctcagtgaagacaccgcttgagggcgtatcgacggaggacactttgcaaagactgaggccgaaggaggaccaagcggaacaaagccccacggggacactcgcgacacggacaccgaaggactttttcttcataaaagtgctcggcgaggggtcattttcgacggtgggagaagcaaaagtgggaagtgaagactaagaagagaccgttaaaggtgtattttgcgaaagaagtgaccacgggggacgaatatgcgataaaagtgctgctgaaaagcgaaatccgacgggaggcaaaagtgcgctatgttctccgcgagaaggacattatggccgcgctcacttacgtccacgggggtcacccttttgtcattcgcctttattgcacctttcaagacaacgaccgactttgtgagttgggaggggcaccaattctgatcagtggatcatttcgatcattttggattgacattgatcacaattccctcggcctcgggctgattgtctttttttgcacagactttgccttggcatatgccaaacatggcgagctgttggattggctgcgccggctcggctcattcgacgaagctggcacccttttctacgcttccgaaatcctttgtgctttggaatttctgcaccggtgcaaagtgatccatcgcgatttgaagccggagaacattttggtgggcgccgattggcacattatgctctctgactttggcactgcgaaaataatcgatgagcaaacggacacaatgggtaaggaaggcaccaacaaatattttcccctttttctcgagaacccatcactattaataatttagcttgttcctcctcgtccgcctatgtttctcccatcgaacgtctccccccgggcgaagtgccgggcattgtcccgtcggtggcagtcaaaccgaccaaacgaagcgtgcggagttcctttgtcggcacggcccattacatcaggtgtccgtgtttgttagcttttcctacgctttcttcgtttgtttttcagcccggaagtgctcaagtcggaggatgttgggcccgagtgcgactattgggccctgggcgcgatcattttccaaatgatttctggccagccgtaagtcatttattggctaatcggcagccaatggcccattaacattttgaaggcctttccgcgcggtcaatgagtacaaaatcctgaagaagatcctcagcctggacttccacttcccggatggctttcccgaggtcgcccgtcacctcgtcagccgactgctcgtttataagcccagcgaacgcctcggcagctcccaaaagggaggcattgaagcactgatgaggcactccttttttaaggtaggcaatggacaatgaatgacgaaatcactcaatccgttgtttataaaggacgtcgaatggtcgtctctgttcacccggaaaccgcccgaattgaagccgtacctcccggcaagcagcggagagccggaattctatggggagtacagtccgcagccggcttatgggccaatggactttgagcccggactgaacgaagcggcgttataccggctgatgggcctcggcagtttgggcggaggcggctctgacgaattcagcgaaatcgaattcaatcgggaaggtcggagaaaggagacgggcgggaggggcatatagaacttccatttgaatcaggcatttctcgagattcgccctcctccccttcccaaaagtttattccgttgccccgggcgtcgtttgtttatttggcaataaaaagcagcaaaaacacactgactgtgaaaaatgggcttcattccctctcttattgatcattttgactgctcattctcaagtcagtcttcttttttgcggctttcggtggaaaaaatgcttttggttcgtccaattccaatcgaaatccaagctgcccaattgaagaccgacttggcattgtgccaattcaatcgcacaaatggccaaattccgctcgaattcccatttatttcggccaatttggtcttttttttaactgtgccaaattattttttaacgttgtatatttcaaaaatgttcagacattcgtctcgacgatgcttcttcctccccgtccgttagcttatccgtcgccccatcggttgaacaaagcgaacagaggcgccaaaatcgactggaaaaacaacggagagagaacaaataccaccgatttgtggaggacaatttgatactgaagtcgggactaatcgacaaaaagaagggacttttcgcacggcggagaatggtaaagaaaagaggaaaagccaaaaaagaataagggaaaagcctaagaataggggaaaagccaagagaaataaaattaacgatgagaaagcagccaaaccgatttatcattgagacattttgaatcaaatgacatcattgccattgactcatcccaatgttcgtcaatttcagtttctgctaacagaagggccgcgtttgtattacgtggaccccgtcacaatgcatttgaaaggcgaagtgcccttctcggagcaaatgcgcaccgaagcaaagaatttccgcacatttttcgttcatacggtaatttggttaaagtttcgcatttttaaaaaatatttaagccaaaaagaacgtattatttatttgaccccgaacggcacgccaaagattggtgcgatgcgatcgattgggcacgggagaaatatttgcgcagggatcagcagcaatttcagcagccgaaatgctggtccaaaaaagcgttgtcgttggaaatgccattgaattcccaacggcaaaacgcaagtgcaacgacggaactttcgaggaataattcgagccgaccgaacagttcatcggaagaaaggctaacagcagcagagagcgggacgaagaccggcggaaagggactgatcagaaggaacagagtgaagagttagtgcataaaacagcacggaatgatcagccaaaggggtgagagagtgagattcactatgaggactgatcagaagagggtggacagagaaggcagaggagagggactgaccaacatgaggagagggagaggagaaaggaagagacagtggactgatcaaataaggagagagagtgagaggaggagaaaatcgccgcctgagaaaaaccaaaaaacatgctcaatctcaaccaatgttttatttgaagaatttttaatttattgaatgaaaaaagaatttacgggaagttggattagctacacatataaaaaattcaatgttgacgaagactcgaaaaaggcgctttttgtgggatgggccatttgggcctaaccgtaaaacatcttctcggaaggcttccgggattcctgatcaacggattcggtattgaatcgattagttccccaccgagcaattaaaatggtaatcctttcgaattgtgttcctgttaaaataaaaaaatttcctttctaataaaaagggtaaaaaataggccatctcggatctgagctcacgttttgaaaatcatttgcaaaatcaatgacattcattttgacaaatctgaagcccaggcgcgcatttgaccaaaagtcaaaacgttgaaacatattattaaaccggtgcagtcagaaaaaatggtaaaaaactcaaaatttttgtctaaaaattctttcggattcataattattgtatatgtacatatgctgagatgaatcgttgatatcgattttggtaccaaaacaattttgatattttcccttgaaatacggtagaaatcagttatttttgagatgtccaattttgacaccctatggtgctctgcggatatgagtcgtttaacaatcatcccaaaggctattcggtagagaattttgtcctctttttgataggcctatttaaattttccagaaaaaaatttcccaaccctctagaaattttcccgatttttagtgtattttagggtgtccagatcaccatgaaggagtgatctgatcatgttggtccaaaagatttttttgaaacatcaaaagttagcttaaaagga

SEQ ID NO: 281 - DNA, 642 bp, Heterodera glycines
agagttatcgggacagtttgggtatttgttagtgcactaaatgacgtttcttttgcaaactatacaattgttcgaatgttattcgagctttttctccgaccaaacagacccgaaattttaccaccccccccccctccctacacaaccatttcacttgaaacacaaaggagcatttccatgattttttctatgaatatttttaactctaaaaacgggattttcagtaacaaaattataggaaaagtaaatgattttatcaatccatcggctaatgaccgaattttaaacatttcgaatcggcattcattcgtcgttttctgttacatcgatttaccagtcatccttcccttttccctccccttccttttactctcagccttctctcacatcgattttcccttgtttcacgcttcttccgtccttttttcgtttctttacctcttccttttcattcatttacattttcattctttgcttgtccaagtccttttgtttcttacttttttgaattaaaagattttcattttttgggaaaaagcggtgggtcgaaagaagtgtaagtagtttttctggggtccatgactattcgccgacgccggttcgccgacagacgattcgccgataaaatgtgggacagaatgt

SEQ ID NO: 282 - DNA, 855 bp, Heterodera glycines
agccgaccgaacagttcattcggaagaaaggctaacagcagctgagagcgggacgaagaccggcggaaagggactgatcagaaggaacagagtgaagagttagtgcataaaacagcacggaatgatcagccaaaggggtgagagagtgaagattcagtatgaggactgatcagaagagggtggacagagaaggcagaggagagggactgaccaacatgaggagagagggagaggagaaaggaagagacagtggactgatcaaataaggagagagagtgagaggaggagaaaaatcgccgcctgagaaaaaccaaaaaacatgctcaatctcaaccaatgttttatttgaagaatttttaatttattgaatgaaaaaagaatttacgggaagttggattagctacacatataaaaaattcaatgttgacgaagactcgaaaaaggcgctttttgtgggatgggccatgtccggaacacagcgttatatgctgcctgattatatggatgaatatatgtggcgccaattttatggcaaaaagacgcttgcggcgttcgaaaatatctttgaccaaattgctgaataaattgtggacttggctaaaaaagaattaaaattattgaaattttcactagggtcaaaaaaattttcctcgggtcagattttcttgaaattttgcctaggctagttttttgaccccatctatcgaattctcttttgttatttgaaagtttcttttttaactcgagatcggctcttcagtttttacaagggaaaatctcggcaaaatttttaaattagtggggttttttggcgttttgtccttaggcaatttttgtcaaaatgatgatatatgc

SEQ ID NO: 283 - DNA, 1734 bp, Heterodera glycines
  unsure (1)..(1734): unsure at all n locations
aaaaatgttttttttttgccgtttttgcccaattcctttgttggaaggacacaatctgtgataattattgttaaataagctgttaattttacttctttttttgtcttattttcatttgatagtttaatgatattccgtcggtccatcggcgggcgaatgcattgtcagcatcaagcacaaaaaattcaatctaattaggtatgcaacatatcggctgattgtcagcactgagagtgggcatgaaagcatagtatgctaatatgatgattgtgagataaatatgggtataagcgtcagcgaaagaatgttaattgattcgttttttcagatagtttggtatgtaagtctataatatttaaagacattgtgtaactctatatatagatgaatcgtctgtcggcgaaaccgtttgtcggcgaatcgtccgtcggcgaaccttcctgctcccgtttttctctataaattttaagcgtaaaaactaatgcattttgtttgcacatatgacaatgagttctgttactaattacttttgtcagatgtccttccttcttgtttacttggtctcagatttgttatcgttaattattcggtacatatttttattttttagactaaccatcctttcattgactctgtctttttcatcttaatacgaaatggactctcccgctggtgctcagccgtcgaacccaaacgctcaacaacaaggtggagcccgaccatcgaacaaacgactccagcaaacgcaggcacaagtggatgaagttgtcggcataatgaaggtggttacagtttttcgagtaagtcagtcaactaattggtctatttgcaggtgaacgttgagaaagtgttggagcgtgaccagaagctgtcccaattggatgatcgtgctgatgctcttcaagttgttgtgaactctttgactcgttaaattcatttttaggaaggtgcgtcgcaattcgagaaatctgccgcgacgctgaagcgcaaatattggtggaagaacataaaggcaagccttgttttcggctctttttccataattgaattttgtttagatgatcgtgatcatgtgcgcaattgtcatcctgctgatcatcatcatcgtcatttgggctggaaaatgaacgacgtgtgctgcggtcggatgctcgagaatttccaagtcttcgtgaattgaaaagatccatttacaaacaaaacccgcgaatctaatttaaccagagttcttgaccaacaattcctaagtctgtttctcatctcctgtttgtgtaccacccaaaaatccgagtacatacgacacttacttcggtcccttcccacattcctaattttcaaaactgtagagtacgcttggaatgcgatggattgacacattttatgtgatgtggataaactgaatatgtaatttctgtttctttttaaattggttgcattgacactttcctcccatactttttctgttatttattagtattaaaataaaatttaagaatggctgttgccgttgataatacggcgctctttcgtgctcgggcaacgattttgaataaaaaaacggaagagtcatttagggacaaagaaaaaggtccgtaagtaaagccaatttatgagaactccttttgtgtggtttacgctattttctgggcccattactaaacatttcctgctagaannnnnnaaggcatttccatnctttagttgcnnncattggacgactgaaaagaccttcgt

SEQ ID NO: 284 - DNA, 3344 bp, Heterodera glycines
cattccgatctctgggactcaacccaccagcatttcaatctctgagactcaatctccggcattccaaacactgggactcaacccaccaactttcaatgacattccaatctctgggactcaatctccggcattccaaacaatgggactcaaatctccggcattccaaacactgggattcaacccaccaactttcaatgacattccaatcgctgggactcaacccaccagcatttcaatctctgagactcaatctccggcattccaaacactgggactcaacccaccaactttcaatgacattccaatctctgggactcaatctccggcattccaaacaatgggactcaaatctccggcattccaaacactgggattcaacccaccaactttcaatgacattccaatcgctgggactcaacccaccagcatttcaatctctcggactcaatctccggcattccaaacactgggactcaacccaccaacatttcaatcaatgggactcaacccaacagcattctaatcactgggactcaacccaccagtcggactcataacaaacgaaaatatcactgtatctctctctatatgccagtgatcactgatcagctgacaaataattaggtattaagaaaataacgtaagcataaaacgggaaaaagcgtatggtttgaaaggcaccgacgcataaaaaagaaagaatttatttgataaaagctcgaatgacacattatgcatattttacaggattatgaatgcatatgaaattgaaatcacaaattaaaatgcaagagatttagataaaaagttaaggcaagaaaaaaagaaatgaactcgttatgatgggattggatgggggagatttgtgttaatgatttagagataacgaagcaaaatggacaggaagttctgaactcgtcgatttaaatggcaatctttcaatttcctttccaatttttttggtgtttttctcttttgttccttccgtccgtccgtctcatttcttcttcttcagtttgatgttggagatgcgttcgcccacgtcgttgaagaaattgcccacgtcgtccaccactttgtccaatccgtgcttcttggccagtcggcccaccttctctttgaccatctcccacaagtgtttgacgtactcgcgcaactcgcgactgcgtcggttcgccacgcattcgaagtcgcaatccttcgaaattcgaatggctttttgtggccaaatctgtcctcgaaattacctcatttggctgtgtgtccgtcggcagtttggcccggtcggcctccaattgttcgggagtctttccgcaatcgctcatcaccatcaatgtccggtaatggtcgagcgtggaacagtcgaatgttcattcccttcgacgtcaacggccttaacggaaaaactgcggagttctgatggaatattaccaattaaaattgaaactgtcatcaaatttaataataaaataaaatttaaaggaaagccttcaggtcgggcagtttctcgagcagtacttcttcgctgggcagcacatcgatgttattgcgggtgagcgcgagcacagtgaaaccgcggagacgcgacgggggcaattggacaaagtgccgatcgggacgattgtgacaatggatggcctaataagggagagaggaatttggaaagggaaagccaaaacaaggaaatgaacggatggatggtaattaattgacataattaaggtgagagtgtaattgattattaattaatcctatataataaagttgagtgtttgttgtgagtgtccggtgtttgaatttgtgtggcgttttgtttgagttttgcgttaaaatgaatttgaaaaaagtagagcgagggaaaggtgggaaaatagtgcactgtctgattgtctgtctacgcgggcagcggcgggtgagaggggcatacagagaacagacgcgtgctgctgtgcagcagcacgcgtctgttggacgcgtgcgtgtgtgtgggagagggagggagtgggaaaaaaagagagtaaattgcaatggaaaagaaaagagagtaaaaagtcggtcactcattggcgccgttttgccgagaaaatttcgcttttatatttttcaatttcatgttgtggttatcgaacgcatgagaaatgcattgacaaagtgcggcgcgtttgtccgagtttggccctggcgagaacggaattctctctccaattcgatttgtgccccgagaaatcgctgcttgaacaaaattatcagtgcgccgaatgtttttcgcccatcggattcggtaataattattttttggcacgttccttgagatacgttttgggattataaattttcaaatgccgcattttgtcaaaattttgttgaatttttccgttttgatttaagacgacgactctgaaaaactgcctcggatttgcgatttcaccggccttttctgttgtcggcgctgtcattggaacgacgaaatgattgttcctgcgagaattgtcaagaattgggacttcgaggcgtgcaattttgctgggttttgtaagaaattgaaatttgctcattaagaaaagagccgtgtgccgagcgacaaaacaaatgttaaccaccgcaatgaaacggccactgataaacttcgaaaaggagaacccgacactgttcaaatttgtacacaaattggacaaaatccaaaagatgcggacaaatattatgctgatgaagtgctattttgtatatgcaaggtaaaaaagggggaaaataaaaaaatatggaaagaaaaagttatggctttttcagttgcaaatttattttcattttttcgctttcagtttgcccgcaaaatgcgtattctccagcatttgagtcgtttccaacactttgtggagaatgacacaatgttcaccatggacgaccttctccaactcgccaatggccgcttattggcggacatcgaagcaattgtcaggattttcactgcccatatcaccgaagagtgcgaaatatgtcggggaaatgctttcttcttcagcgcatctatccgttcagcgaaaacgcggccatttgcaagagttgctgtgctgtctgtctatcaccgctcgtgctttgaccgtgccagcaaacggtgtccgcgatgtttacgcagaaaggcgagaagaaaagcgggatggaagagaatgagggggacgaggaggaagaagaggacggacaacaaccgcaggacatcaaacttttttatttttgcataaatcgggtcacaatagtcaaaataaaaagaatttattaaaggaaagtaaataaattttgaaaaggttcgtacacaaatcaacgtgttgtacccgtcgcaacttttgctg

SEQ ID NO: 285 - DNA, 2593 bp, Heterodera glycines
ttttaaaaattaaaaaaaattcatttcccaccttttccaccgaagacgatgacggcacatccggcagttggagttggcacacatgctccgtcagctcaaatgccacattttccaagcattgcagtagattctgacatttatcttgtttaatttccattattttattttattaatacaaaaaatgataatttttaaaatgcatataaaaaaaataatttcataaaaatttaccagcgaggtgggggggggtatggttaccgtatcaaaaattttgtaaagaaaaatcacctcgatgccattcaatgcaggcggttggccattgacagctgccggcttgacgtgttcagcgctaaaaatgcaataatcagaaattgtttttttaaattaattttttgctctaatttaattttgttttttaaaaagaaagttaaagcaagccctccgttttaataatattttaatttaattgttaattttgaatattctctacctgttcagtggtggttgttgaggacggcgaaggaccggcaggcgactgattggacatgttgggcggcgttcagcagcagcttggacctataaagtcatcatagacaacccaaaccaagcggaaaacgctctttttttgtgcttaaaatgagtgtaattctccctacccccaaaaaaattttaaaaaagataaagaaaaaatggcttaaaagcaaaatcaaatatcacatttgaatccaataccttagggaagtcgaaaattttttcaagataatcggcagagaaaagcgaagaggccggtgaaggtgaagaacatcgaagaccgtcctttcttttataggctcttcggtccatgtgggcggtgcagggggcggttccgatgaggcggcaaaatgggatatatgcgggattaaggggattttcagggaatgggaaattggcccgatgggaaaaatttgaattggaaaggctgggaaaagggcttatgagagaaaaagggataaaaaattttgaatttaagcctggagaggaaaaaggaatttttaagaaaaatttatgatgatcaacgatgttatttttaattcatagtgttgtgaatcgatctttccaatttgcaaaaaaaaaaaagttaaaccctttcaatatttctttaattgcttactaattaaaattggtcacgcaagtgatcatcataactattaacattttcttttgaattctcatgtttttacaaacatttttccgtctatatatgattttataattttgagaaatttttcaaataattacaaaatattgaagcacaaatctatctgaccatgttcacttctaattgatcttaattgctcccagaggaaataaatgatcagtcgatttaatttgatccttttattacaccgaccaaactaataatgagcagaatattattatctaatttttttatcgctataaagatccttaattttatcggaacctagtgtacatttggaaaaatccattctaaaaatctgaaatttttcatttcgaaattatggttctgtttaaatagctctaggcaatatcaataaatcataattatgattataatctcacaacacctgctgctgttgctctctctctgctgtctgttcattcaaaaatcgttcaatacccacacacttttctcgagcacacacttttgacattttaaaatgaaccaacaaacaaacaaaaacaggaccgaccgacctcctcctcttaaatcatttttctctttcatcattaattacctaattagcgcgctaaatacaaatagtccaaaaatttttggtaaaaattataccaataaataataaaatatgtcccgtaatttgtcgacaaatgcacttcgtttcgttgttgttctcccagttatcgatgccaacattgctgcagcggcacaccaactacggcagcgacgacatttgcacattttgccaaaactccaaaaaatcggtatttgtgtgtgtgcattttttaaccggatcatctgacattcacataattgagcatgatcagataaaccaattaaggctaattaagaaatcctgctgaaaatcgtgctttggctaaaccattctccccctccctcccgtcccgcattattaattttttgagattattatctcatccatttaccattttaaaactgtcttcactttcttaaaacataaatttaaattattttcttttaaaattaaaaagcctacatacatttaaagaaaatttttattaaaaaaaaatatttccattttcctttcttaattttcccactctcataattcaacactattttatttattttatcaaattaaagaaaattttcataataaaaaattatttccattttcctttcattttttctttcactttctttctttcttttcctacatttttcatgcattctaaacgcatatgctcattctttttcccgctctctcccattcatgcactattttcttggatttcctctttcccgtttccaatttttcctttccactctcttttatttaaacgttattttttatatcttttctagccaaactaatgattttttcatttttaattatttttgcaacatttccca

SEQ ID NO: 286 - DNA, 7926 bp, Heterodera glycines
cgcaaacccgctgaccatgaagaagcggactgcaggcggttatttgctgcgtcaacacttcccgcggcttctccaattcccggcaacagaaatggcgtcacatggccttggtcaactggtccgcgccgatgggatggaactttaccgattgatgaatccgcatcacaaaggagatgttggttatttaatgattattgaaacaactcaacaccctggttcctactattttaatttttcaatcgaataagtttttttttcgtaattgaataaacaatcaagttataaaacatttttatttatttaatattttgttaaatacaactaatgcgtacatatcaggacttgtacaattgctaagtgtagtgagaaattgctcaaatgaatatcccacggacatatggtaaatgaaaacaatgcaatgggcaccacaagtagacaataaagaggattggtaggggtaagaattcttcctcagtccctccgggaatttacacaaaaaagttgacgtaacagcggctgggattggctgagcaaggctgtcaaaatagaacactggtgcatccaatccctttgcataaatagcgcaccaatgagagcccttcttatggtgggggtcccggttcacaacgagcgctgcggagtactgtagtgtggagggaggtggcaattggtcactggcgtagcagccccgaaatgctcgctctgtccgacaattttcgttcaaaatctttgttatttgcacgctgtccattcttcaaccaaaaaattgaacagagttggtgtagcacaagactgatgataagcattaaatagagagtgaagagggcccagcaaatagcttgatgaaaaatgctgctttcctcaggctgctccttacacatttggataagcggtggaagaacagcagaaacatgctcatcaattaacttgtcgctttttggatgggtgtttatgttcgaggtagttgttaatgggacagttgttgtactgagaatggtgttggtggtacgtttgaataaagacagtctccttaaatattcagagtatgaatagtgtggttcatattgttgtcgagacaaagtcaaattttttaggtaagcagagtaggtattttccggttgttgttgttgtcgcaatgttgatgaaacaacgggaagagaaactcggagaaagaacaaaatttgggcaaatttttttgaatacatttttattttattggaacaaagagaaatgacaaacggactttaaatagtggtgtctgtgcttattgatcgatttttgtctaacatcaccagtgagtcacattctcccatcaccaccagcattattcctccgtcgggcactgggtggttaaatttgatgctgacggcagtggtcccattctttatcagatcaaatagtgccgcttgatcatccccactgttggtcaaattgaacacgtaaatgcaatgcgttttcccatattgggcaaaagttatcccgttgctctccgaagaatttgcgaatcccaccgcttcgttcatgtcattgaatggtcgaacatatttaccgttagggtagtccaagtcatagggtgcttgtgggtacgagcgcccattagcaacaatggaaatttcgcgcacattaaatggttgaaaattgaatggactgcgccgaattgagccgacataatcagcattcgccaccagacccattgtcacacgacgggggatttggtccatgaacaggttggctgtaaactcataccgaccctgactgatgaacattgacttcatcattgtcttccgcactgcataacgggcaggtttcacctccagcttccgcgcaatgtccagcgccaacccatccatcagagacacctttttcacatataatttcagtccaacaacttcaaagcggtaccggggcgcacccgtggccggcgcaattaacacaaactcattgtcattgggcagaatttcaatgtccaattcacaaaaattgatcagatacagtggttggttgaataggtctgtgtcaattttggcgatgaattgagctacaccgctaccagcaaacaaatcacgtcgcgctatgcatccgtttcccgtctcaagcacatcacccgtatcccgataatagcctgcggcgttcagatgagagtcctttgctgtcgttgaataggagagctcatgcgagaaatatgttttgtaagccattaaagcgttggcattgaaaatttcgcgcccattgatactcatttttatgttacggatgaaagtttgaccgatcatttgaattggcgcaatgtgtgcatcgtcaacagtgagatcaacaagttgtccatttgcgttttccttgcgaatgcggaactcagtgagcaaataacatttagagaggtcaatgtaattttgactggaatgaagtttaaagtggtacggtgtgtcagtcagagggttgctgggcagaagctcgaacacttttgatgacgaaacgctcacatttgtagggggaattcggaaaaagtccaaagcattggtgattgagttcacagaatcgttgtcaattttatgaaacgccattatttaatatagtccaaaggcgtcggatcgaatacgcttttttgcctgttttacaataggtcgtccaattagcgtctgatgaccaggcagatgtgctttctttctttttatacccctttttccgcttccaaactgttttggtaatcctcctttgtcgagtacggtgtcgatccctttctttccctcactgacaagtgcctctttaaacggtatcccctcattcccgactcgttccagcacgcgttgtccagtgctcagtgcctccgatcctactgtagtgccaacgcggcgaagaattggtagaaaaaagcgccacagtccacgaaacacatccccaacgcccgccccgcgttgaataccgtagccccgttggaaggggttggacccccgaaagtagtcgaaatcgtccttttctaatccgctaccgtactgcacatactcgtcatactgtgctatgctcgggtcaaatacaatatgaaccatttattattaattataaatgaaatgtaaaatgaatggaatcaaaaatttatcactttcttaaatatcaacacgaccatcgttgttccataggcgaacggcaccaatcgtcctttgtccattgtgcgcagctcaatttcaatctcgtttatctcccttggcagcactcgcgcaaatattggcgaatcgtaaattttctcgttatactcattaggaatggcaccgctgatagacacaactcggagcaaagagctcaatgaattgccgatgatcatgttctcggtcaatccttttgagtagacagcaaaacttgagatgccgccacgcatatccaccggatactttgagagttcatttgaccctacgtgttgagggttttcgaaaccaagaacatagcccaattgcggcgaaaacgacaaatgactgatcacctcctcattgaacaccgctttgaaacgttctgcgtcatcgtgatatggtattgagactgagttgggcacatatcctagagggtcaatttgaacgctgaggatattttctggtaaatttaagtctgctaactttagagcagctgaggttggcgcgggtgacggctgcgttaaagcagctgcgattggagcgggtgaaggctgctgatgttcggtttctccataacggggtggagaccctgacgatggaaatttagcagaaagcgaaattggagctagcggtttagttggcagttgcggttttcgttgaggaggtgccgagctttttagttgcgctggaggcgccgtaattgtggttgttttaacagacggactcgtgacttgtggttttgcaggcgttgttgcctttgcggttaatttttctgctttattttcttcctcttcaaaacgtggtggagagcctgacggcggtgatggcggcgattgagcgctaggcctcgatttagcgggaagggaagttgaagctgtcagcttagctgtagtactggatgctgttgattttggagacggtgccgaactttttagttgcgccggcggtgccgaaattgttggtttaactgatgggctctgaacttttgttattggtggcgttattgtctttggcggttgagggacaggtgttgctgacttcggaggtggaggaactggtgttgtagacttcggaggtggaggaactggtgttgtagacttaggggctactgtttgtggtggtggcggttgggtttttgatggtgttgttgttgttgttgttgttgttgttgttgtcggggcaggtgttgtcgctattcttggttttggaggcggagggtttgatggttttgtttgtggctgaactgccgatggcttttgcggttgagaagtagtcgttaacggtttttgcggttgtggtgcgggcgatagatgctttgcgggtggctgagaggtcagtgttgttgttgttgttgttggttttgtagttggagccgatggtgttgtgattgacggcttaataggacttggagttgctgctggtggcggagacttggttttgggtgtgacaggagcaattccaatatcttttgtttgcgcttcttcttcttcaatacgaggcggtgattcttcaagcaacccttcatcatcatcaatttctttgggtgtgacaggagctattccagtgtcttttgtttgcgattcttcttcttcttcatcaaaacgaggcggtgactcctcaagcatcccttcgtcatcagcatcatcattttcgttatacaatgggggagattcaagccgttttccgctctcgtcaaacactggcggtgactcagctcttttctctctcttcaacggtggtggcgagccgagaggctttgtccgattccgattcgcttccacctcactgggaagtggcaacaattttgcaccactacgattccgcaatgtgacggccaaaaagtctctcagctgttcaaccctactatgcgatgccctgggcaccggcactctgatcactcgttgtctgtcctcgtcggaggcgctacggtcggtgaagtgaatgtcaatccactgctcatccaatgtgccaatggttgaccatgagtaggggtaactgatactgtgcagtccgcacacccacgagccattaaaatgtaaaggttttgggaggcggacacgaaatttgttgggctgattgtccgggtaatcacttacattgctaggcaaaaacacaaagaaactgttcgacatgattgtttatctgcacaaataatgaaaaatgtgatcgcttttatacaagctgagattcctgaatccattcccgattgggatatcctatgaatttcacaagcatctccgttgttccgtctgtcagttttctcttcctgtacaccttctcgatacggtagcttgtctctgcgtcctttcttacgcgtgccagctcctgttcataaaagctgcccttgaatttctctccatgctcatcccgcaatttgtaccgaattgggcgcaccgctttcaacacctcatcaatctcaaggatttcgtccccgtaatttggcaaataccctttctcaaattgtcccttctctctactcatgcgcacaaattcatcattgtgaaaacgtggtggtcttttacgtccgctcaatcgtggttgtcggtggtacattcgcttccacactttctgagcatttgaaaagtcaacgtcaatggggcgcatcccgtgaacacgagatggagaactgttaatcccgtccacaattttctgtactgtatccagccagttcagcgtctccttttccgcaaaataccgatacaatcgctgcttaacattacgaatggcccgctcagcaaccgacgccttgacggacgaatgaacgggctcatgcttctcaatttcctgctcctcaaagaattccttcatcaatctgttcttgaattcggtgcccttgtctgagaaaatgcgatgcgggaccatgggcatttgatcgatgagttgcttgaatgcctccaacatctcctcggctcgcttattttttagtggaacaacaaacaggcgtttggataggacatcaaccgcaacgagcaggtagcggtgaccccgattgtgacgcgaaagagcttgaaaatcggccaaatccacctggacatcggtcatgaatcccgctgctacagttttggcccttggaaagcgcacccgccgggggcgcatcagagtgtaggtgcggtgcccctccaaataatgctgcacatcccttttccgtaaatgttttagctttttttcgcgcttccttccacagtgcggtaactccggcgaacgctgccggggaggatggattattgtacagcttgtcaagagtggtgttgattaactccattttttcggacggaattccttcttgattttcggcgccgtcttggtggttgtgctctttgacggtctctttggaggagccgtccatgaatacaaaattgggtcctgtctaagccgctcttccaatagggccgctccaggtggtttaatggtggggcggcccgctctcctgtcaattatatacctgatggccattcgcaaattgctatgcgccaacggcttgccatttgctgtgttaattgtattgccccggacacccatacgatccgcataacggttgcatttgatgtacagtcgttcaatccgctgagtcatggtcagctgatttgacggaatggcaaacagttcacgttgttgttgctgttgttcatcactctgcgcagatgttgatggacccggctcgggcgagtactgtactcttaccctcctcggttgcctaactcgttttcgtatgcgcacctcatcatcattctcaccattcacggggtggcggcgtttggtccccctcctaggcggaggaacatagggcatttcttcgacgacagcagcaggagggggttgctgttgcggtggcgtttcattaatttttggctcttttttcgggatctgatatggcacgggtctctttgtcgattgcggctcatatttgggttcaattttgggtgtcggcggggggaagtatccggcttgccttgatgtggatgggcgagaatctagctgctcaaattttggtccacttttcgatttaggtgctggtgtgggatgatcggcttgttttggtgtcgacggtttaagttccagttttggcttttgttctatcttgacagaaggacgctgtggaggtggaggtggaggaggtcttggttcaatttttgctttagcacgcggcattggtgtgggtcgtggaggcgaagggcgaaagatcctatgttttttgtgtcttaaattgttttcacctgcctcatccttttttaattttcttctggtggcaatcctatgctgtgcggtgtccatctcctcaatttcgtccgcgttgtctggcagcacaggtaaatcgccatagtattgtgatggcgctggcagagcgaacccactctccaacatataatcatcatcattatcactttccggtaaaggagcggcagctgcttcagcaagaagatcacgtacaaccggccgccgtcgttgtatatcgtatcgccttttctgccattgctccagacgaccacctctccgataaggcgctgctctactcggtctgggaggacgtttaggatgaggtggaggactccctggtggagaaggagcgggaattggaggaattggtgggggccgaggacgtctcccgggtggcggaggtggagggggaggacttggtccacgccaagggcgtctcccaggcggaggtggtggtggtggtggtggtggtggtggtggtggtggagcgggaggtctgggtggagcatccacaacttcaccattttcatcttcaccacctcttctcatcagcacacttatccctttggtgagctcaactttggtcggtctg

SEQ ID NO: 287 - DNA, 6384 bp, Heterodera glycines
cgtccatgaatacaaaattgggtcctgtctaagccgctcttccatagggccgctccaggtggtttaatggtggggcggcccgctctcctgtcaattatatacctgatggccattcgcaaattgctatgcgccaacggcttgccatttgctgtgttaattgtattgccccggacacccatacgatccgcataacggttgcatttgatgtacatccgttcaatccgctgagtcatggtcagctgatttgacggaatggcaaacagttcacgttgttgttgttgctgttgttcatcactctgcgcagatgttgatggacccggctcgggcgagtactgtactcttaccctcctcggttgcctaactcgttttcgtatgcgcacctcatcattctcaccattcacggggtgccggcgtttggtccccctcctaggcggaggaacatagggcatttcttcgacgacagcagcaggaggggcttgctgttgcggtggcgtttcattaatttttggctcttttttcgggatctgatatggcacgggtctctttgtcgattgcggctcatatttgggttcaattttgggtgtcggcggggggaagtatccggcttgccttgatgtggatgggcgagaatctagctgctcaaattttggtccacttttcgatttaggtgctggtgtgggatgatcggcttgttttggtgtcgacggtttaagttccagttttggcttttgttctatcttgacagaaggacgctgtggaggtggaggtggaggaggtcttggttcaatttttgctttagcacgcgccattggtgtgggtcgtggaggcgaagggcgaaagatcctatgttttttgtgtcttaaattgttttcacctgcctcatccttttttaattttcttctggtggcaatcctatgctgtgcggtgtccatctcctcaatttcgtccgcgttgtctggcagcacaggtaaatcgccatagtattgtgatggcgctggcagagcgaacccactctccaacatataatcatcatcattatcactttccggtaaaggagcggcagctgcttcagcaagaagatcacgtacaaccggccgccgtcgttgtatatcgtatcgccttttctgccattgctccagacgaccacctctccgataaggcgctgctctactcggtctgggaggacgtttaggatgaggtggaggactccctggtggagaaggagcgggaattggaggaattggtgggggccgaggacgtctcccgggtggcggaggtggagggggaggacttggtccacgccaagggcgtctcccaggcggaggtggtggtggtggtggtggtggagcgggaggtctgggtggagcatccacaacttcaccattttcatcttcaccacctcttctcatcagcacacttatccctttggtgagctcaactttggtcggtctgtcggtaagctccctcctcattttcaaatagcgtctaagctgttggttgtagtggacattttttgtagacgggtgggttcgttcggccctggcacggtccaaatcgtatcgaacagcatcaaggttaatgtctcccgtgtccgacatggaggtgagaccacgataaatttcttgaggaacaagtaaaaatttattcgccatattttacaaaatgagtgagtgtacacaaaacaaaatggttgcggggtatttatgcatttttggtcacaaaggactttgccacttcaattagaacgggtgtcaatagggcagcgaacaatccgccaaatcctgcgcctttctgaacaagcacacgcctggcgccccgctcacttctcgctctgctcattcggcgtacagtatccacatggggcattagtctctttttttgtcgggttgtcagttgaaagcgcgaagcgacgagattcaaacaaatttccaccagcgcaaggagttgttcagtgctagcttttcctatcagtttcttgcattttttcccggatttcgtcttggccaaagcacaaagccatccgcgattttctttaatcagttctccaatctttacttgttgattatgtcgctccatttttgggaataaacacaaccgttccttcgtcttcaccctcctgctcgtccttaaatatgttggttcgaagccgcaatgatgggtctgatgcagcgtgcatatcaatcagcaaatagccatagggacgagcggtcgctttgcggtaagcatcaagaaaaaagtcgagctgacgcggaaaaagttggacaccaatgttgcgaatggacaacagggaattaggggcccgcatcagcaccagatactgagcggacaggcgggccacttttattttccgttcaaacaaattttgagtgacgaacaccaccgcaaattggtggtgatgtgactttttggtgaacaaatcggacaaatatttctcgtcgatggacagcatcaggtcgtcgagaatgagcaagaggggttttgggagacgtttgagcaattcttcagatgggactcccgcatacacatctactcccgccttttgaagcgccggcaccgctgagttcatttcaccaaaacaatagagcattgagacgggctttggtgtgattaattggtccgagtccgcaataaattttaacaaaaactcagttttccccgatgaggaggggcccgaaatgattaggccaaacggtagtttgaaacaaatatctttattggtaaatgattgtgtattaagcatttttggggggacaaaatgatttacatgtttgcggttgaagctttaatactatcaaagaactcgtcaagcgttttgtcaatgtcgccaaggtcctccttgttttgttcatcttctcgtctgggctcttcctgtacattctcttcctccacagggctatttgtcactttggtgtcaaacgattccgctaaaaggaggttgccgagtacattgattgcggttttggccttcttccaacgagcaccgtcctgcatggcatcggccattagcccggcttccactaagtcaagtgctacctttgctttgcgcttcaggtcctgatcggtttgcgtttcttgggttgagaaggtggtagtagtagtgatgcacgtgtctgagggcaggtcaccgtagggcacattgaacactcgggccttatttttcacgcgaaagaaacaatggcccggcaggtcatagacaacgtcaaaagggacgaattggggtttgctgatccggctgcaccacaaggtgatcccctctttggtcaccattgtgtccacctccacttcggtagctttgcatgcgcggcagcggccgcactcctcgaacggtataaatcgcggggtggacagacgaggcccgctcacggttatgccgcttgttgtcaccgtaatgtctgcctgcccaaggatttggttgacgagcgcctttttgtcggaaatattgattgccatttttatttgggagaaaaattttcgagaatgaaatggaagacggcggaattaacagctgcttatatacacccggctggacatcaattgagccccccccctccaatttaaaacgtcaaattacgcaaaaggaattgagtaaagattgggtgggatgggcactcaatactgagtcccgtgcgacaattcaaatcgatgatgacaccccctcccatccccttctcgttcaagtttaatgttcatcttttattagaacagagagaaaaaagcggaaccgcatgaaactcaaatcaaagcgatcactttatttggacaagctgatcacaaattttatccagaattttcttccatttctggacattttcacacggcatacgacgctctttggcgaattccaacacctcctggcaaacgtcacgcgccaccatcggtgtgaaccagttcaaaatctgagaatggcaaagtgaaaaaaaaaagatgctacgattaaaaattaaaatttacattgtcgtcgggcgattcgaaaatgtcataccaggcggacaattcataaagctccatgtcaggagacggtgagcgacggtcggtagagttcatggttacagaaaatggattggtctaaaaagtaattaaagtacacggttgagacatttgaataaatatttgcgaaatatttataaataacaaaataaaatttaattattgaatgaatgaatgaatgaatgaatgagtccctgacaatttacctatttatactcaattttgcatcaaaacaaattaaagattcctgatgacccaattcgaccatctggcgaattctcgccttgtgtccgccgacattatagggggaaattaattaattatgcaattcggatggaaaaattcaaatttctcattaatttaactccaatatattttagggagattttatatttgaatttcccatatggttttttttttaattaatcataaattttaaatttatttttatacctacaatttatcctgattatttaagaaaaatatagatggatatataaaaaatgtatataaatggatatattaaaaaaatatatggatatatttttaaaaaataaattgatcaatcggttatttttatgaatttctaaaattcgctctcatcgtcccactcatcctcctcctcttcaccattctgattgctcggcacgtttgccggagtgtcatacacatgatcaaggcccgtattcgcctgaaattataaaaattgggtaaaaatttttttttaatataaattaaattgcctcataaaattggtcctcctcctcgcgcaccgaactgcgagccgacacatacaacgggcgcgtcttgaactgctgctggtgttgtttctgtcccgtgttcgcctgaaattttaaaaattgggaaaaaattttacaaattaaattgcctcattaaattgttcctcctgctcgcgcaacggactgcgacgggccggcacgtacaatggactcggtttgaactgctgctgctgttgtttctgccgctgtcggcttcgaatttgcttgccttaacacacacaaatttttcattatatgattgtgcaaaaaataaatatgaagacttacggcgttctgcctgttccttttgacgacgcttcaactctcgcctcaaagagagaaaacgggccaacttgatcaaatgttggctgagctttaaaaaaaggaaaaattttattgagattatgattttatataattaaaaatgcctgagtcatgaagagaaggaagacaaagacagtacaaacgatgaccaaaaggaggagaagggcatttgacgggtagcttacggtagtcgccacctcagcgcagttcagcgccttccgcactccatcattgacagttgctagcggctcgttgttgggctggggacagtcggttgtcgttgcagttgtttggggcgcgcgctggaggtagtccgtgaagttcgagatgtccggatgcacacaaacaattggctttttgtaattgcctgctctataacaatgaaggccaaaatcgcaggaattacagaggaatcggttccactgcaacattattatttttaaaatgaatagggcaattggctagggaaaccccctccccacggggtccctttacctttcaaaaactttgtcacacagtttggcccaacaacaaataacaaaaatgttttctacaaattattacccatgcatccttctcttcttttatcatttgcatacccttcccccccccgccaaaaatctattaataaacggtccccggttgatcacggcagagattagtgggtcaccgtgtcccctttttctcatctcctttccgcgagcaacacggcgcggcgacaaacaaataacacatttccgataccccccccccggcactcttatctcacatcccctgtctcttttctcttgttgcttcttctctctgtctctcactttatctctcatccaccaccaccaccaccacagcactgctgcatactccccccccccaccaatgatcacccaaaaaaaaaacaaacttttaaaatttggcacccccaaaacttttttttttcacccccacaaaatgcgcgaaaatttccctctaaaattaggcttcacccccccccccccgaaatttaaaatcaaaaaaaaatgcgcgaaaatttcactcaaaaacttcgccccataggcattaattaagtaccccccccccataggctcgctccccactaattaatcaccccccccccccccataggattcccgcactcccccccccccccataggattcccgcactaattaatcacccataggcttaggctcgcgcactaattaatcaccccccataggtaattaatcacgcggcaaacatcaaagaccaaaagccatcaatcaccaccgcgacaatgactggtaagtaactactat

SEQ ID NO: 288 - DNA, 5240 bp, Heterodera glycines
ctgccggactcctctttgcactcgacataacaatgtccatgccctttgaaagggtatttgagtgcatatttgatgttcgctttgttaccgtatgcgaataacacgttgtggtgtactcggtaacgcagcaaaatgtatgggttgtacggcacgacttgcgagttgtcgtatattaagccgttcacctcaatttgggcaccaccgtcggttgggctaggccggtaatacaatgcgggcctgtccgggtgtagtattgtacatttcgagtacggggctgggaagccctttttacaccgcccaaagttggggtcacgtggaccacaccaactatcactgcatctgtgcagttgcatatgcattagttcgcggacttcgcgatgcatttgcgctatgggtgagtcatcgtctttgcacggcaaaggtggaatatgagcccatatgtattcctggatgacttctgggactgcgtccaggtcagtctgggctacaatgtgtgcgtgtgggccaccacgcccttggaactccattgactcgcctgagccaaggattgttccgaagaaactcttttcatagagctcctggtggaaaacagcaattttgctggaccacacacgcatccacatgtcgaaacggtcagtgaacatttgaccatttttgtaaatgttttccttgaactctggccactcacggttattcgtgaatgtgatgaagagccgcgccttttttgcgtcatggcaacgcgcaaaaatggtgttgcagtcttcatacatttttttccaatactgaagagaatttacatttctctcagaaaggcgaacaacgctaccaatgtcatcgacagtcttttgtcgtgcattggggttttgccgagcttgctgcttattgtattggttcaccaaataatgcagcagattttttggagtacttatgcgcaggtccatgtctggacggcgcaaaaaggttgcaatttgccagtcaattttggacgcttggtctaagatccagcgctgtccaagaccaccgccacatgaaagaatgtggtggtattgccactccaaattttcatcccttatggcgagataatacttgcagtaatctcgcagggagacaaattttttcgatttgtcatagcgactggtcactgactgcatcgatgcttcagacccagacgatgcaattgactcggtatcgcaaatgtcatcatctgacattgcttgattgtcaaacatatcatcagacatgtcgcttttccgctttctttgtgcgggtttggcatatggaatgccaattttatatccatcgtcgcccttaggcttaatcaatggataggttaagctatcagtccatggactgagaggggcaatttcgttcagctgcccttgcttgttttccacccatatcccttttggtgccggggcaccgttgggatccgcatgaatcgcgaacatcccttcacccgttgagggggtgattatctggtggggatgcaacttcgggtctttcatagcacccggagcagagcgctcatccaacaaagtcattctgaagaaccgaagctcttcagtcctttgttgttttaacaactcatggagctgttcacgagcctgcttataagcagaagcagctggatgattttcttggatcatttgctccaaaatttcaagggtctcatcattaagctgatgaccttgcacaaactcttcatcgtttgtgattttctctcccgtaaaggtgggattttttcgccgctgctccatggcttcgactggatccagaatgtacagctgaccaaagccaggaatctgtgttgtgccagcctgcatgctgcttatgcggcgatggaattccccgttgagaattacagccatcgggccgccagcagggcatggcttatttccagccgaaacactcgcgaattggagcaagttgttgtaacgcgacatattgcgaataaattcttttccctcgcgggattgtttttcccccacaattagctcttgaagctcttttgggtgaggattgagttttggcaacacaactcttccctgacgacagcaaaggctgctgtcctcatgcgggaaaagtagcgctccacaataagagcattttttttcgccaagcttaccagaatctgtgtattctggataatgctttgctgctgcagcagcacagcaccaacccttgtggacaaggtagcaacgctgcgtaaatgcagtgacttgctcaacagcatttgttgatgaacgacgtcttggtgcggctgaaggagaacggctaatcgaagatgattgccgtctgcctatgcgcgatgatcgcctcggaggcgtcttcggcctgacgaagattgcatcgtcagcctgcgcaattggctcttgcacgacgcaaaaatccgacaccaaaccaagcgtgtcagcttggttttcacctgccacttgggcttgggtggaaacggcattaactgcctgcccactcgtctgaggttcgatgatcgttatgtcatcatgctcatcaatttccattggctcagcggtcttggatttcgactgcgcttcatctgtatgtcgatagacaattgggcaaggagttggcaccccttcccttggatgatatggcacattatcagagccatacagctcgttaatgtgccataaaatacgcttcttttcataattgatggataagtctggcagaacaaacgtgcgattgttcattagccaggattcggcatacaggcacacaaagtacccgcagctatttccatcgtgttggaccgtcagatttatggcattaacaataccggtcaacactgttgacggcaaaacatcagaaatgatatttttaattttatccgtcacttgaaaatccaatctgccataaggggtaggcaaagaatcggcaaaatgagtaccgcactgaacatcatggacaatgagagtccagtgtcccgggaaatgtattggcaaaagaatgacttctgccgtaacattagggtcatacccaaatgtcatttttttatattggatgacccggtctatgcccatttgccacaccattggatcaacaacgaccacttttcgttgtgatatgcttgccaagtatgccaaatattcgacaataaagccatcatttagaaactgtgtcagatcattccagcacgtttcaatgaatcttgggccagagcgtctctcatcgcattcgtaaagcccaatacgagatgtggcgaagttaatttgcactgtgctgaaatttattttttcaggcacatttggtaaaatcgccacatttgtgattgcttctgagccgtggtcaattgaagagccttcgctcattgaaccaactgtttggcccctgcctggtcctcgagtttttttggccggccgcccaccacggcttttttgcgttgaaacaggcgttgaagcaattgcttcaatagcagacaggggtcgatcaacatcttcgaccttcaattttttactgcttggcggcgactcaacattttgagtggccgatgtgttttgtgtgccaactgatgacgcactattttgcgatgtcataactgactccgctctggcttttgagggtctgcccctttttttacttccaatggaagaagccggtgtgcttaattgcaaagcacttatgttcggggtattaaagacccggagcgaatccgcccgattcctatctactgaattcagtgggttgccctcagaagggcaatttgggataggcaagctccctgggctgacagattgctccgtccaccgcaggtgctcttctctctctctcatctcttctctctttctcttcttctccttttctcgctttgatggcatctacaaaaacaaagtcagcgtgaaaattcaagtgtgacaaaagtatcgaggaaatttaaccaataaatgcacacaaacaacatatttattcaaatatagaaaattgtgtgaattattgatgcagttcagcaatgacgtcacacgtgaagccgctgccaaaatcaatcagcctggtcactcacctatccaatattgttgaccacaattccataaggggcaggtcgttgttgaccacaatcccataaggggcaggtcgttgttgaccacaatcccataaggggcaggtcgttgttgaccacaatcccataaggggcaggtcgttgttgaccacaatcccataaggggcaggtcgttgttgaccacaatcccataaggggcaggtcgttgttgaccacaatcccataaggggcaggtcgttgttgaccacaatcccataaggggcaggtcgttgttgaccacaatcccataaggggcaggtcttgcttggttcaccacaatcccaatggctagtgtaggaatcctacgctaggtcattagtcagcgtaggaatcctacgctaggtttttcaaaaatgatccgaggaagcgattttccactcccttttatagactttgagctcgagtatgataactacattagcctagtgtaggaaaggctagtgtaggaatcctacgctaggtcattagtcagcgtaggattcctacgctaggtttttcaaaaatgatccgggaagcgatttttcactcccttttatagactttgaaggtttattttttttatataatcaacacaagtagaaacagtacaaatgcagaatctacactctacactatagaacactctacactatagcacctgtaaaagtgactgcggatgtgcaatttcgctgcgcttatatagacttttggagagtagtgtagagtgtagtgtagtgagtctctacactatagaacacacctacactctacactatagaacactctacactatagcacctgtaaaagtgactgcggatgtgcaatttcgctgcgcttatatagacttttggagagtagtgtagagtgtcgtgtagtgagtctctacactatagaacacacctacactctacactatagaacactctacactatagcacttgtaaaagtgacagcggatgtgcaatttcgctgcgcttatatagacttttggagagtagtgtagagtgtagtgtagtgagtctctacactatagaacacaactacactctacactatagaacactctacactatagcacctgtaaaagtgactgcggatgtgcaatttcgctgcgcttatatagacttttggagagtagtgtagagtgtagtgtagtgagtctctacactatagaacacaactacactctacactatagaacactcta

SEQ ID NO: 289 - DNA, 3983 bp, Heterodera glycines
gcgcttatatagactttctggagagtagtgtagagtgtagtgtagtgagtctctacactatagaacacacctacactctacactatagaacactctacactatagcacctgtaaaagtgactgcggatgtgcaatttcgctgcgcttatatagacttttggagagtagtgtagagtgtagtgtagtgagtctctacactatagaacacacctacactctacactatagaacactctacactatagcaccagtaaaagtgactgctttattcaggttgccaattaactaaaatagtcttaaaaagtttttgattgccgccccgccaacgaagacctgcaactgctgctcgccctcggatggaatatcagaggtattttgaacttgctcgtcttcgttacgcttttaaaaaagagttgaaattaataatgaatttgtgttaaggtattcatagacggcggtgtacgcagtttcaacttttgtggttattatactaaacaaaacgtaacaaaaatttatttgtggtgcacgaaaatcttcaaggacatcatcatagcatataataaaccggtaaaaaatttctcaaaatcaacgttaagatcataaaaaattctaactaaaattcatattgaaaatatatttcccactttcaagtacatctttcttcttgttcgtcccgcgcttttcatcaacttctttcttactaacctcctgcttaattcctttaaccttggattcaccacgactttgagtgtttttctaaattattcgtttattaacttagttcaaacagactaaagatttaattagtatttttttacatactcgagtgcgtttgttgccaagcttattttttggctgctgattctccatctgtttcacatcaacaactttcccatcaatggtatgaggtccacccgaaattattgcggcagtcttaggtataaaatagtttatctttataattcataaatacctgggtacacacgaaggtcacgaagccaaaacagcgcgaatgtttgttcttgacatgtcgtacaaccttgcaattttccaccttaccaaatttcgaaaaataagcactcaaagaagcgtctgtggtatcaatagataaactaaatacaaaaaaataaggaagataaagtatcataaggcaaacccgccaacgaagattttgtggtcttttccattaacggaactgctgctgccaggggctacagacaattggacatcggttggctggttgccctcggatggaatttgtttagaagacatgttgttgttgtgggtgttgtccatcagactgtgctgccctcggatggaatagaaatataattttgctgtcaacgaaatattttgctaaacatataaaaaaatgtagcatcaacacaatgtcttgtaattatcctacactggatactctacgctagtgcatttgaactacattagcctagtgtaggaaaggctagtgtaggaatcctacgctagttcattagtcagcgtaggattcctacgctaggtttttcaaaaatgatccgaggaagcgattttccactcccttttatagactttgagctcgagtatgataactacattagcctagtgtaggaaaggctagtgtaggaatcctacgctatatcattagtcagcgtaggattcctacgctaggtttttcaaaaatgatccgggaagcgatttttcactcccttttatagactttgaaggtttattttttttatataatcaacacaagtagaaacagtacaaatgcagaatctacactctacactatagaacactctacactatagcacctgtaaaagtgactgcggatgtgcaatttcgctgcgcttatatagacttttggagagtagtgtagagtgtagtgtagtgagtctctacactatagaacactctacactatagcacctgtaaaagtgactgcggatgtgcaatttcgctgcgcttatatagacttttggagagtagtgtagagtgtagtgtagtgagtctctacactatagaacacacctacactctacactatagaacactctacactatagcacctgtaaaagtgactgcggatgtgcaatttcgctgcgcttatatagacttttggagagtagtgtagagtgtagtgtagtgagtctctacactatagaacacacctacaatctacactatagaacactctacactatagcacctgtaaaagtgactgcggatgtgcaatttcgctgcgcttatatagacttttggagagtagtgtagagtgtagtgtagtgagtctctacactatagaacacacctacactctacactatagaacactctacactatagcacttgtaaaagtgacagcggatgtgcaatttcgctgcgcttatatagacttctggagagtagtgtagagtgtagtgtagtgagtctctacactatagaacacacctacactctacaatatagaacactctacactatagcacctgtaaaagtgactgcggatgtgcaatttcgctgcgcttatatagacttttggagagtagtgtagagtgtagtgtagtgagttaataatgaatttgtgttaaggtattcatagacggcggtgtacgcagtttcaacttttgtggttattataataaacaaaacgtaacaaaaatttatttgtgctgcacgaaaatcttcaaggacatcatcatagcacataataaaccggtaaaaaatttctcaaaatcaacgttaagatcataaaaaattctaactaaaattcatattgaaaatatatttcccactttcaaatacatcttttcttcttgttcgtcccgcgcttttcatcaacttctttcttactaacctcctgcttaattcctttaaccttggattgaccacgactttgagtgtttttctaaattattcgtttattaacttagttcaaacagactaaagatttaattagtatttttttacatactcgagtgcgtttgttgccaagcttattttttggctgctgattctccatctgcttcacatcaacaactttcccatcaatggtatgaggtccacccgaaattattgcggcagtcttaggtataaagtagtttatctttataattcataaatacctgggtacacacgaaggtcacgaagccaaaacagcgcgaatgtttgttcttgacatgtcgtacaaccttgcaattttccaccttaccaaatttcgaaaaataagcactcaaagaagcgtctgtggtatcaatcgataaactaaatacaaaaaaataaggaagataaagtatcataaggcaaacccgccaacgaagattttgtggtcttttccattaacggaactgccgctgccaggggctacagacaattggacatcggttggctggttgccctcggatggaatttgtttagaagacatgttgttgttgtgggtgttgtccatctgactgtgctgccctcggatggaatagaatatgatttcgctgtcaaggaaatattttgctaaacatataaaaaaaggtagcatcaacacaatgtcttgtagatatcctacactggatacgctacgctagtgcatttgctacgctagctttcgaaaaaatggtagcggactgacggtttcgctggccttttatagacttttctgtgggagtagtgtagagaaactacactggatactctacgctagtgcagttgctacgctagctttcgaaaaaatgggagcggactgacgttttcgctgcccttttatagacttttctgtgggagtagtgtagagaaactacactggatacgctacgctagtgcatttgctacgctagctttcgaaaagggagtagtgtactgagtgtagagaaactacactatatactctacgctagtgcatttgctacgctagctttcgaaagggagtagtgtagagtgtagagaaactacactggatactctacgctagtgcatttgctacgctagctttcgaa

SEQ ID NO: 290 - DNA, 3862 bp, Heterodera glycines
  unsure (1)..(3862): unsure at all n locations
ctctacactatagaacacacctacactctacactatagaacactctacactatagcacttgtaaaagtgacagcggatgtgcaatttcgctgcgcttatatagacttttggagagtagtgtagagtgtagtgtagtgagtctctacactatagaacacaactacactctacactatagaacactctacactatagcacctgtaaaagtgactgcggatgtgcaatttcgctgcgcttatatagacttttggagagtagtgtaaagtgtagtgtagtgagcctctacactatagaacacacctacactctacactatagaacactctacactatagcacctgtaaaagtgacagcggatgtgcaatttcgctgcgcttatatagacttttggagagtagtgtagagtgtagtgtagtgagtctctacactatagaacacacctacactctacactatagaacactctacactataacacctgtaaaagtgactgcggatgtgcaatttcgctgcgcttatatagacttttggagagtagtgtagagtgtagtgtagtgagtctctacactatagaacacaactacactctacactatagaacactctacactatagcacctgtaaaagtgactgcggatgtgcaatttcgctgcgcttatatagacttttggagagtagtgtaaagtgtagtgtagtgagtctctacactatagaacacacctacactctacactatagaacactctacactatagcacctgtaaaagtgactgctttattcaggttgccaattaactaaaacactggatactctacgctagtgcatttgaactacattagcctagtgtaggaaaggctagtgtaggaatcctacgctaggtcattagtcagcgtaggattcctacgctagttttcaaaaatgatccgaggaagcgattttccactcccttttatagactttgagctcgagtatgataactacattagcctagtgtaggaaaggctagtgtaggaatactacgctatgtcattagtcagcgtaggaagcatggggtgttaaaagctacactatacgataagaatggctttcgcacagaaaatttctccctttatataggctaatcaaaagcatagaaaataatgataaaatgcaaagaaaaataatgtacaccgcccggattcgaacttcccccccccccctcagaatgatgcctcagaatccccaagatgctagtgtagcatcgctacattaggttattaagctagtgtagcatcttaggttattaagctagtgtatcatcactacattaggttattagctagtgtagcatggggtgttaaaagctacactatacgataagaatgactttctcacagaaaatttctccctttgaaaaagggtagtgccaagtattactaaactgaatattaaaattgtaagcgaatcatatttatccgctgtgattcagagaatagtgtgatttataaaacaaagtcaataaaaaagctttttttcaggtagccgatttaaaattaaagctaacgctttgggctgccacactccgaatcacgctcccaaagatccattccttcgggcctggggacactgcatcttttcaaatcatcactctttatgtactgctctagagaactgaaaaccatattttgaagctatagtcgccaataattaaagagccaatcatttttaatataaatataaatcttctcacatttcatcagggtcaacaaattccagaagtgtgtcagaactgaacaaaaaatttccttggctgaattgaattctgttttgatgctttgaatagacatgaacgtgttcgttttgatggtcaggcgtcgttttaatcccaatagattgacgactacgttttggagcgctgcagccttccattgtagtataattttcaaaatgtagtttgtttgacacattcggcaattcagggaacataactaaaaactttaaatctctgcttattaacaatatggttacgatttcgtgtgacaagtgcgaccattctattcacagttgagttaacaatttgttcgtcggttaaagtgattaatgtcgatttatcacttcctggtgctgtcttcggcatcattttattcaggttgccaattaactaaaatagtctttaaaagtttttgaaaggaaccccgccaacgaagacctgcaactgctgctcgccctcggatggaatcttagatggatgtagttgtttattctggccatctgattgaatataaatgggtttttcagttaaatgtttgatctccaatttctgtttgtttgacaaattcggcaattcagggaacataactaaaaactttaaatctctttgcttattaacaatatagttacgctttcgtgtgacaagtgcgaccattctattcacagttgagttaacaatttgttcgtcggttaaaatgattaatgtcgatttatcacttccgggtgcagtcttcggcatcattttattcaggttgccaattaactaaaatagtcttaaaaagtttttgaaagccgccccgccaacgaagacctgcaactgctgctcgcatttcgaaaaataagcactcaaagaagcgtctgtggtatcaatagataaactaaatacaaaaaaataaggaagataaagtatcataaggcaaacccgccaacgaagattttgtggtcttttccattaacggaactgctgctgccaggggctacagacaattggacatcggttggctggttgccctcggatggaatttgtttagaagacatgttgttgttgtgggtgttgtccatctgactgtgctgccctcggatggaatagaaatatgatttcgctgtcaacgaaatattttgctaaacatataaaaaaattagcacctgtaaaagtgactgcggatgtgcaatttcgctgtgcttatatagactttttgagagtagtgtagagtgtagtgtagtgagtctctacactatagaacacacctacactctacactatagaacactctacactctacactatagaacactctacactatagcacttgtaaaagtgacagcggatgtgcaatttcgctgcgcttatatagacttttggagagtagtgtagagtgtagtgtagtgagtctctacactatagaacacacctacactctacactatagaacactctacactatagcacttgtaaaagtgacagcggatgtgcaatttcgctgcgcttatatagacttttggagagtagtgtagagtgtagtgtagtgagtctctacactatagaacacacctacactctacactatagaacactctacactatagcacttgtaaaagtgacagcggatgtgcaatttcgctgcgcttatatagacttttggagagtagtgtagagtgtagtgtagtgagtctctacactatagaacacacctacactctacactatagaacactctacactatagcacctgtaaaagtgactgcggatgtgcaatttcgctgcgcttatatagacttttggagagtagtgtagagtgtagtgtagtgagtctctacactatagaacacacctccactctacactataccaaacttctaaaaataagcactcaaagaagcgtctgtggtatcaatttcgctgcgctatatatagacttatgggagagtagtgtaaagtgtagtgtagtgagtctctacactatagaacacacctacactctacactatagaacactctacactatagcacctgtaanagtgactgcggatgtgcgatttcgctgcgcttatatagacttttggagagtagtgtagagtgtcatgtagtgagtctctacactatagaacaca

SEQ ID NO: 291 - DNA, 1566 bp, Heterodera glycines
agagtagtgtagagtgtcgtgtagtgagtctctacactttagaacacacctacactctacactatagaacactctacactatagcacttgtaaaagtgacagcggatgtgcaatttcgctgcgcttatatagacttttggagagtagtgtagagtgtagtgtagtgagtctctacactatagaacacaactacactctacactatagaacactctacactatagcacctgtaaaagtgactgcggatgtgcaatttcgctgcgcttatatagacttttggagagtagtgtagagtgtagtgtagtgagtctctacactatagaacacaactacactctacactatagaacactctacactatagcacctgtaaaagtgactgcggatgtgcaatttcgctgcgcttatatagacttttggagagtagtgtaaagtgtagtgtagtgagtctctacactatagaacacacctacactctacactatagaacactctacactatagcacctgtaaaagtgactgctttattcaggttgccaattaactaaaacactggatactctacgctagtgcatttgaactacattagcctagtgtaggaaaggctagtgtaggaatcctacgctaggtcattagtcagcgtaggattcctacgctagtttttcaaaaatgatccgaggaagcgattttccactcccttttatagactttgagctcgagtatgataactacattagcctagtgtaggaaaggctagtgtaggaatcctacgctatgtcattagtcagcgtaggattcctacgctaggtttttcaaaaatgatccgaggaagcgattttccactccatttatagactttgagcttaatgataaaatgcaaagaaaaataattgacaccgcccggatccgaacttcccacccccccccccctcaaaatgatgcccagaatccccaatcacacggggattctgaggtctaaacaatgtcaaaagtaaaatctgattacgtattcatgatcagcggcccaaataacccataaagacatgtttttggaagattttgggtgaaaaaaattttccacttaaaaaccatgtgctcccccctttggtcccgaatcccaaaatcacttttatttttgtatcttttttaaaaaaaatgataaaaacttgaaataaaatttatcctatagagaaaaaaattgcggatttttgtagtattttacttttcacgagtgacttttcagaaccgagttctgaatttttttctgaaatttcgaatttttccagatattctggaatatcttttttatttttagagatagaaattccaaataaatcctataaaattctcctgaattttctctatttttaaagcattattatagttaaatcgatgaaaccatcactgagttatgaattttccaatattatacaaaatcctgagggccaaaaatttcccaaaaaataaagaatttttaaaaaaattccaaaaaatctgaaacaaaaaacaaatatcatattcctgctcaacacctcaaataccccaaaaaaaaaatttttcaccccc

SEQ ID NO: 292 - DNA, 1021 bp, Heterodera glycines
aaacaaagtcggacattgagtatggcaaatatatacgacgccaactttatccaccagtttcacaataaaaaatgtgcaagtgagcaaataccaagcctatttcgaatagaatcatcataatgttaataagaaacattaaaacaaaggttaagaatttaataataaatgcataacattatttgttaaaacaattaatagtttgttataaacttttgaaaaacaatattattttcaaatttatttttaatttatttacatcttttaatgtaaattgaggaattcgatggtggcaaatattcgctggcagctattggcatgccgcttttgggctttttatcccatttttccgcttgttaatggttaataaaaattcagaaaagagagcaaaaatgtttaatggaaaaatggagaaaatgggggacgaaaataattgattaaaaattcaagtataaaaatttcattattttaatttttccacataacaaaattagcaaattttattttttcagtgaattttctttttcttccttatccataatggctttcaggtaaatagttcttaaaatattgatattggtttgcattataattataaaaaaataaagcaaacgccaagaaaccaaaatcggaaattagaaaaagacaatctaaaaacaataattgtaacatgctttaataaagtgggaaataaaataaaatttataataattaataaaataagttaaaaagcaaagaagaaaaaagttcggcaataccaatgagttcttgaggggttataatgggcttacaaatattattaaaaaaagtccagaaagaaaaaatgaattaaatgaatgaaattatgcccttcgggaagataaacaaaaaaggccaaaaacgaaagaaaatagcaaaaatgggaaaataaattatttaagaaaattaaaattgctaaaaaacaaacacatgaacatacgatataatttgaacttattgtaggtccttccggaagacaaagtacaaaaattgtcattgcataatt

SEQ ID NO: 293 - DNA, 657 bp, Heterodera glycines
aaaatgctcgaaaaccaaggttcccctgagttcatctagccctaacatttttgaaacttgatgatagtttctgaaattttgtaaacttgtagagcatacttagggctatcgaatgatatgaaaaaataaaaatttggttgcttttaagctaagttataaataattttacataaaatcataatgatggttttttaaataacggctccgacattttgctcctgcacaattaaatcgtctcactttgtctgttaattaattatattattaattggcaggtaagaaggatgaaaatcttagaattttacccgaaaatttcggaagtcgaattacgctcaaaatttttttattataatttttttctattgaaccaataaaaaagataaaaaagttagaaaaagttaaaaatccgctttttaaatttttttatgtcataaatttttggtcagagtacattcaatcgttaagtttcaaaaaagttatgacctgagaaactcaaaaaaccaagttttttttttgaaccttttcgtcataactttcttgaaacttaacgaaattttttgaaagtttgcttaataataaaaaacactaagagctatcgaatgatatcatgaattaaaaatctggttgcttttaggcgaagttatatgaaaatttggt

SEQ ID NO: 294 - DNA, 2573 bp, Heterodera glycines
aggtctccaatggttgtcgcatacaatacatatgtaaaacattttgaaaatcacacatatataaaattaaaaatgaaattactttgaacttttaaaaaacaaattttttattttgtttgaaatgccatttttgcccctaattttttgaattgtccgctgctgccgatttgtcgtcgactttttgctcctcctcattttctggcaccacctccgttgctggcactttcacaattgacttcatcgacggtttggatgccaccatttccgtgccgccgccgtccgtctcgtccaccgagttgaaacggtccaacattggcctggaaaaacagaggtgcccgaaattaccaaaaaaaaaaaaacaacaacagccatttgagtcctgagacactaaaagggcactgcagtcttggttgtaatcgcctcaagggatagcttaacccccctccccctcccgaaatgcaaaattttgaaaatttcaagaaagacgggcaaattaatattttgaaaatttgggttagcaaatttcaaaaaattttaaagaaagttacaaaaaattaactatttctggaagaaaaaaaaacggataaaaattcctgatttttttgcccggcgctgaaaatttttacaataaaaattacactggcgacagaaagagacccaaattgctgatcagtgagtgatcaatttggcccagcggaaatgccaacgatcacataatggcctaattaatcgtgccacgaaattaactatcatttgttatctacctgtctgtgacgcgggactgttccgccggcgctttggtccgtccgttacggtattggccaccgacgccgtttcggtgctgcgccggcggcgacattggcgcggtgccgacacgcaacgagctttcctggctgctgttcgcctccgggatgggcgtcggccagcgcttgtttacggcgccgccgccaccgttggcgtcggtcgccgcgctggcggcgcgtcgttgcgcggcgcgtttgcgcatgtgttggacaacggagtcgaacaggatcagaaaggcgggcaggaacaccagaccgtgcaggttgcacaacaccacgcacagaacctgagggcaaaaaaaaaaatttttttttttttttggcacgccgtagggctgtgcaagagtttggcgtttccgagtcgagaattttctcgtggtttggattctcggcctatatttttagttcattcaaaatcaaaattctcgagtcacgtaatctagcggaacgcgagacttttctcgagtcgagaccgagactctctgacagcactaatgtatgttttaaactaattttctcggctttattagggtgggtgggtgggcgccagtctaggtgctcgtgttaagttctagttcctggctcgtgattcgggacaacaaaattttgtaaaagtctaacccgtactaacccctcaatatttggtcctgtcaatcaaacctaccatagtcctcacaaatacagtagccatgtgcagatggacaagcagaagtgaggacacacacagcgaggtggaaagagcagcctataagcaaaacaatacaactaatttacacgattagtccatcaattaattaattaattacagtttcaaataattaattatgtaattagtccatcaattaattaattattttggctggagcaatttcaataaaaatttacctggagggcaggaaaagccaccgaggacaaacaattcacctggaataaatttggtaatttttagttttttaaaaaaataaatttttgtaatatgttgaaaaaaaattttccaaggcataggtggacggacgaatctccaatcaatttgcattttttaaattacactaaaaattcactaataaatttttaaaaatgtatattaattttttaaaattttcatgccgtgtcaggtcagcgccagagcactttcattttcccaaaaaaaatttttttttatactccaatcattattgttggaacagatcattcatttcgtacaaaaatttaaaaaaaaattttttttctaatttaaaaatatttataagaaaatttcaaggaaagaatttttttttaaattttttttagcgttacaaaattttatgacgaatatataagtttttcaaatatcgctttatatattttttttattgaaattttcttataaaaaattttcaattttttttttggaaaatttctacactgactgaccagtttcgcctgtggctgatcaacgccatgcgctgccgcctggtaataatggtaggacacgtgggccggaatgtccacactgaagccaattgagatggtcatggcagcctgaaaatgccaaccaattaaatttcgttaatgttagcgtaattgtagctaattaggcgtcaaaaccaggggtgcgatcgaaaaattttcaaaataagaacatcaaggccaaaaaataagatttttgggtccaaaataaggacattttgcaaaattgctttaaatcgcttgtataacactttattcaattaatatgcatagcatcaacttttgtatttttcgccggggcggagccgttatttaaaaaac

SEQ ID NO: 295 - DNA, 5328 bp, Heterodera glycines
tcggtattttgaattgaagcgaccagaacaccggggggtgatcagaatgtagaaatagagaacctggaggaatgaactgggattgatcataaaattgggaaaccaatgattgatcaggcaggaccttgggaatgaattgaatcgtgttgaggcggaaagtgataagtaggctcggggacgggataataatttgggggataagggggccatgaaacagtttgcactagattaaaatgaaatcagttcaataaattgattatgggtggaaaattgatggtgaaagtgataaaaatttaggcaaaatgatcaagcgatcaaacaccacttaccaatgtgccaatgactgattgcagtgtgtcggttggcatgttgtcgatcagatccaagaagattgagtcgtcatagtaaactgatgcattgaaattttccgatctgccaaaatgccattggcacgatgatcagtgtttccgatcacttttaagggccctcacttggcatatttgtccacaatggcacgccattggttcagcatgtggccacgttcggtccatattttgagctgatcaccatggtagccagtggtgaagaagaagcgctcaaggcgtcccctgaagcaaaaaatgagcacattgatcagtttttaaatgatctgatcagttttaaaatgatctgatcagtttttaaatgatccaggatcagactgagtatcgtataggaatgcttaaatgattgaataattttctttcaggtgacatggtcattataaaatcagcagacgatcagactaagtccaagcatttcagataacaaaattaaacaataattgaagtgatcggatcagagataagattctcagatatgctagaccaaaggatttggttagattaaatgatcagaaatcagaaggaatataaagaagcgtgattagcagattagcagggttgttgcaaaacgaaaataaaatgcaaaatacaaaaaaacgaaacgccctaaaaacacgaaaatacgaagcgcgaaacacaactttgttttactgaaaaattcaaaaagtttttgaatcattctcaaaatttaatcaatcaaaaaaatttaggatttttggccctcgggatagatgaaatttttgtaaataaatttttactttctcccagattggttgaaaagaaacgagaatcgattgatcaggattagatcccttgatcagtcgaatgccgttaagagtgagaatttccgagattactcgaatccaagacttgctttatacagaactctcgaaaagcattattagaaaagcttacgtgtcgttgtccagtcggatgtacgccttccactcctcggactcgggccaacgcagaaacgcgcgcaagtcctcctcgcggtacggtccgtttggcgtttgtgtggtcagtgccattgccgtctcgccgccaccgactgctgaggttgtgctttccacgccggcatcgagcgcagccagttcagactccagatcatctgaaaagatagatgatcaagtaaaattagcattgatcaatgatgtagagaccctcctgctgatggttgtaccccaaaattttgccgccaaattttttttaatttaaaagttagaaatttttcaagaaaacaatcttaaataaattttaaaaaaaaagtcaaaagaaaaattgaaaattcgaatattttgaaattttatgatgaattactaatttttccaaaatttttgcacaaaacatgaaaatttgttcaaaattttgtttgaaattttataaaaaaattcgacggtttttcttgttttctacgattttttcttcctgaaattttgttataaaaaaagttctaagatttttttttcttgaattttctttaaaaaattatcaaaggtttttttccttgaaaatttctaagttttaaattttttttaatttcgacgacgaaattttgtccaattccatcctgataaactgcattccccccccccccgtcacgaattaaaaatcgaaatttgaccctttcttggatccagcgcatttattttagtttattttttttttgttcgaccaattccaaaccctaaaatccggattcgatcaaacattccgaatttcgcatttatgttctaaaaaattgattaaatcaagtataaataaattaagcaaaatattgcaaactattactaataaagcatcaaaaatagattggaacaaaattccgaaattcgtagaatttcggaatttttgttcgaattagggttcggcattcgaaatggccaaaatgaatgccaaattgggcccactaaattataagcatcggattttttactgaaaaggtcaattttttttaatttcggaaaaataaacctaattaaattttaaaaatattaatatttatttttaagcccatagagtgagtagtgccatctgaacttagactttttcttccaaaattcacaaaaatttcaaaattttcaagacaatagctctctataggttggaaaattcatagaaattttcaaagttggagactgaattggtggcgctgagatggcatccaccgcttggcctgacaaatggccaaaaaaatttctcccattttttcaattttcaccaccttcgtcccgcaattcataggcgataaagtcgcgcacaaaatatttggtcccaattgggccccacgagccattgatcgcttccatttcggccacaaatttgttcattttggccaaccgttcggggtcactgaggttgcccgggttgaacaccaaaacggtggaactcttcacgggggaagggggaacaattaataaaaataattactgtgaaaagcacaaattgctgcattagcaattgaccagcaatcatattaattagcaaataattcatcaagcaaaaatttcaattaattagcataaatcacttcgtgtttaatcattatcagaatgttaaatacctatttgatttaactaaatagggcatttataatttaattgaactaattgcataattagcacttaaacaataatataattaattagcaagcaagtaaactctctcataacattcaataattttaatttaattatcattaaatcgctgcatgttgaattaaaacaacactataaaatgttaaatatttttaatttactaaattggggcatttgtctaaatgaattaccatgaaatgcggcacttggtaaccaacacgcaattcgtcaacctgaaaatgccaaaaatttggtaaattttaacatttgttcgggcctgatcaccttaagaagtggcgaatcgctggtgaacagttgttggatggacagtttgacctccatttgagtgactccctgaatttatatggaaattctaacaaaatttttgatttttcgaaaatttttcaaaaattttacattttttcagcgttgaaatattcaaaattgagaatttcctatttaatcggttatatgtctttactcatgggctcagttctcgtgaattaaccagcaattttattttttggctatgacaataaagcacaaaatgtttaattgcatttctttaaaatttcctctaaaaattgaattttaaattcttttaatataattaatttgatttttaaaaagttagaaatttttggatttttgggattttctttatttatttattttcttattttttaagaagtaaacttttgaaaaattaaattcttttttagattttaaaaatctgctcccgcgtagctaatctcacagttaagttcatttagttaattaattacccaaccaaaattaattaattactcaattaattgccgcccccacttacccaaatggacatgcccaaatagacaaagtaaagtacaacgatcagcattgcaactaatgaatgaataaataaacaatttacagtaatgcggttactgtaaaaaaagtaccgaatttgttggccacaatgctcacatatgtttggattgattcactgatgtaatgcttagtgtgctcgtggaatttgctgtgctggcgctggaaaaacgacaaaattcaaaaattaactaatgaaaatttttaagcgtttttttttttgaaaaaaatttgtataattttctataaatttgaaaatataccaaattttcaaggggtcaaatcggaaatgaacaaaaaaaaactaactctcaaacaaaaaccttaaacttttcactttctccatggacccaaaatcaaaaaatttcattttaatttttttcactggaataataataataataaataaaaaaaattgttttagaaaaaattttcacgccattttttctatatatttttcaaaaagctggattttcttaaaaaagtttaagggtatatagaattaaagcattgaaatctaatgaaatgttttttttcttagatccgccacttttaagaaaattttaattatttttgggttttcgcaactaaaattccaacctctgttgacaaaaagaaattttaaatgccaagactctttgatcaaagataagcaattttgatcaattgaatagtgcccaaaaacatggtacggtaaacatggtacagtacattcggccctgtaccgtaccgtcagtccatgcttcacgctcgatttgcccagttccatgccggcaccgcccgtttcgacggcacgccgaatgctctcctgcagctcgcgccgttcccgtcgctccgtggcaatttcgtagcggccaaccagcgacattaaaccggcataaaaggtcatctgggagcagttcaatgaaaaattttaaaatttttttgcatttgaattaaattatcaaaaaaaaaatttttcaaaaaaattaaatatttttttttgtaatttttctaccgtttcatttttgattaccgtacctggtagatgaacgcgacgaacatggacaccatgttgcccaggcaaagtgcgccaagctccggcgacgacgtgtaccaaccgcagccgtccgcgaaaatgttggtcagcgtggagatgagcacggctggcccaatttcggacaacacctgttgaaaggggaagaaagtctttgttttttgaagcggctttagagagacgggagacaattttcactaattagtgcactaattaatgaggaattgcagctaattagtggtagagaccggatgggatcaggatccgctggattttttcgggatcccgacctcgggacccgtccggattgtttttccaaaatcttcggaatgaaaaaatataatttccaaataataggacatcctattaattaatatgctcatttgtttggtgacattcgcttagaaggtgcactaatttataaatatttgagtgaaacaaaatg

SEQ ID NO: 296 - DNA, 2308 bp, Heterodera glycines
  unsure (1)..(2308): unsure at all n locations
ctgcgagatacggtagtccacttgattgttgtacggctcggctgccggcgacagtgttggatcactgcttgccattcgtggatcatcaaataggacgagtccaccccgatggacnaacaccaggnatggggatcaggcacaggatggaggcgaaacggaagccgaacatgaacatgaagccgagcgccgtggcactaattttgtacaatgaaaatttggcacaaaattttacatggaaaattttttttgtgtttttgaaaaagaagaaattttttttgttaatttgatctatttattttaaattttccagaattatgggcttttgaggctttccaaatttttttttactgatcactgatcagatgtggataaaaaattgaattcctcaaaaaaactttagcgccgttatcccaaggcaattgattttcacctggacatgaacggcagcacacaggcggcaatcgccagaaagatctgtagaatacagtgtgtttatataagtgaacaattacagtttgtggcttttgctaacctctaactgtggctaatcaattgatcagcccaattatgttagctgactaattgaaaaatatctgatcagctaaagcgatcaattctcaagtgagatcagatttagtttagccaaattgaaattaccaaattatctgatcagctacagcgatcagtctgaattgagctacggtttggctagccagctgatcaatctttgaccatatatctctgaccacttaaatatgttgtcgagcgccaagtgatcagtctctgatcaactagaacacgtaggtccaaacatgatcaaatttcgttgtatcgctaagaatcatttctgtaaatctgcggctaatcaacagatcaattctcaaatgaacttaattttggctattgtctgctagcccaactgatcagacgatgaataatcaatcaaaacctacgccatcacctttggcgcactgtgctggtgcatgtacagggcacgcatgtacacacagaacaccgagcagatcaccatcaccgcaaagccaatggacatgtacgggatgatggagaggccggcgcggatctgacgaataagtacagcttgatcaacttgactacaaacactgaccatttcatcctcaatgaccgacttggacagcacgtacatggcaatacgatccgatttgtattccctggaaatgcaaaaaaaattgcttgttgattggtcaataatggcatggcacggttcgattaggttcggcaccgtgcggatttacaatttataaaattttgacccccctcaccccccccccccctcccgcctcttttacagccgcccctcttcgacgacgaacgaggggggggggggggacgtgcgccggcgtaccccttgctcatgtatttgtctgatcacttttctgatcaatcggtgccaaattttgatcggcttcttcgtcctctgatcattttctgatcaatcactgcccaattttttttcttcccaccgttggaatgtgttgcgcatggccaactcgtactgcttgaccatggccaccgtccagttctgctggtgttccgcctcgaaccggagcatgatcattttcacctcgcgcatgttggtcacgtgctgttgccaattttgttggtcgtcccccgctacgagtgccaaatttgtcgcgccggacgtcaaattgccgccgtcctcggcacgtccattagctgccccttcgtccagcatcacttcgtcaaggatgccaccgccaccgcttccggtggtgccgttttcggcgtcgctggactgtgccgcgttgagcaaagcggcggtcaaattgaactggcgctgatcggacgggccgatgccggcggtggttgactcgttgaaaaatttgatgccaaaaaaggtttgctggaagtcattgggatatgagcggtttttcaaaaaatttctcagcagaacttccgcccttcgaaaattctttaaaaatttttaaaatatatttttttaaataaacagtaaaatatttttataaagaagactaataaaaaaaaattagcaatttttttttgttaaaatttatgaaaaacttagtaatttatcataaaattttcaaagagcctagaaaatttcaaaaattttaatgtttataaccccttcggcatagtcggacccttcaatttgcaaaacctaaacacaaattcttcggctcttaactctggttaatcagtgtacaggatctaatcagatagatactgattagttcagatataaaatgattctttcaacataaagcaattttatgggtgataagct

SEQ ID NO: 297 - DNA, 3180 bp, Heterodera glycines
cccaatctgatcagtgatcacctttagtgtttcgttcatatatccttcgcgcagcattgatccgtcatcttttgcgatcaaaaaaatgtacacactgatgccgggcccatcgcgtgagaaaaaatcctttaattatgcaattaaaatttgtttgattgatattgtaaataaaggctttaatggcattaattaagtatgtactcaattcaattatttaatttatgcattaattaattaatcaatcaatcaatcacaacaaacatttaagttatttttataaaaagcctaaaaaggacaatgaaaaataatttaaaattcattttttctcaaattttccaaaaaattgcaaaacatgggctaaaaaaccaaaaatgccgaaaaacaaatacattcccaactaattagtcaattatggtgtctgattggccattaattgtttgctcaagcgtttgacggcacaaaattaaacattttccatttaattagataaattcgtcaacactaatttggccactaattactttgtcccaagccttttctggtgtcacaaatttgaagcatggtaatttgttcttgttgtactgtatgtacagtatacctgaaagcgactgtattcaatgcgtgcccgtgcgtttggcggtgcgtatccctggatgtcattttgttgtctgggaaaaaaggcaatatttgattaattagcattttaataaatttgccattctttttcgacccgagatttttttttgttttccccgaatccggttttcccagacattttgccgtgaaaaaatttcgccaaatttttgaaacgttttggaagaggtaccaataagaaaaaccgaaaatttcagcgcaaaaaaagttttctgttaattaaatgtgccatacggagtgagcatgacaacgataaagccgatcagactggtgattaagcacagcagcattgcctaaatgataaaaaaaaatatatatgcaaattggcaaaatgccaaggcctcttaatcagttttggcattgtgccaaataaacatatgaataggcataataccaaacgcataacactttcaggtttaggcgatgtgccaaggcctattgatcagtagggctgggaattttatgtaacaaaaatcgcaaaatatgtaaataaaatatgtataaaaaatgcggaaaatatgatgaaatatgtacaaaaacctccaaatatgtaataaaatatgtaaatacaattttttaaattgtgattttttggaaaaaaattcttcataaaaagtgaaatagacacaaaatgccataaaaatgactaagataggcttagaatcacattttagtatacttaaaaataatttttggtttctgttttttgaataaaaagaaaatgatttttaaaggtatatttttcaaaaaaaaatttctaaatttcattaaaatataaattgcccatgccaaggcctacaatttatacattttgacaaaatgccacaatcccctaccttccagtcgtgtttggccacaaaacggccccatcgccggaacattcggatgataaacagcacaaagcgtggccccacattgccggtttgttccatttgcaagtccattgaacgctgaaaatggtagtcaaaattcttaatcacccttcaatttaaagtaattatcactgtagtcgagaatctcgaactacaaagaaaaaaaaattgtcgcgctacacaaactaacagtaattaagtgatcaaagttttgtttaattgtagcctttttggctaaagagtttgtaatttcttttgaacagttcatcattcaattgaacaaaaagtttgtaataagttgatcagacaattaatcattcaattattattaaaaatacattcgagaactctggccttttctgatcattaaagatgttcgatttttaccaaaccattagaggcccgagaatcttggcatagatcaaaattgattgattgctttgattgattgagtaattaagccgacaattggaccaaatccatgaccaaggcaaccccgattttaactttgggccgagactctcgactttgccatctcattaccagccgatgatctcggtgactaatcccctatactaatttggtgctgtacgtacgtacgtttttaaagcgacttttttaagtgccgccaactgacctggccaactaaaatggatgagcgtcgccgttccggaaagccgccgccgagcatggagccttgtcgggcaagcgttgaccggcgttggcgcattgtcactgctgtgccgttttcggagggtgacgcgggtcgaacccgatcggttgtcgacatttttaccggttttatgccgtacaaattttaaaacaaaatgccaaaaatgttgttgatcaacaatcttaagcatggaaaattttgatgaatgcaattttaatatgtaaaagttttcaaaaattcagtggtgttcgagacagttggctttgcatagacaaatttctcgaatttttcggggtttaagcctttttgccttggtatactgtactttccgggattctcgaatttcagactttgtttctctctatggcaaaaagtggtagagacatggaaccttttgcattctgtagcaaaattttgtgctgttctttccatccataacattcgtttccgcgaaaattttttcagtcccctaggaaattttttctggtacacctacccatgtaaaaaatattgtaggatgcttatgcattcattactagcacgtgatttgggcgcagttcataaaattctgatcactcccgatcaccttgatggagtgatctgatgcaccaatatgttttgagcggaaattgggcggaatttttaaaaaaattcaaaatttgagaggagggggggggggaattaattcaccgaaagaatgcgcaacaaaataatatggttggcgtggcgcctttccgtttcaaatcaatgtgaaattttggggacgagaaaagtgcggaatgtgggggggggggtagctatagctattaacgactgtcacatgatcagatgggacaatttgatcagccagccgatcgggggagggcggaacactctttcggatcagttgttgacaataaaatgacatttttccgatcagcagcagagcgggagggggaggttttgtctcaaattgtaaacaaccctataaatcatcctcat

SEQ ID NO: 298 - DNA, 2466 bp, Heterodera glycines
gagttcgatcagtgatcaatattatagcccagggatgcttcaggaggcccgcccaaaaatttttcaggttttattttatattatttcacagtatgatgaaaaaattgagatgatatttacattcagtctaatactttaaattttaaataaataaattgtttgactgataggaatgtgaatttaatgatctctaaaatgtctcgaaaatataaaaatgaattgtttttactatttcttaaatgcttttttttcttatcaacaacaattaaacttttgtttttaatctgtgttaaataactgatcaagcttagtaatcggttttctcgaattttaaaactttcttgattgattggccattaaagtcgtttttgatcggtaattaggctgatggaccaaagttatatgatgacaaccaatcaaaacatttttattaactaaacagtcttaaagaaataaaagtgttttggagaatgattgaaatttctgatcagtgaagtgatcaattaaagaattgttttgaactgaaaccgcttggcgttcattgtttgaaatttaaaaatttatactgtttaaactgatcagaccttaagtaagctttgcttccaaatcttaaaaaattttgaacttataagtgatcagataaagagacaacttaatgtaaaaaattttaaaatttctcataatttgtgaaaaaaaatcaggcttttattcataattaacattaaagttaaaagacattaaaaaaattttcatcaatatataaggtaaaattttataagaatttttcatcaactgatcagacttcttgatcaaattaacgctcaaaaaagcgcgtgtaaaattttgattcttgatcacaattaggcaaacaaaattcaaaaattaggaaaattgaattgatcaggcttttcaatcaaataaataaatcactttgtgtgtgtgtgtgtgtgatcaatggtcagaaaaagggagtgagtgaagaagctgattttgcgcttttgcaaaacggaatcaaccaggagcagatgagtgttgggggtggaaatgatgagatgtttctgtgcgtgtgggtgggatggacttttcggaggtgaaggacacctaaaggcgggggacgaaggatgcccccggggcacactaattgatttgttccgctaattgatcatcaatttgccctccaggcgcaacctaatgtttcaacaaaacgccggcgccgccaccctcccaaaagtgtgcccaccgacggcggcgcggcgccgtgcgattgaacaacgggcgagcgccttccataaaaaaaatggtggaacatttttgaattaaaaaagttcgattgtttttggcgttatgtccctcgcaaaatttaaaataaacaattctggcaatccataagatgccgaagggtttataaaaaaaaatttgtcgttcggcacgttaaaatcgtacattttccaagcatacaaaattgtcataacctttttttttgatttcaataatcaaaacaaaaattattgagcatcatttggtagcgctaagtttttccaatagcctgaaaaatcttaaaaaattctaggttttgaaaaaaaaagttagacagaaaaacaattgttgaacagctttttttataagtgcaaaaatatcttgaaaataacgaatagagaaaataatattattttaattgacaattgtaaatcaatcaagatcaatttagttcatcatgactgttaagttgggtttagggttgtccaaaaaaaatttcgaaaaatccaccccctcctctgaccctacaaataaatgacacaagaaaaacgtgactggaacgggcagttcgggactgaattggctcccataggaaagtgatcggaactaaactctttgtcatctcgagatcattcctcctccatttccggtctcgagggcgcacagtgaaattttcttttcaaatcgcattttaaatttggcggcggcggcggacgctggcgcaaagttcagttccaaagttccgcgacagtttttaagttcgcgcgcggggatttggccctcaaaaaaaacgccacaaatggtgggggcacattaattaatttgggacttttcacaaatggttttgcggttgtgtcccatgcgcgcgcgcgagcgacccccgccaaacaaagacaaaacgcacacaaaatggtggggggggggcggcgggagggggtaggacaccggcttccctataggctgtactttaattctgcgtaggatttttgctccccataaatgtttgagtaccccaaacggacacttgaaaaaatcgatttttttgtttcataaatatttttttcagaaagtcatgcacacccgtccgatctggcaagttaagcaacgattgctgactagccaaaaggttcggtgccgtgatgaaacgaaccagcactgcttaccccgcggcacccggcacggtcccccgaaggaatggatttaattaaa

SEQ ID NO: 299 - DNA, 281 bp, Heterodera glycines
agatggctcaaaaaaattttcgaaaatctgagtcgttcgtttttatttgttttttgcataattaattcataaatatttttttcagaaaatgctctgaaacgcaccaaattttatttacatgctagtgggcgagaaagtgacaacgacccccgtacccctacccccgcccttaggggagggggcgggtgagagaaagtgacaaggacacccgcttgaccacggcctcctgctgcgggactcaaaagacagttccatgccgccacttccgtcccagtcaatat

SEQ ID NO: 300 - DNA, 1866 bp, Heterodera glycines
aggtccggtgcccaatattgtccagtggccaatgttcctttgcccagtcgtccagtgaaaaattttccggtgcccaattgtctagggtttccaaagttttggtgctcaattgtccagttgccaattgtccagtgtccaattttggtgctcattttgtcccactatacccgtgttgaatttgttgggtcggggccacgtctgctgccaaccgaccggcggtcgccctcctattcctgccagccgtctctccgtcgatgaggaaggcaggggccgagttgaaggggacaaaacaggttgtgccccctggcgcccctcagggaaggccacagaaatgatgcatcggtgagggggggggggaaagttgtggtgattggcggtggtggcccgatcagttttattattgaagacactttccccccattccccggcggggacggaccggggaaaatggggacagacaaaatcaaaaatcgacgaccttcacaaatgggctcataagacagttagaaaagttggaaacaaagaatagaattgagcgcggcgcagaaaacacacagtgttgttgaacattgagtgaattaaatatgcccccaggggcaagaaattttaaaaaagcagaaatcaaagctttaggcctggaattttgaaaaatccaagaggtgaacagcagatggggttcgaaaatttcgaaaattcatgcctttggaattgttgaaaatgttctattcgaagtgattgtaatggaaaaatttttttaatatttttaataaaattttcgattattttaaaagatttatctttaaataaattcaaattatagattctttgatttttttaaatttaaatattatttgttatttaaaaaaatttatttaaatttaaaatttttaatatattttataaataaaataaatattttaatatttatatttaaataaattcgaaattgtatattcaagtttaaattatcgagagatcttttttaaactttttttatttaattattgtttttcttattttaaaaacttattccatgtctaaaattttttggcaatttttaaaaatgtgacaaatattttaatttttaataaattcttttttatttatctacctaattaattttggttgttttctcatttttttacaaattttaagtattgaaagtgagtgttttgtttacaactattttttttcaattgtttggttgaatgaatcattattaagaaattttaaattgaatcacacaacaaaataaataaataaaattaattgccatcattaaaaaaatgataaagtaattaaaagtggcgggaaaccctcgcgtcacgccaaacatttcgccaaagagttgtaacacgaggcggcgctcccacgacaaataaaggcattggcgcattgtttggcgaagtgtagttgtttaaattttaaattagtaattaatggtaaaaaacgcagcgccaaaattcgggtgtcaaaaattgccgaaggcatagggaggcccaaaagagtaattgggtaaaaacccaaatttgctgcagggtgcagaaattttttgccaaattgttcttttattggagccaaatttaaatcgtgaaaaacatcaaaacaatattcaaaaaacgcgataattcgccactttttcttaacttaatgtggcaaattaaaacaacaaaaaaaagttacatttggcgaattagtgtcacagaaaaaatttcattgcccaaacacgacgccaattgtacgggaaataaatgctgtcgaaacgccaaaaaatggtttaaaatattgcctaaggcaaaaaaaaaaaacgaaaacgtatggaaaaagcttttttttaatttaacgtgacaaaagaaaatattataa

SEQ ID NO: 301 - DNA, 1293 bp, Heterodera glycines
agaccgagaccaaaaaacccgagacttttctcgagtcgagaccgagagtctcaaacagcactaatgaacttaacggcgtgtttctgaattgagacttacgaatcacctgcgaccacccgtactgagtgctgcagaatactatactagcacccccccccctcgcttgaaaatgcacggctaacataacatctgaattcgatgcagctgggctacgattaccttcattctgtacgaagcttaacgaggagcagtttctattgtcagagctgcctcaatttctacgtgcatattgattttttgaaacgatggttgaagaagctccgtgacatttcgccaactcagccaaaaacattcatttcgcggtttacctcagttggaccgtcacgtttgggtcggcacggttgggtcccagcctattttccactataactttctacaatttttttctttttcatccaaatccaacattattggtatcattcgaaagcttttaatgtatttagaaactttttctaagctattgcttcgcgattagacaaataccaaaaaagttatacgttaaaattgcgaaaaactcgaaatttgtaagtttcttcttaataaaattttttccaggctttaaaatctatccgctttttgtaaagctaatagagtatgtgaagagctttcgaatgataccaacaatgttgaatttggatgccaaagaaaaaagctatcatggaaaagcatcctggggcccaaccgtgccggcccaaccgtgccggcccaaccgtgacggcccaactgagcgagtccgggcgaaggcatgtatgtatgagagaattggcacaagtttgctttatgacgaaaaatactccattaaaaaatcatttatatgggaattcattttttttttatttaaaaatttataaaaatttaaatatctggaaacagtgccaaattttggcattatgagtagttacatgttttgaaaaaatcgaagaaagatgctgctttgaaaacgggagaagaatttgcttaattgatgaaaaaaacgaaaaaacattaaaaaaacgattctgcctcaattagaaactatttaaaatttaattaaattagacagtcttaattaaattaaattttaaacgggcagaaaattggcattccgttccctatttaatttaaaatttgcaacaaaaattgccaaccggcagtagcaaagcgcgatcagtccgaccacaacagtagtggagaggagaaagatcagcacgaacggttgttgaatggtggcgatcagactgtccaacattttgt

SEQ ID NO: 302 - DNA, 1809 bp, Heterodera glycines
cgatttgtcccatacaaaagggcacacggcgcctatcaattcactttgttggcatcccttcgtcaaaagcgaatttttgagttgttcggacgacgggtcagtgaattatcgcgacaaattctttgtttttccgcttaattggtgccatttttcagttccttacgaatttgggacacaaacgattttaaagtgatcacaaaatgcataaacactcagcggaaattgataaagacgaaaaatgcgacggggaaacgggcgattccgacgacgtgttgctactcgtgggacgggaaaatgatagcggcgggttgtgacgacggatccatccaaatttggaacaatgcgaagatatttgtgcgtttttcctatgaatttgtccattaattattgccaacccaaaaaagggattcttttgtctgttcggtcggccctttgtccaccgtttgttcccttttcaggtaaacaccgccttcctgaaccgttcggcccattccgggcccgtcactcggttggaattttccccggatggtcaacgcatcgtttcccgctcccgtaactaacacattcctgtccctcattttcatatttttggtgctttagttgacgacacgctcaaactgtggagtttgaaggacttcaaaaagccgtttcgcatggccaacggattggacaccgttttccctcagtaaatttttccatttctcttttcccccgcgttttgcctttccaaggaccgactgcggttacagtccccacgccgagtttatttatacgacgacaaatgcgaaggacaaaggcggcggagagagaggcgctttgctctttttcgacgcggaatcattggaattactctataaaattgagtacccaaaacaggtccaatttggtgccttgcatttgccattgattggctcatttgttcgttttcgacgagtgtttttccagggatgcatccgtgccttttggcacccgaaaataaaccaaattttggtcggtctgagcgatgggacgagcaaaatttactacgacccgtccatcagtctgcgcggggccctccaatgcgtcagcaaaccgatgaaacggtcgcgcgagtcggagatggtccgcgaggaattggtcctctcccgtacggactcgcaaaataaatttggaagatttcgattgctttttctcttaagcattgactctcgaaatgttccaaccgcgcggcgaagacggcgaggaaaaggaagtgacggagtggcgcattcggaaattcttgcggatgcaaagcaaacagaagcggccccaatttcggcaacccgccgcaatgccaatgtccgggccaagtgcgtccttttccctcaacgaccaatggcttttgctgttgcaattgttggtttgaaggtgctggtggacgcattcggcaaaccggggggacgctgcactcgtacatagccaaggaaatggggatgagccggaacaaggagttcatgcagcacgaggacatccgctcttcgatcctccggcacgctgacgaggcaattttgggagggaaaatcgaagcgaaaagtccatcaaaaacaggcagagaaaaacccgcaattcgtggccatggcgtacaaacggacgcagccaaaccccgtgttccaagaaactgccgaggagaacgaagagggcgaggaggagcccgtgtacaaagtgccgaaattaggatgagagggcattgaatgttggcactttttgcaattgctcccccccccccccgccgttcgtcctcttccaatgcttccactttttcatctgattctgccgctccctttgcctttt

SEQ ID NO: 303 - DNA, 1760 bp, Heterodera glycines
tcacgtccttttttctttgttcgttgtcttggttacggcttttcataaaataaatggaatgaatgcctccaaaagtgaatgtgcacatttttatgatgtaaccaaaaggaacgcacggcacaaacgaagagagtacaaattattaaagattgcaattaaattaaattatggggacgaagtgggaatttgaccgaatttgaatgggaattgggcgggggaattgaaattcgattgttcacacgaaaagcggactgacggaatttgccaccgaccgtttaaaaagggtttccttcgttcactctttgtgccgagggtggcgccgacaaaggaaagaaagaaaccttccgctgcttaatgtgtgtttagcatttcgaattcatttgggcaaagcgtccgtcgccctttgattggccaattgtccgacgcttttctcctcggcccactcaacgcattcatcctttaataaatccatccatctttctctccgtctcttttcatccgccgcgttacttttgccgattattccctgtggaattaattttcggattaccccccccccctcccctcgattatttcccccccccctcaattcgttttaattgtctttttcttcgcatttcgcccatttcatcgaacggcattttcagtgaatgctcatttatgaaatggacaatctgctcacacttcgcccgttcctcttcgttttctttgtaatttgttcttcgcccgcctttttgtcggcttgcgacgaatccaacggaacgccaatcgaaagggtaacgaattgaaaattcaaatgaacacagtgccataaattataaatcatctcgccaaataaccgctgaacccattcagcccgtctcagcgccatactccgaccagcagcaaatcgtattggacaacccaaaggcaaattcaagaaaagtgcgggaagcggggggcactgacactgcggggaatgcaacggcagacgcggggagtgtcggcaatgggacggcggacgaagcgatgagcacgacaatcgactggtaagggaagcggggggggggggagcagtgccatggcataaatgtgcggttgcctttgaggtggagcagtttggccactcagtcgcctctcatcgtccaaagggactccgccaatgcttccgtttcaaattcctccgcttctgtgccaatcgcttccgccgcctcttctccgaatgcgacttctccaaattcgccggacaattcaactgccaccgccaaaaacagtgccattcagcgccctttccttctgttcactgttctgatcgcttttggggcaatggcggcgacgattttatgagtggcggaacgaactcaacgaaatccgaacggaggacgacataaaagcagagttgtcgtcaaatgcttatttgttgatctatttttagcttttgacaatccgtttatttgcttcatttgtgatttccttccgccgatggcaaattaagtctttttccaatgtttttagtctaccttttttctcattgagcatttatttttaactgaaaatgataaacattttttctgtgatttgactccgatcagtcaatttcttcgccatcccttcaaaaaggacccccccccccctcccaatctccgagaatgatttgacaaattgggtcattcgccttcactcaccgctgacgaaacaatggaaaagttttggtacttttctgttttgaaggcacaccgcatttaaaaaaattcaacaaaaagcattcaatattaatagct

SEQ ID NO: 304 - DNA, 2496 bp, Heterodera glycines
ccgagcagctttcctaaaactcagcaaaaagtccaagaataggtgtattaattcaaatgaattaccatcattgtggaattctgccgaagaatcgcgtatttgaaaaatgaattattgtcgaatgagaagttctacagaagaatcgcgtttttttaatggctcaggaaagtaccaaagttttgggtcaaaaattccctgggggcatttatcaaaacaaaagcccacccgccgtcttccttctgctaatgactacccaattagcatttcccccttccctttgtgttttcggttgcttttgttaatgattgattaatttgttgggcctttgcgccgttcgttccgttgcctttgcccttttttgtcctttgaaattgccttttttacgtgtgcttcgttcgtccccagctgtctgttgttttttccttccaatcgatcccttcgcttttcccccatttttcctttggccatccgttcgctcatttttctccttttccgtccgcttaattcacttggccattcatttgtcgtccttccttcgcattatgccgcccgtctcaattgatttcggagagggaaacggcgaaatttgcgccttccaacagcgatttgaggcattaattggacaacttccggcggaatgtgagccaatcgcagcagcacaaaaaatggaaaagcttcgatttgtgcacgcggttatggtaatggcaaattcggacggagaaaggggggagagaataaaggtgaaaaaccaaagaaaaaagaaagtaaaacactcccaacagaaaaggtacaaggcaccgctgctgaacgaatggacggaaaataatgaaagggcaaagggacagcgaaacgcagcacaaacggaggagccgagttggggggacccaattggggaggcggtgaaagtgctgagggagacgaccaaaatgttggagcaaatgctggacgattggaggggcgaggaacggcggggagggcacgcgactttgtggcacagaaaaaaggacggagcgatggcaccgccgtcgcctaacggaacagtcgaaggacgcacagaggcagcagaagcggtggacactgatcaaacagcatggaaaccaacgacagaaaacacgcgtcaccagcagccgcattcactgctgtcctccaaaatcagttttccaagcgaattgcgcaggtaccgaatgacggaggaacggcacgaggaacgaatctgagaaacgaaagaacaatgacgaaaatggcacaaaatcaaacaatcaaacacaagcgtgagacgaaacgccacgaattgtaaaaaaggaatgcataaaagagtaatgcttactgaaatatcaatgtgaaatcgtttgccaaatccaacagatttctttcttttgccattttttattttattatgacagtgggaaatgaattgtcttcaatcgacacttgggatttccgagttagatatgtacaacacttatattcgtgaatcttccgtcagttttccgcccattttgccgtcttttcacttagtacggatgttttgcgcagaatattatttccgggatttgtccgtcctccacagaagttccgttgttgttcccgggcgcgtattggaagtgccaatttatgtccggccgtccgttccgttccaatttgatctttcgcagccctttggtgccgtagtgggactcattcccctgaaaataggatgacacttttaagagagcaatggttggtcgaagggttacagtgagtttggcggaggcgacgtaagtggtgttcgaagagatttcgacgggttcgtcaaagagaacgcgaaaagttgtgggcgaaccatcggagaggaaaaaacactcattggaggctagggatttgcccgaattgaaattcaaaatctgacaaaggcaaaggatggtcaattacagacgaatggggggaggaggggcgacgacctcaatgaggacggtgtattggcacgactccctgttggagccgtagagaccaaagccgaggataaacaccggagtgtcgaccataaacctgaaaaatgttaatcgaaatgcaaaaactgcaaatacaaacaaaaaaagcacttcactcggtcgggcgtgccggtgtatccccaggaggattcaatgcgttggaagcgtttcaccaccaactcgggagtgtacaacccgcgataagtggacgggaaaggcatgggctgtttagggcccaaatggtagtagaggaacacgctgaccatctcggcgtcggtgagcaatttggtcggggctgacaatgagacacaacgccaaatgaaaagcaaaacagacggacgaaccgacgaaagtggcaaagtcggacggactgatcagcggaaaacgaattttggagagggcggagccgaggacgaggcgcaaattgtcgggagtcggctgtaattccttcgcccggcacttttcaaatgcccaacgaagagactgaagaaaacgaaaaacgaattggaaaatcaaaacaaaacaa

SEQ ID NO: 305 - DNA, 1380 bp, Heterodera glycines
aatgtcgtcggtgtataaaaagtgagcaatgcctcgaacgcctcgcgctcgacgtcgacgaggtccaattcctaaacgaacattgcgaatggcatgacaaaggttgaggagtcccacgcgaatgccattggcacagtcggaagagtcgccgaaacggaacatcgcctcgaacaccgccgagccaaccgaaagcacaaatttgtgggcggggattctctgagaagggacagccaatcattgccagtgggggagggacaacaaaacctggacggacccatccgaaccacggaaaatgaagaaaatgtcggccaaagtgtcgttcatcagcatgaaagtgagcctttcccgggccgacggaagcgtcgcctgccaaccgagcgccccaatgcccccacggccattcaaatgggcaacattctcaactttgttcactgaaacattacaaaaagtttaaaaaataatctaggcatcgcttactgcgccttttgcagattttattggtcagtcgaacgttggactctttcggcgggcattcgtccgtcttttcctcgtgctgttccggtgtacactttgtttgctccaaaagttgggcatttttagggttggaagtttcctcctcgtctctccgattggcacatcggccactcgtcgaagggaccaccaaattcgatgacaaattacgctccaaattagcaacattctgttctacagagctttgcgaatcggctgccaatgagagggatttaaacatcaaaggcaatcggcggctcacttttggtcaatttgtaaaaattgctggtggaatttgtcatttcccgttctgtgccgtcgtttgttttgtcctcgacttcggaacactttttatcacgtaattgcttttgagaggccatttagaattcgtcaaaagtgcgctttccttctcaaaaagaaccgcaaaatcagacccaaaattattagctgatagacaaatacgcattttatggcattctgttattttaatttaaaggaaaagaatggacaaaattgaatttaacaaaattatctctccaaattaacacattttccaacaatcacagtacaattaatgaaaatgaaaaaatattgcacttttaaatgggaaggaatgttaaaagataaaaataatgaatagaaattaaaaaaactaaaaataagtcttcacaagccaataaaatcattcagagaaagaattgggcaatgagatttaaaaggccacaaaaaataaggaaagaatgaagcgcaatttgccgatgagtgagtcggccttgcatttggagacgtttcaggtgcacagcgcaagggagcagaaacatccaaacgaggccagaaatggagccgatgtaactgaacggtgggggtaaa

SEQ ID NO: 306 - DNA, 1531 bp, Heterodera glycines
gggaggcgaacgaaaaagccaaacccagaacaattcgggcggaaaatgcgggggaagtcgggagaagcgacggtttgaaccatgggagaagcctgtggggggtgatcaatgaaaagcagcaatcatgggggtgaatgatcggtacaaaaaatggagctaaaatggttgaacaaaatttatacaattttgaatttttttaaacattgtgacaaacacaaaactagctgtactttttgttatgagttcgatacccgttgacgttttcttttaaatttatttttttttgaacctataaattggctaattcgaatgaagacctgtttaaaaatggtcaaaatttccaaattttccccctacggcgcctatcggcaccgccgaccccccccccctccccccattttgctgcctacattttttttttttgaaaaaagcgtgccctaaaaaagtgctttgaaaacaatccaagctaaaatagaagatgacaatttttttaaaaattttattatcaaaatttcacaaattttgaaaaagtcccggtcccggccatttcaaaattccgggctctaattttcacatctctaacacaaaaaacatcaaattcgtaaatgctaacaattttggttataaggatacaaaatcactttggacatttagaattaatagagaaattaatagttttagcatttttggtgaaaacagcagtttaggacttgagttataacgtgataaaaatttgaaagtatcacaactttcttctgagatgtcaaattgcttagcaaaaaatttttttagataccaaatttgttcagtttagttgggaatgaaacgagttatggcagatcaaaataaactccattttctgttgaatgagtcgataccgaagaatgaggaactgctgtccattcaggtggagaaaattcatggggaaatggttttgaatttaaagaaaagggatcataaatccatgtttttctgaaggagaggcagcgaattgaactcgaggctcagtcggccaccctcgaggagcagcggacgcacatcgaagtgctcgagaaagccctttccaacgcgcaggagcgactggcggccaaagaacggtcggcggtggacgccgttgcggtggtggacaaatgcagccatttgcagaggttaggcccaatccaaacacactcaccaactcactgattttgccaatgtcagaatgttgcaagaggcactggaggacaaacagcggcaaaaggaggatcacggacgacaggtggcgcagttggagatggagctgacgcaactgcggctccaatttgccaaggactccaacccatccgcaattggaagcatcgggcgaaaaagcggcggttcgatggcaatttcagcagggacagcgacagaaggcggtaccattgtttagtgtaccatagggctcccaagtatactgagtttccaaatttgggttgacagaaaagttccccttggcgccaacaaatccgaattaaacaacatttaggacaaattttgatatataatacaaatt

SEQ ID NO: 307 - DNA, 3623 bp, Heterodera glycines
  unsure (1)..(3623): unsure at all n locations
tgtggttatccgccatggtttgaattggcgtggcgttttgtatttgttttgcgttaaaaaatgatttgaaaatgaaaatggttttgatttttcaatttgttttgcaataaacattcttaaaattgtacctatttatttgcttttttatgtatgttcatagtttattaatctgtgactttcgtgtgagacactaatgtgtgtcatgcttttgaaaaaacattagtggtttgttctgtgactttaggttgatactaatgtgtgtcatgcttttgaaaaaacattagtggtttgttctgtgactttagtgtgagacactaatgtgtgtcatgcttttgaaaaaacattagtggtttgttctgtgaatgagaacgaagaaaatgaggacaacggttggacttacaatcaaacacttgacttttattcgattgatcaaattaaatttgcgttaattagcagagggggcagacgaagaacagctgcaaaacatgttggagaactaccaaaaacacgtgatcaggcagaagcaacgccagagcagcagaagaggacagcaaggcacagccggcagaagcgcgagtcatctgcagaagaggttctgaaaggcgagggacaaattctttccctattttcactttttactaaaaaacccattctgattgtgagcatcgtccagtgatttaattttgttgttttttagaatgaacgcctcgcaacaatctcagatgagtcattcccagccgtgtctgctttcgtccagcgttggccaatcgcatcacaaaaatgacgcgattgctggtggaattaacggcttggttggcgtccagacgcagcaacagcaccaggcattaaaactggccaaatgattcgatgcttctacaaaatgtatgcataattaaggtacagttttccgcccaaaaccgacgttttggtgccgctcaacaagacgaacagaacgaagtgctgatccaacgtcgccacgacgacctaattggcattggcaatcaacaacaacaactgaccaagatgaattcggaatgtaatggaaatggcaatgcacattcgaatgagcccataatcagccaactgaaggcccaaaatggttaagttaacgatttaaattttacaatcgaatttcttttttttagaaaaattacggaaaaaaagcgaacgactggaggaggtcagtgcgagtgttttaaggctaaaaaagcaatttgtttcatccatcccaaagtctttatcattcctccgtccttcactttatttccgtctttagctggagagagcgtgcaaaagaattgagcgtgactatgaccaagtgacggcacagcacgaacggcgcgaagaactgcagaaaatggcgattcaaaagttggagcaacagttgcgaatgctttccgcggagaatgagcagttgagggcacaaagtgcccggctcagcgcaatgtttggagttgtcggccaaggcaatgaaagcgaacagcagcagcaaatgcaaatgcaactccattttctgttgaatgagttgataccgaagaatgaggaactgctgatcattcaggtggagaaaattcatggggaaatggttttgaatttaaagaaaggggatcataaatccatgtttttctgaaggagaggcagcgaattgaactcgaggctcagtcggccaccctcgaggagcagcggacgcacatcgaagtgctcgagaaagccctttccaacgcgcaggagcgactggcggccaaagaacggtcggcggtggacgccgttgcggtggtggacaaatgcagccatttgcagaggttaggccccaatccaaacacactcaccaactcactgattatgccaatgtcagaatgttgcaagaggcactggaggacaaacagcggcaaaaggaggatcacggacgacaggtggcgcagttggagatggagctgacgcaactgcggctccaatttgccaaggactccaacccatccgcaattggaagcatcgggcgaaaaagcggcggttcgatggcaatttcagcagggacagcgacagaaggcggtaccattgtttagtgtaccatagggctcccaagtatactgagtttccaaatttgggttgacagaaaagttccccttggcgccaacaaatccgaattaaacaacatttaggacaaattttgatatataatacaaattattcattaaggtattggcgatgaaatgttgaagttgaggaaaacgatcagtctgaaggacgaccgaatttcgcaattggagagcggccttttggagatgcaaaaacggtacagcgacgagctgcaacttcgcgagacggcctcaattggcaatggattcaccggcggaataaaaagtggcgcggggggaggaggacgaatggccgagttggaggctttgtaagcaaaatgccaatgattttctgaatttaaaacccaacaacacacacaaacagagctgtgcgattagaacaggagaagtttgagaaggaacgccgcattcacgaattgttggacgagaaatgccacattcaaatgcaatggaacgaggagcgtcgttctttggactaccgcgtcagactgctcgaaaaggtgggacgatcaaacaagttttggcactcaatttccccattcaggacctgcgacatttcatgggcagtcaaagttcgttggccagttcaagcggcggcggaggcgcatttttcggcgctggtggagttgtctctccgtacagtggttgtgttggcgctgacctcctctaccaacaccacaactcgccttacgcttcgatgcgcgaccaaaaccttcgccaccgttcatccgccgaattacccaccagtgcacgaattgctgcactttatgaggataggtcacacggctgcggcttggatgtgcttgccaggatggaggggttgggccggaagatggcggaacgacgggcgcaaatgaaaacgtcggagaaaagtagctgcgcggaagggccaaaactgccgaacatcgccaggccgaggtcagtctcacagtcaacaccagggcatccgacattgcacatggtgtcagtgtcattttgtttcagtgactttgcgctgtctcacaatcagcagcaatcaatttccgccaccactccctcttctgaactcccgcaacaacaacaacaacagctccacgccggtgcccccccttcccaacatccgtcactttcctcctcctccaccgaccatccgtctcatcagccaacaatgttggtggatttgtccccttcctcagaagaactgttgcaacatccgacaaatgttgtctcgactccgaccgacgactatgggaacgcagtgacaccccaacaacagcagcnncctcaaccgtcattgagcaccacttcttccaccagttcgtccaccaaaaagtagagtagtcgttccccctccggaaaattttgaaaaatcttatcattgcaaaatcgaaaatttagacggtattttgtgagtgctaccgctgtcaaccactcaccagttaataacgtttttctggaccaatactccgagtcttcacgtcgtcgtgtgactggtggcaacaaaatgtgcagcagcacttttgtcgagacgaattcgtttggtggaga

SEQ ID NO: 308 - DNA, 2989 bp, Heterodera glycines
aagcatgataaatttataatcataaattaaatgttgtttgcaagtctttaatttcctcgagaaaatatacagggttataatatatatcttaaggcattgtcctacaaaccggaagtaggcgtaatatttcgcaaaactccgatcggtgtgagcgtcggcctttctcgcagcagtgatgaagacgcaggaatcatctactttgaggcggctttcaaagaaaaaggaaaacacacaaaacaacacctgacagtaacgtcaggaggcggaacttcggacaatttggcgcacgattcaatgcaaattgcgcatacattcgccataaatttcctcaacacaaagggcaacacatcgttcgaaagagcgcatgtacacatgaacatcattagcactagcacggtatgtatttgattacttacaaatgggtggaggtttcccaccacatccgaaatgaaatgccttagaaattttattaaaattttaaaaaagcaaaattttctaaaaattttattttttgtaaaattatttttcttttgagtggggttggtcgtaagcaacgtggggaaacttttgagcaataattgttatccctctcccctccccatctgttataatcatcaccaaacttatagcaaaacataattaatactttagaaggcgtacaatagtgcgggcccttctgggggcgtgggcgcggtgctggcgtactgctcactggcgttgcagaaggcggtgaagcaggacatcacggccacggggcggattaccctttctggccaagttttaaaagttggcggcatcagagagaaaatggcggcagtgaaaaaagcgggttttaaagtggtgataatgccggaggacaaccgcaaagacttcgatgcattgagcgcagaagaaaaaagagacatttcccccaagtggatcaatgattttgatgacgtttttcaattttgttttggtgatgggtaatttattgttttgataaaattattctacaaagcattgaagagcctttggttgataaatcccaaaataatgcaattccatcaaattgcagtgaaggaaatgctgggaaaacggtcgtggaagtaaagggagaggagggtgactcggacacgttgaacagccaccgacagttagtgtacaggaggagttccctgggcaatgccaatgccatcaagtgaccaaagggtgacgaagaagaaccacggccagattcgattgtttttcctcgtttagttaatatatctatccatttttccccttcaccttccattttaaaatgtgccttaattcttttcgccaaactaacatttgtatacgaaattgaagccagaacttgctcgattccctttattgcagtgccgttatgatgtgaacgattaccggtgcatctacgaagagactaaaatttttgttcattacatcattggaaggtttacaccttttgggtctgttcaccaatttcaacaattacacactataattcactgagcctatcaacaaaaaacaaatggttgagaatgaatttgagtgcaataatcaatgccatcactgcgacggcatttcggagaatcctcgtccaatgtttgtccttggaatttcgtctttcttctccatttgtccaaattcgttcctcctccattctctgcttatggtcctaaatttgaattgatttccactaacatttcctttactttacctcctcgaaatcggggaaactgacgatttcggatttcatgtaaaattttgacacagagacaatccgaacatgagcccagtgaccaagcagagactttttgctggcggagacacactcattgctaggggggaggcaggggtcaggcaccaaaatatgctctggaaaagacatactcgttttatttggatgttgtcctgtatcctgacggattttcctaccgtagcatttgttgtgcccaaccaaatggcgcccgtcggatgccctctcacaaattaaaacaaaatgttcctcgccaatccgttcgtcagtgtagcgtcgataagcgtggaaacaccgcgtcatttcggcggtccgacgacgcgccttaaagaggtaagtgcactttcagcaaaatctgaaagaaattaccagaagaaatgcgtgtaaatttaatataagtgccccaagttgttcggtcgtccctttcggtcacctcaattgtgttaatttttttcagccgggccgccggtgtgccgggcctcgggtagaattggttgatgaacacactggggaattggtacttggacagcaattggacactctcagcaaagtcggcatcggtttcagtaggaaaggcacaaatgaaatcagtggcgatgtatacatttggcacactgacaatgaatattttatcattcaattcactagataaattcactttttcagcatataatccataatttggcaaaagtgtggcacgccgtattaggtctttcagccccccccccccactgtctacgcccttgccgtctatatgatttggctccaatttgaatccaatgaaaattaatattgctcttcatcattgttatttagagttaggacatttccgggtatttttgcatagaaaataaatttttacaatttatagagaaatgatttttctcttttcattcaatgggattaaactttatcattatctgtacaaaaaattaacaactccaattttctacatttgtttttggtaattaaaattaattaaatgtattaattaatattaaacatttttattcgtcttttgctcaatgttttgttagcaaataataatttgtttcccatttattcgatggtgctatgtcgttatataaaagccaacaaaaagggcgttatataaaaaccatcaatgaaaattttcaacaaataccataattcttggtatcatccgatagcctatgggttctctattagctcacctatgtttcaaaaatttgggggggttgagcaaagttgtggccaaaagtacacaagcaa

SEQ ID NO: 309 - DNA, 4126 bp, Heterodera glycines
  unsure (1)..(4126): unsure at all n locations
ttttatcatttcaatccactagataaatccacttttcagcatataatccatatttggcaaaagtgtggcacgccgtattccctcttcatgtcgcccaacaccgcgtcactgcccgactgcaccgggatatgcaggaaggagtagacacgggggtggcacagaatctccgcaatttcgctcaaatggtccaaaatgtaaggcggattggtcatgccaagtcgcatctgacaaagtgggaagcgagcattgaacaaaaaaacaaaggcatgggatggtaacgacacaatggaattacaaatcagagtcagtagcctatgatgaataatttgaattgggcgttaggttaggtgagcacaaatgggctgaccatgcatccgtcggggatcacttggaccaaagcgcgcaaaaggtccacaattgtgtggccaatgtcgcgtccccatgcgcccaaatcttccgaggtcagccacagctcacgacacccatccacggacaacgctttatgggcctgggcgacaagcgaactgagcgaaaaactgcgaaggtcgccccgggcggcctaaaaagcaaattcaaaggaagcattaaaaacaagcacaagaaagacgggacacaaattgtttttttgattatgactaaggattgttgtacgccgttttacctttgttttgcaatatgtgcaatggttaaggcacccattgtttatggccaaaatttcgatgaattcattccttccttaaccggcagttcattttcgatgtttgccattttctcacttattttcggcattgataagtcaatttgcggcgtattcgcagtcgccgcttttcgcctcgacaacaatcggacgacgttccctttcagtgtttcctccacaacataaacaactcggtggatttgttgaacaccaatcacagaaacaccattaagccacggctcatttggcgacgcctgacaatgagagaaaatggaagggaaagagcgtaagaaaagtgcaaaaaaaaaaactaaaaaaacaacatcaagaaatcacttgggacacacaaccggacacaacgacgcgcttcgagttggacaaagcctcttgaatttggttggccaattgcgtttcggatggagtcttcactgtgcctaaaatccttaaaacagattaagttgctaaaatttaaatctcaacgaacagctgttaagcacccaaatgtcggctaacgttttgtccgcagtcattctgtagcctgcctaaaaggaagttcgggatcgctgacatgagcattgcccgactccaattcgaaaattcttttttaaacatccacaatttttgaaaaatagaattggcccatcccccttagtctgatattccatggcgcccacctgaacgagcagtccggccatgtactctgagtcactgttgttgtgggaacagccccaagtgcggagaaaaactgtgcaatctgaactaaacaaaatcaaacgaatgcatgaagtggacagagatccaaaaggaggacttaccccacgggagaatgcttcggtccgcccggcactcgtccctttggccccttccccctccatccgtcgtcatttcttcgccttcctcagattctctcattttattcctccgcataatgcgcacattgaaaaagcgttttccattttccttctcatcggcagaaattgcctcatcgaactctgttggcagccgaccgattgaatcctcaatgtccatcagaaaagaaaaatgaaatttcagtaacaaaaaataaatactttgatgctttaattcaaccaatttcatttcaatttaattggaggaaaaagattttaattgcattattaaaacaaatcacatccaatgcgcgagagtcaaagagataaaacatttttaaaacgctgacgatgagcatacatttgtggttttttgggcagaaagtgaataaaagcctttaaaatctaaaaaaggttctttttgttctctccgtcatttatgcccaataacaaaaagcaaggaaatgaataaatggacagacaaaatgagagaagaggaggggcttttttgctttgtgtgaatttacgtgaacgacccgcacttccaatggacattttcttctcatgacccatcgatgccgaaagaggaaggcgaaccaaactgaaatttggaggggaatttaaaaaatctttcagaaagcgatgacccttccggggccgcccccgcgaattgccaaatgactgtcaatggcctgcaatgaaagtaaatgggtattaacggagaagtaaaattgtgcggatctggaacaattccggaggtgacggaacgcgaccactttccaatttggaccaaattcgttcgctttcaatgtaaatttcgaaggctcctgtggattggagcatcctaaataatttgatcttgttaatatatctcacaatcagtgaaagtaacaaaatttatttacccttcgatggcattggaaaataaaaaaagcataagtgcagcagacaaacgattgctgagcatccattggaagaaagttggggtttcaagtctcaaggtggggaaaggactccttccggacacaacgcacacaatcagtgcaattttgaccattccgatgacctaagacacaaatcgaatgcgccaaaacatttgttagattaaatttcttctcttaaccactcacctgcgctcccaccgtgcgaagaatgccgggaggatagttttcgccgtggatgtcaattccgggatatttttcgcgtaaaatctgcgcaaactgttcatatgcttggcgataaccacatgagacactaaaagaatgataaataagtttttagacaaagtccaaaacaaaccaaaaagaaaatttcactggcggcatattgatgggcaatttgaacgattccttcgtccccgaaggttctcggattgtgacttcctcgtcctccatttcgaaccccttctgggcctcttttgaatatttatgcgctgggttttcttcgagttcatcgaattgtttaaatgagtcgtcgcaatcgttttatgatcccctttctttaaattcaaaaccatttccccatgaattttctccacctgaatgatcagcagttcctcattcttcggtatcaactcattcaacagaaaatggagttgcatttgcatttgctgctgctgttcgctttcattgccttggccgacaactccaaacattgcgctgagccgggcactttgtgccctcaactgctcattctccgcggaaagcattcgcaactgttgctccaacttttgaatcgccattttctgcagttcttcgcgccgttcgtgctgtgccgtcacttggtcatagtcacgctcaattcttttgcacgctctctccagctaaagacggaaataaagtgaaggacggaggaatgataaagactttgggatggatgaaacaaattgcttttttagccttaaaacactcgcactgacctcctccagtcgttcgctttttttccgtaatttttctaaaaaaaagaaattctattgtaaaatttaaatcgttaacttaaccattttgggccttcagttggctgattatgggctcagacgttggagcagcacttcgttctgttcgtcttgttgagcggcaccaaaacgtcggttttgggcggaaaactgtaccttaattatgcatacattttgtagaagcatcgaatcatttggccagttttaatgcctggtgctgttgctgcgtctggacgccaaccaagccgttaattccaccagcaatcgcgtcatttttgtgatgcgattggccaacgctggacgaaagcagacacggctgggaatgactcatctgagattgttgcgaggcgttcattctaaaaaacaacaaaattaaatcactggacgatgctcacaatcagaatgggttttttagtaaaaagtgaaaatagggaaagaatttttcctcgcctttcagaacctcttctgcagatgactcgcgcttctgccggctgtgccttgctgtcctcttctgctgctctggcgttgcttctgcctgatcaagtgtttttggtagttctccaaccatgttttgcagctgttcttcgtatggcccctctgctaattaacgcaaantttaatttgatc

SEQ ID NO: 310 - DNA, 3169 bp, Heterodera glycines
  unsure (1)..(3169): unsure at all n locations
aaattccgtcacaaaaaagggtcatcaaattacngcaataaataaacaaaatgccaaacaaaaaaattttgtttgaaaagaactattatgcaatctatatataatttttgcctttggtgtcacaagtaaacaaacataatacataaaacgtggtctntcatcacttttctttgttctgtttttatgttatttggtagtaattgcacttttggttttgcttttctcttttgtttaattctattattttttccttaaatatttaatattattatctgtctttcacaattatttaatactatttttctttttataatgttaggaattttttgtcaaattgatgatatatgctattcgaattttttgatactttgaaggataaaagaattcatgttcaaagagagaacatttatttttgatcccaaactacttaatcgatttcttcctttcgtaattatttgttttcttttaacatcattttttttcactatttcacacattttaattatttcatacaccaaaattgatttagattgcttaattgtctaatggttcgacaaaaacaaactttctttaataacaatgatcttccgacaacatcagcagcattgtctcatggaaaagacgggttccaagctcccgttcaaaaaagcggtcaaatgaatagaagggttcaaagctcccttaataaaaagcggttgcatgaaaacaatgacaatgaattgaattttgaattatcaagcaaacgaaaaaacacagttgaacaaattattaatttggatgaagtttcgaatgatttttttaaaaataatgattgcgaagagattaaaaaccagaagaagatcggagagtcagctattcgtaaagaattatcacgaatgagaatgtctgatgaaaaaataaacatcgttcagaaatatgacaggaaccgaaaaatggcacaaaaaaataaacatacctctttatatttaatagctggtgaatttcgtgtaaatgatttgagcagttataatcttggtgaatttgatgttaaatgcattcattgcccagctattcattttcaggaagaaaacaacaaaatcaaaggaacccaagaattttatgactgttgcaactatggtaaaaacagtaatttagaagaaatgatacaagaatacccaatggatttgcgggttttatttcaacctgaaatagaccaaaataattacacacaaattggagagttacacaatgatttcaaaaagaaattaagatatttaaattcctctttttcatgtgcgtctttgggatgtatgcgatttaaatttcctgataaaaatgtgccaattttcaaaatacaaggtagcatttatcattcatataatagtgttgctaggccaaatgaagaagaactaccgacgaatggacagctttattttatagatactgatgaagcgattaattatcgattaagtgcctacaaagaccaattaacgaaactttcaaatgataatactatagctttaatcgcttacattgagagttacctacgcgaaaattatgtttattcccagtcatataaaatgatgaaagaagtatttgaaaaagcagtagaaatttcaaaaaatactgactgtgaaattcctgacattacaatgttatttgatgtaagagaaggaacagatttaaggcgctataatataacgaaatcgaatgaagtttgtgctatcatttttcgtgatgctaatgatgatatacctgctgcaaatattgttgtacatttaaaaggaagtaaaaaaatagaaactattttccctttaagtccaatggtcgaacctatgtgttatccaattttttatccacttaattatcaaggctggcattacaatataaaaaatttagaagggaaaaaaatttcattgtgcgatttcaccaaatataaattatttttcagaagagaagggaaatttttgccgcaccattatagtaataaattgtttcaacaatggttagttgatcaggcggcgcgaattgaatggagccgtttgaattacataaaattacatcaaaaagaattatgtaaaggaacatataatgagatagataattttttgtatgcaaaagctgccgaaatcggtgcgcaagttaaaaagaaagtgattttaccatcaacctttagtggaggaccaagaaatttacatgagagtttcatggacgcaatggcaattgtaaacgaggttggccgacctgatttattcctaacctttacctgtaatcctaaagattttgatatacaaaaatgtttgcttaattcacaacagtcatatgataggcctgatattgtagcgagagttttccatttaaaagccatccaatttttaaaagaaataatagacgggaaaatatttggaaaagtggctggattttgttatacaatcgaattccaaaaaaggggtcttccccacatacatatgttattgacattagatccagaaaataaatggaaaaatacaaatgatattgataggtttatatctgcagaaatacccaatgaagaagaagacaaagatttatataatttagtttctgttctcatgatccatggtccatgtgggcctgattttactgatgcagtttgttggtgtaataaaaagaaaaaatgtagtaaaaaatttccaaaacaatttcgtgaaaaaacagaaataaatgaaaatggttaccctttatataaaaggccaaataatggacaaacagttataaaaaaagattggaaaacaggaaaaacaaaagtaatatcaaaccaagatgtggttccatataacagatatttacttaaacgttttaaagctcacataaatgttgaaaaagttgctgatattaaagcggtgaaatatatttataaatatatatttaaagggtatgatgctgccactgtacgttgtgtcacaactgaaaaaggaagtgtaaaagaattaatatacgatgaagcgggttcatttcttgacgcccgttatcttagcccggttgaagcatgttggaagatttttaagtttcctttacaagaaaagtctcattcagtacaaagattaccagtgcatttagaaaatgagcaagtaatttttttcgatgaaaatgatgaagaagaaacaataattgagaaaaaagacaaaaaaagcaaattgatggcttattt

SEQ ID NO: 311 - DNA, 1005 bp, Heterodera glycines
atggcacgaaacaaaataaaacaaaccaatttatcaccctttttgtcacaatgcactcgacaataagcacttttctgtttcctttaatgctcattaccacactattctcaaaccacaatagcacaaaataaaggtaataaacagtaataataatgaaatgaattataattaaaacaattatatttcaataaaacgaaaaaatgatcaataaatacgaatttagatggcagcagttcaaacttagttcatccaggttttaactttgtttaatcaatgaaaatatattttcgaatattttaatgaatgttcaatattttaggaataatcagtcgagtttcacagcacggactcaaccttttagcaggtattgcacgaaaaacctttctttttatatttcgaaagcaattaattaatgatcgaatatttttaaattaaatttttttaaagattatttgcgcactcgcgtccaacggtttatgcgtttcagtgcttttcagtataattttagtgtcggcgtgccaaataataatgtttgtatttttaatttaatatgataatttaattttaaaaatcaggttgaaattgccattcgttctttggatacagcattctttgactcgggctcgtttaattccaaaattgcagttattgtgccgtcaaaagaactcatttggagtgtgaggcattaattaattatttatatattatttaaatgctttttattgcataaattaaatagggatttcattttagggctccgactttcgtgccagcattaacagtttggtgcagctgaggccgttggacaaacgcgactcaccgacgcctttgttcagtgcgcatgtgccgctgaagttggaaagagttcgggtggaattggttttgggtcccagcgtcaaccaagacggacacttaaggacgggtgggtaattaattagtgtgtaatttatagattcttgaaattttttatttgtttgtcagatgtgcgacagtgtctaattgttt

SEQ ID NO: 312 - DNA, 1338 bp, Heterodera glycines
gcaggtcatgcgaagtagggaacgcgaagtcagcattagtgctagttccactcgcggcaatgtttttggtattttacggcaaggcaagtcgaagaagttaattgactgcaattaagcaatgcccaaatttgaaggaaaaactcggataaatgattttcgattgcccatattgccacagccaatggtgccgagcaattccaagtctgccgcaaaacgaatggtggtgttccaactgtccaattacactctgagcagccttttcttttggatggtctgtcaaggccaaaacaatcgaaacttttccaaattaaggaccaatacaggaaattcgactatgaaatcagcaaaacaacagtgaaggacaaggaaatcgcagcttatttgaagacggagtgcgggccgaaagacatttgtgccggcactttgttcccaggcatggcacttttttcaaagtgtttaccatttaaaattcccttttaaagcattggcacagaattttcccaatgggttggtgagcatcaaaagtcggacattgacttacccgacaattttaattgaacgaaatcgcataaatgtgcaggttgagagtcggattgacgcatttgcaaatgtaatcgaattattaatttaaaattaatgttagaaaatattttagtattccgatcataacagacgctttttgaccgccacaatgcgtgcaaaattacagctgcagaacacaacatttgtgaattatgtattcagtgccgagttgagcattgacacattcgacataacaaatgttgtaagtttaggtcagtttcaaggaaatgatgaaaaattcaaagataattaaattaaataaattgttaattttaacttccaaaaacagtggatgggatcgatgcgggatcaattgaattcctggtaaatgcactcaatgagctgatcattgctgacgacatgcggcataaacttaaagaaggtacacacatgaaatattaaatttaagattataataaataatcaatgcctaatttcggccattaattaattatttaattaattagtcaaatcaatcaattccaattaactattccatttgcaggcgttcgtttgcccgttctgctcgacttcgaacagtttggcccgggtgatgttcacctcgaggacggctccctggtgctcagtgccgacctgtgctttgacgaactgtgcaaaaggacacccgcaaatgaattgggaaaacaatcgcgcgaaaatgggggcaacacaatgtccaacgtggacatggacgcgaattactacgacagtgttaaagggagaatgaattagcaaaaaagaatgacgaaaatggaa

SEQ ID NO: 313 - DNA, 1855 bp, Heterodera glycines
tttttataagctattgctttgcgattagacaattatcattacagttatgcatgaaaattgcgaaaagtcgaaatttttgaagttttttcttaataaaatttttacaggcttgaaaaacttttcgtttttgataaggctaatagagcatgttaagagctttcgaatgataccaagattgttggatttggatgccaaagaaaaaagcttaagtggaaaaacgagctggcgccgaaacgggagcgccgaaacgggagcgccgaaacgggagcgccgaaacgcgtgggtccctccaattacccctccccgcccaatttatcactaaattcaaaaagactatttaaattagaaatgagcagcgaaccatcatcacttataagcattgaattaataacccaagccaattggaccatctcaaaatctgcttaatttgccatgaacaaaaaattcatcaacgcacttttccatcaacaaatgttcaaaaatggtaaggaaattggggaaaaaacgcttaattagggacaattcaattttggcataatcgcgggtataaactcaaaaaaggctacaattgtcgggggcggggttcgctctcaatctgtgcccgatttgtcgactgtcggtccctttcaagcagttcttcttccgttccgccacttcgctgctttgactgccacgcaaacgcacattgatcccgttcctttgtcctttcttcgccaatccgaagatgaaagcgaacagaagacgatgattatgccaaaatggaaggaggagggactgaaaattgagaggaactgctcaaatcgcatttttcaaaccattgccaaagacgtaaaattgttgactaattgatcaacatcatttattaatcaatggctaatgacagaatgacatattaattagtcattcattaattaataatgggaaaaagagtctgtccaatattgtttagattgtcgacgagtgcgggttggacaattccgcccaggactacgctttgtgggtcaaagcattcggctccaacttcagcatgttttttgcacttgaccaaaatcggcatccgatgggctctgttagcattgcactgtatccgcaggtggcacaatggagcatgttctttgtgaaggaccgcttccgtggtcaccggctcggaagtacgctcactcgacggtccatggaattgcccgggagccgacccgttttctgttacggaggtcggaatgcgcatatttttgatcagatttgatataattctttaccttaatccaattaattcactacactgccaatgatctgaccaatcgattaatggttgactgacgctaatttgatttgtttttcagcggccgatatgtggttcaaatacgcggaggactacggactgaatcatttgttggactggcgcctttggtcaatgcacgccaattgcgcggatgtgcgtccagaacggttggactacgactcgagcgtggagctgaaggagtggagcgaagtgtccttcgaccaattgttgagttttgaccgtctgcagacggtgggcgtcgatcggacggcgtatttgcaggcggcgcttcgactgccccaaagcgtcgcaaaggtatggccgcccttttgaagaatttggtgtttaagcattgctaattacattatttgattttgccgtttaggtggccgtgagcaaagagacaaaagaagtcgttggaatgtgccaggcgcgcaaattgctgaaccgccgcattggcatcagtcttttttatgccgacagaccggtcagttagggtggttgatgccctttctctgtctttcgtctcactttttctcttctctctctcgtccctctttcctcttctttatcaat

SEQ ID NO: 314 - DNA, 1964 bp, Heterodera glycines
tctcattttcctctctcgccccctttctcttcctctcttctttatctttgtctctatcttatcttttccctcactctcttcctcttgtatctctctctctctctctacaaattcgatccgccttattcagtccattgcttctgcccttcttcgcgatgtactgcttcaatttgccggccccaatccgtccgcccatttcgaatcgctcctctacaaaaccccgtccaacaacactgagtccctccgcctcttccgtcagctcactcagaatggccaagtcgatcggcaagtgttcaccccgcagttctctcgctatgcactgccttttcctggaaaacgcattttttcgatcagtgatcaacacgtgtctctcgtctgatcaattcttgaggacatatagtggatggaaaaggccaagagattcgacacacacacaaaatgatccatttcattctttttgttcattatttatgcatttgactaaattttactttgaaaatatttacactttttatatatcttaaaattccatttttaattatctatttgaataaacaattgaaccaaactgaatttaaaaaaatcccccttctcgaagccgcgccttggttttgagactcgaaaccaaaatcaagaccatacatacgtgtcgtcacattgacggtcccagggtttcggcttgggtgggggtacccctcacgggcgacgttcgtgtcttttctgtgcttaccaattagcgtgcctttctttttttaattgatttgtacaaattggaaaaataataaacaaataaatgattaagtgaatggattttcaatgattgtccttagaattcaaacgttcaagttgctctctgtcctcgaccgttgattttaattccattttcaattctttgaatttttcggctatttcttccgcatttattctatgaaaatcaattcgccttttgccgtctttgtccttgtgattgtactttacaaaatcgcttttaatttttaagtcaaaatttttcaaatttttacgcatattttctctgctctcataactttgaattccaatcagccaaaaaatacaaaaattgggccttagcaatttaaattccataattaattatttgttttttaattaaatttaccggaatgaaagtgcgttttgcgaaaatgaggactcataaagcgtacatttctcctggtaaatgccattgtacagctgagtctccgttttgccatttcctttttggtcaatgtcaaaaacaatttgcagccgaattcggccggaaacaaatcgacaaaaatattcaccgttctcaatttgttcagatgcgcaatttaccaaaataaatgtcttatactgaaaatacttgattttaatttttttaaattacattaaaaatactaatatgtagggcttccttttttaggcacaaaaaatcgcgaaataggcacctaaaaaggcattaaaaatcgcaaaataggcattaaataggcacaaaaataggcaaaaacatttttttataacgctttttaggtagtaaacacgtaaaaacttaaatatttcaattgtaaatgaaattattaaatagttgaaagttttttttcgaataaagacaatttttaaaccctaaaaatttttattaagaaaaaaaaaattaaatttcgggatcagttttttgaaagttttttttcaattcttaggggtatattttctgaaatttttttgggtcatttcttaggggtgtgtttttcgtttttattgcattttttgttaattttttcaaaaatcctaaaataggcactttaggcacaaaaactctgaaataggcaaaaataggcattataaaagtcatcgtagacaccccaaaccaagcggaaaaggcgtttttcgtgcttatctttgcgtatcaatttcgcaaaattttaggcatttgactaaaaaggaagccctactaatatgtaatctgccga

SEQ ID NO: 315 - DNA, 12142 bp, Heterodera glycines
  unsure (1)..(12142): unsure at all n locations
ccattcgacccccccccccccccccgacaaataaaacttttttactaacttagaaagttttttattggggtgttgtataagttctgtcaccccgaccaaaaatttcattcaaaaatttataaaaaatcaaataataactcaaaattaatcaaaatatgcaccattattctcgaccatcttctcccatttttgagattttaaaaatgatctgtcgattaaattcaagatagttagactcaaataaactgatcggtctacttaaaaaagtggccaaattcaaccactgatttcttggccaagaaaaggctaaaggtacaaaacaaattatggttttgtagagcaaagttgggactatctgacaagctgaaaaagagccaccaagaccgacgggttatttttttaaagttgtcctgtctgaaatgggtgctcaaaagtgccaagattcagcacccactttgtacaacattggttctgaaaggacctaataaaatgaaattgatgttttcatgggcaaaccaaacccggagaatccgaatatcgcctcagatttagtcagttgctgttctatgaccctgtactgcttcaacttcttgtcaacgacatggagcagtacaatgccagagaaaattcagagatcaaatctgaggccagatttggattctccggacttgatttggccacaaaaactgcttttaataaatttccaactgatcaaagcaaagttttgacccgtacaataaaagtgatcgaatttgtaatttggggacatccattggaaaatttttttaaaaatcaatttgaatggggaagaacgaaaaatggcttttaaccgaagcaaaaatgtctgctctttcctataggacagaaattgatcggctgtcacttgcggttaacggtgcaaaaaattccgattagcatagcataagaagggtgacagaacttatacaacaccccaataaaagtcatcgtagacaccccaaaccaagcggaaaaggcgtttttcgtgagttatctttgcgtatcaatttcgcaaaattttaggcatttgactaaaaaggaagccctactaatatgtaatctgccgataaaaaaattaataaatattcggacaaaacaattgccttttctgtgaacggagtcgcttttgtcaataactcatacaaattttcttcattcataactttaattttgtttaacgcttaaatttccaattttgaaagctttcacttttttatagtaataaaaatttttataaaaataattcgataattttttgcaaataaaaataatggtcaaaaacattaccgattttcatctcacgccgaataactcttgctgcagaatgtgtcaaatgccatgccacattttgttccggaaacattggcgtataaacgggcatttcttgctcatccggcttcctaacaaaaaacaggtcccaattttcattgacatcaaaattttcttccaattttaattttgcgagttgcacaggcacacgaattggcctcaaatttaaaatttcaattataaaacgagaaattcatcaaaatttgttaatttaatttattcagatttaatagaattgcttatgattaaggcatccaattatatggaaatccattttttttcctggactgtgggaggcctgaaacgcacgaaaaacatttttttagcttgttttgaagcttctaggacgtatttacatatgcatattttgcatatttgtgcatatttcgcgatttatgtgcatatttgtgcatattttggcatttcgtgcatattttatatacatattttagcattttttcaataaatcctctattaaaacggccctctattaaagcggccatttgggcctctaatgaccgaaaatttttcaaaaatatcatttttgggtattttctaataaaaaagtcacttttgaaaaaattggaaatttatgccaaaaatagtcagaaaatagaaaattctccattttttaaccaattttcttcaaaataaataaattttacttttattttgtatttttggtttcataaatgattactcatactatatttagctattttcgagattttatgcttaaatttaacaaatttgaagaaatttcaaaattttgctattaaaatttatgtgcatatttttcattttttatgtccatattttgcaatttttggtgcatattttatgcgcatattttacgattttatgtgcatataattggatgccctacttatgatttaattattttacctcaataaatagaaaataaagaatctctcaattaaaaatggtaatgatgcgcttgggtaaagcaaaattacttttgctgccattatggccaacattggcccattcaaaaagccataagcagtcgaataaatgtgattttctaaatttaagttttttaacttataaatatcacttattttgttaccttttgcccatattttcatgaataaaaccaatgcttgaaattttttggcctttttattttgaaatttttccaccttaaatttattttctgacaatggaatggcacaatttgcatgattttcttggaataaatttgccaagtaaaaaatggagcgataacctaaaatatcaaaatttgtattaaaaaaagataaattttcacttgacaatgcccgcagcatatttttgtgcgcaaaatttctctccgatttgaaattgttaatgtatttgccaatttggtcgtcacttagcacaaatggcaaaattcttttggcaggaattgaaacaaatgtcaaatcgaaatcgatgccattcagaagaaatctgatcagaaacactttcccgaacggagttttgatcaagtttttcacgcctttattctgaaaattagtcaataaggatcaatgaaccattaaggatttaatttatcctctaaaattacttgacaaaatttgcaaaacaatgaatcgttttgttccgttgtgcactcatttttcttgcaaaaaacgttttcttcgccgaaaaaattggccaattttatgatttttcccggggcaatacaaatcaaatcgatgtccgaagaaaatgtgcgagtgccaagcaataaagagcccgaaatgtaaagttgggctgcgccattcgacttaatggaatttttgtacatcaattaattatactcattattttggctttaagttgtatgcactaaaaaatgtcatagtatacgcataaaatatgcactaaaatcactaatatgccctaaaaagccgaaaaatgtctaggtatgcactaaaatctgcattaaaaactgccaacattttatttgaaccctcaaaaaatgactaaaattgtgtaaaattcagaattgactttaaaacatcaaaaatggctatggaacgctttttttagacaattacaaaaattttggtatattttaaatttttttattatatgctaaaacaaaattacatttttaatataaattacatttttaatataaattacatttttaatataaattacatttttaatataaattacatttttaatataaattacatttttaatataaattacatttttcttgtgaaaatttccaaaaaatggtgaatatgctctaaaaatgcaaaaatggcaaatattattctcgaaaatccncaaaatatgcttttatatgcactaaaaacctctccaccaaatcaaagaaaaatttaacgtagaaatgctatttttgagcccctttcttcatagcatatgcgcagaaatacaatttctaaccctactcattactcatcctctttttcacattgtgaatttaattgagaatattcgaattcacccattcctcaacgatccgatgaatttggctcaatccgtcccatatcggcccattaatttctgtgccgtcggcggatgaatttttgccaatgttttcaaacagatatttttgcaacttaatttatttgtaatggtaagaaaaaacagtcagaaagtctttttacattttctttcattttatgatcgcctaaaaatgtctgctgggaaatgtaaggaaaagcggggaaaatgtgctcattttgttggtctttgctcaagtgtttacgatataatgagatatctaaacagacaaaattaagaataattagaattaatggtcttagcccctaaggcatcgacgaaatgccaagccaacgaattccgattcaaaaacaaatatattcttttcataatcgaatataaaatattttttcatcacttgcctaattcggtttgttctgccattcttttccattcaaatttcactttttcgaagcgttctgcgccgaaacgttcgcccaataaataaaataatttctcttttttcgttttattctcataatttttccatttttcattaaattcattgtttttcaaaagtgccattgacaaatttttcaaatgaatttgcacttttatttgctttgttatttcgtcgggctcaaattgttttgtgttttgcaaattgtttaaaaacaattgcataaatttggatacttttttctccattttctccaattttggcacttccaatttaccaaattgctccaaaaatgtgtcccattcatttcttaattgtcccatgctcttttgcggattgcccgtgtgattaaatctttccaattcgcccatcgcttttaaacgatgtccaatttcatttaaaaatgccccaacatcgattatccgttgcatttcgatggaaggctttgccacaaattcttcatatttggcataaaggaatgcgtcattataaaaatctgaattaaaatttacaaaatttattagcaattttctgtttaaaaataaattaaattaatacataattatttaatattattattattagggctcgaaattgtatggattaacatttttttttctgcgcatatgctacgaagaaaggcgctcaaaaatagaatttctgcgttaaaattttttgatttggtgaaggtttttagtccatataaatccatattttgggggttttcgggaataaatccatatttcgccattttttcttttttagtccatatttcggccatttttggaaattttcacaagaaaaatgcaaaaaagagaaaaatacacccctaaagattgactttttaaaattttttagaaaatacacaccaaaaaaatattttttcgaaattttggcaaattttttaggtattttgttcgttacctaaaattttcgctgacaacagaatgagattattacataaattttgagatgtatttggttaaaaattgtaaaggaagaatttgattaaaaaaaatttgcattttttagctttaaatcaatttttggtaatttagtgtattttctaagtttgtttaagcaaatattgaatatttttggaatttttgagggtttaaaacacacattttgacagtttttagtccatatttcaggcatttttagtccatattttatgtccatatttggggtttttagtccatataatttcgagccctaattattatattatattttaccgttaatagaatgaattttggccaattcttcggccaaattgtgtttgatcagttttcttctcgcgttatattccgtaatgtcccttcgcttttccacggcttttcctcctaagcttttgccactttctttacaatttttctcatctgaattttgcttttctttcttttccttttgtccaaattggccattttctccttcattttccccatttatttgctttttctccattttctcatttaatttattattttcttcctccttttttgttttctttttctccttttttctccgttttttctcttcttttttcgcctttttgttttcattattttcattttgtcctttttcatttccatttaaaattgtttttttattttcaattgcttcataaaatctttttaaatcattttccgtcagaaagtcgctcattttttgttgattgtttttgtttaattcatctaaacatttaatatttatttaatttttaatttaattttatttttaatttaccttccaacattctctcaagctcctccttctcgcttccatcttcttcctcttttctgttcaacaattccataaattcggcaaaatgtaatttctgaatgatcggaattggctcttcgtacttttttcgttcttcttccgtttgtgcaacaacattttgcgcattgtctgctactttcttgataagtctgctcagtttgccccattctttgtttatttcggtcagatttaacattttatttctgctttcatccacaaatgttttaatcgctaaattcatttggattttaaggcagaaatgccatttgttggatttttaaatgattttagctgattaaaatgccacaaacctggcaatgcgaagctaaaaattcgcattgcgtcttccatttccgctgcgatacaataagcatcgtaaagaagtcggaaatacaggtgcaaatcgtccattaatttttgcacttttgtgcactgattgtgccggtccatctccaaccaattcatccacacgaaaacatcggcaccaaagcgttcggccaatcgcatttccgaagcattgggagcgaattggtcgtcgagcagcaaaaagcgacggtaatggttcagcagatgaagtttatttgtgaaaactaaatttagcagaattattctcaatcatcgcaaaatttattcttattttttcaaatgataaatttctcattttttgaatctttttcaatttaatttaatttttatttatattttctttcatttatttctctgtttgtttacaatttctgttcagcaatttgttccgtatcttcggcatttcccacattcgctgaattgcgttttttccgcccaccaaaagtctcatccgatacaatgcgccgtgcttttctcgcaaaatttgcataaattcgtctttttctttagcattttcaataaatgccgccaaataattgaaatgttccgcccccaacactttcatttgttttcggttaatttcactaatttccatttgaaaacatttgcgggggaattgccaaaattgatgctcatttgtcagctgtttctccaaaaagtcaatgaaatgcatcagaggacagagcatccgaattggggccgactttcccgcaaaaatttcaatcaactaaaataatttgggaatttaaagcgatcagtgcgaaggaattgccaaaatcaaagtgattttagtgattgcctttagcaggacacatgtttccgctttggccacataattgtccctaattatcattgtgaatttgtcaatttccgaattttgttctccgcttttcaataattctttgcctatttcgatgttttttatcactttattttccttgcgacttgaacacagtgagagcagcttaatgaggacagcaattttgtcctcatcttccagcgatgcctcgtcgaaattgttggactcaatcaaatgttttatgtaaaattcgagcagttccttttgcccaatgcctacaaaagtaaaaaaataacagtaaaatgaaaaaaaatatcttaaaaaagcgaaattattatttaattaccgtcgtaatcgataatttttgtgaaatttatgccattcaaagcgacgtgtttcagaaaatcgtggaaatgggtgaacagcacatgcacaactcgcatgtgaatttggccttgggtcgtcggactttttaaatgggaaattatcatttggccaatgcgcggctcttcacactttgtcttcacccaaaggttgttgtcatgtttgatcagctgtacctaaaatgcgccgatttggtcaatattaatttgcttgtgtccattcttctccagtttgaccattttgccacttacggacggatttttaattttttgatgaaaatccgggagaaatgccgaatttttacattccaaatctgatcatatttctatgaaaatatttgaccaaacattcactggtcatctcggtaccgtacccattcccaaccgtaattcaatgggattatggtaaagtttcgctcgccttttcgtttatggcactcagaaagtccgtctctctgccgaacccttctataaatattgcccattcgtcgttctcgcgcagtgttccgttgtccatcagatgcacaatgaaactgatcatttggcacaattgcacttcgctcccatttgccccgcctcccctctcaaaaaagcccatttccgtcgcttcgatgcccaatttaattgccattcgcgtgaatttgggattgtttttgtcctttaataagtcgagcacttcaagcagtctttgcacccacaatttgaattgcaaatgcgccgctttgataagaaacgactgtttgacggtgtcggaaattgtgcagtttttgacgaaaaaaattttgttataggcaaaagtcagcgcactgccctcttccaaatccactaaacaaaacgtcaaattaagctaattgcattttaattgggctaattacggtccgtttcccatgcttttttgccgacttttctttcgcccatttgcgcgccttttgcccctttctgctgttcggtcgtgccattttcttcgtttccgtcacttcgttcttttgacattgatgatttatcacattctaataattcttcgtttcttcccaataaattgcacatcctttctttatcaatttgaatttcttaaaacaaattattaaatcgctttgaaattgcttaaattgggattaaaaattacgcaatcacccattcattccatcccttttcaatttgtccaaaaaataaaccatattttaattgccaattttcaaagcaaaagcttagaattcttttttgaattttctatgtttgaatatttattacgatctatgcattgcttgaaagtgaactttcttttctaaatttcgacttgcctctcaactgattttggaattctttttctgcgcaaagttttttcaaaatttcgacgtggcctttggcaagtgaatgttttagctcaggaaataaattgcttgaattttttaattgtgtaattaggtttccctgcaattgctcaatttctttgaccgaattaattacactaatcgagtccatcgacaattccattgtgcccatattttggtcgatcaattccgtttgaaatgacaaattgtttgggtcgttcaattggtttttgaaactaaaatatttaaaatttgtactaaaaaagactaaacggtatgttgttacatctgataatgtgccaaaatgtccatcataaatttggcacgggtccactcaatttgttcacttttttcgtttaaatattttaaataattcctattttggagtttcttaatttgctcatctgtcagttctgaattaattcacttttataattttttaattagttttatatcaattttaattaattattactttttttttctttttaaactaactgtttcgaagcatttgtgtcaattttgggtatttttgctccatttttgccatcacttccaccgaattcggtgagcactttttgttgtcatttccaattaaattttttgccgaataaaagtcgcacagtttggccaaggctcccttctccgtttccaacgagtttttcaataatttgctaaatgcgttcgtttccccacttaaattggccattaattcgctgtgtgtgtccagcaaattgcttcgaactttgtccaaaatgtcatcacaaattcggcttttgccctttttcgatgcttttttcttcagttttccgcttttgttttcgatgcctttttccttttcgtttttttccccaattttagcggaaaattcgaatattttctcgaaggtttctttctcctcataatgaataaatgtttgggtcatttgcactaattcgcctccatcccaaaagtgaacgattcggcatttttccatttcatttttggaaatttttgcgtccaaaattttgttccaaattttactaaagtaaatgcgaatggacaaccgaaattcggcctgttttgcaatttggcgatccgtagaaagaatcatggcgtattctgtggcatattcttcgtcaaaaattgtatctgaaaaagttaaaattaaatgaaaattaaaattaaatgaaaaataaaaaattataaatatttttagtttatttcttctcaccaatttgcaattcaattggcctcaaaacttctaatatgctcaaataaatgggtccaattaattcttttattttccatttcaattttttgagcaaaacgacactttgtttgtcctcttttatgcgcagaattcgaaattgataggaaaaattagtttcattttcaatttttgtgtcattgaaaaactttgaaaattccctgtaattaaatcaattaaactcaattaatccaatgtttcttgattgtttatttgaatttggttattctgtattaccataatttgtattggccaacttgtccaatttctggcgcttttcccacttcgtttttccggtccaataagaaaaggatggcattgaaatgcaattgtcgcaaatcgtttaaaaaaatatttgtcgcatttttctcatctgtcaatggcacattttggaaaacattttctgcaattttatggcaatcaatttcatttatatcaatctttttgtacaacttgataaaccgttccatttcatcgttttgcatcattttattttccactgaaaaaagaaacaaaaattatgtaattttttaaaattattttttgcttttttatcactagggctaatatttttaggttctaaaaacccccaaaataggcactaaaaatgtaaaataggcactaaaaagtctcaaatttaggggtgtaaaatgacaaatttattcaaaaagctacaaaactaagccaaatcaatattgagataaataatttttaaaatcaaaattttttgtcaaataaaaaaattagattttggcgatcaattttttgagaaaatttttcatttctttgggatgtatttttgaaaatcttagggtcattctaagttgtgtattgttcgtttttattgcattttcctaataattttgggcaaatgccaaaatagttttttttcaaaattttttaggccttttaggctctaaaaataacctataaaattggctctaataactcgaaaagtagcataacacaaccccgcaacaaaaaaaaaacaaacaactttttttcgtgcgttttttatcacaaaccaaaaaatttgcccaaaccgcgccaaaactgccacagaatgcaagtttcatactgggaaattttgctaaaagatgaaattgcgctgaagagttcttcaaaggccttctgttctttttctataattttttgctcattttctgttactttaattgaagtcattatatttttgatatttgcatataaaatacaaaattccaaatttgttttcaaatttttgtccaattgttcatcaattaacattctttccatgctttcagacggcaaatttagcaattttgagtacagatcgtcaaaatgctcaaaaacatcttctaaatatggtgacaaattattgttatttttgaagatcggcaaaaaaagcgatttaagcaaataaaacagtcaaaaatgccaaaaaaaagtgtcaaaaggtgctacagaatgagaatgaattgcgatcctgttcagataaacgtttatcaaaagtacaaaagattccctatcatttcgtcactgagacataatttttaaaaatattgactaattcaataattaattagtttaaaattctctaaaaattattcctgagtaatagtacttactaccggtggttgccccttttttcgaaattttttttgaggttttaaaaaatcgaaaaatgagtttataaggttttcaaggtcgctgataacgaatttgagtgttgtcctaaatcatattgctctgagatatcgatggggattttctgctgctgctttctgttctaattcttcaaaaaattgatgtaaattgttgtcttgatcaacatagagagatttacgcttaagacctttccctctaatgccatttgctggcgctttttcatactcagcaacgaaatattacaatcgctgaaattctttaagcatcccttttaacatatgttttgatgtgatccctaaaagctctgtt

SEQ ID NO: 316 - DNA, 2888 bp, Heterodera glycines
agaaagcaaatggcaattatataaaaattataaacaaaaaaattttcaacatttaactaatattttttaaaaattatgtctcagtgacgaaacgatcagtgacgaagtgatcggccaccgtacaaaattcccaagttttttttttgcattttcttaagaattttaaaacctattcacgaaaaagaatagatgctgcataatttaaggtacaaaaaataaaacaaaactattctaagaaatagattttcaatcttctctaatcatgaattaattttacgaaaaaaggataaaactaatgcggacagaagtcacagatgaataatgccgaaaatttaccaaattccacagggcgcacatttttcagaagcagaataatattaataataataaagtaaaagttgcacaatcgcatttagaatcagtttatatgctgaaaaatttgagaacggaaaaatatcaaatttaaaatgcatttagtgaataattataaataattataattaaattaaattaaatcaaatgaatgaaatggctttttgaatgaatttattaatcctttgctttattggcatatcatattgtaaataactcaactgcgatttttgtttcacataattttggatttcctttcaatcgaaggcatttaatatgaaaaaatgtaaataaaaacctagcaaattaataatgccggcggatgctttcaccttccggcctaacaaataagctgccctaattatcgattcgattgaaatgccaatttattttttgtatttcttagtttgatttggctgatgaaattgcattttattttgaatcactttttattcatttgtaattcctcacattttgttgttttatgtttatttcttcgactgaaggcattcgcgcgtttcgcctgggaaatgcccggacaaattcagaattcccgcgtcgaacattttttccgctttgtctgagtccgttaggcgagaaatgaactcatcgccgatttcgatgtcaatgcggcgaaggcactcctaaagcaattttatttaaaattaattaattaattgctaaatcgttttaaattaattaaattaaaatcacaaaaaaaagaattggactttcgcttcgtcctcgcaattgtggtaaatgctcagtctcaggtcgatgtcgctcacttccgtttccgaaccgttcacctcaaatttgccctcctcatctgtctccgtttcgcccatcaaatcgtcggggtcaactttaaaaaggaacaaaaagcattttttatttctttcttagtttggcaatgcgtgtttccgctgctgatcacaaatcggctgatcactttgctgatcacttacgcgtgtctttgtcccacagtttcactttggcccctttgtatggctttcctccgcacaataatttgcccttggccgccccgttttgcttcgtcccgccaaagtcaatgccaaaaacacaaagtgaaaaagcggcgattaacaacaaaaacagtttatttgcaaacatttgtcttaatgagaataaagaaaattttaaaaaattaataatttctttaattttgcaattttactaaaataaacaaatgaaaaatctctcataaaaaattaaactaatgagggcattctcaaaacacatgtttcttttattcattttaataaattaattcaagtgcctttttctttgatttatttgaaggacacaattaaataataattcaatcaattaatgtggcgatggatgcgcgggaggaggaaaatggaaaataagaatgataggggaagaatggttgttgttgttctaaacgaatgacggaacaggtttaacttttgaacaatggaaaaatataagagaattcaagggactgatgagtgtccgtttttgaataatttaaaaaaactgaaatagaaaaaagttcttcagaaactttttgggaaaattttcgaccatgtttcaaaaaagagtctgtagcgggccggagagtaccgaaacccggcagtgtttgatggagaaagagcacaccttcagactctggcgattttagtgagctatcttgggtctttatagcttgggcctgaattgccttatacgtgacagatgaattcgaaaaattcgacagtttttcgccctgcatgtcggaatccggctctgagatacgcagggattatggcggattcgggaaagctaacataatagcaattctttgctatatgtttaaagactatctaggttaaaattccggactcgagttctgtatttggcatttttgtaccgaaacacccaatttttttgcaactttggtgtcgttctcgctccgcgagtgcggcagtgtttgggtccggctcaagtgaatgccatcgaatgttttgcacgatgaggagtggcgcttgttgtgttaaaattgcttatttttgtgccaaatctcttaacaaatggcataaaactttcaaaaatcatccggcggcgcctgtcgacatcgcctaccaaaattaatttatcattagggcggagaattatattgatataaaatcgcaaaatatggccataaatatggaccaaaagtcgcgaaatatggacataaaatggcaaaaataaggacataaatttttccaaattgagggtataatttcccaaaatttcttcaaattcgctatacgcgaagtaaagctttcaaaaatggctacatattgtattaaaaatcattttagaagaaaaaaaacacgataaaactaaaatttactaatttttagcgcataatcaaccgcaaaagcgaaattttcgcttttttgcttatttttgacataaatttattaatttctaagaaaatttaaatttattcaatattctcgagaaaatttggcgaaaaaatgatttttttttaaattttccgg

SEQ ID NO: 317 - DNA, 1069 bp, Heterodera glycines
  unsure (1)..(1069): unsure at all n locations
ttctgctcctggcaattttcactgtgacgaaacaaaagcatccaccgaatcgaatcgaaaggattgctaaagcactgaatggtgtaaaagttgaaatttcctttgacgcaacaattaattttggccaaaatgggccatcaaattctgacggagtcaaacacgacgaataaaacccaagcagcagcgccgacgacgggatgttcattgaatggggtggaccttcaggcggaggattccaaaggatgtgtgccgaatggcccgacttggcccccatttattgctacggcaaaatcattgagatgccgagcaatttggtcccaattaatcataatggcatcaaaattcattaattcattacgatgttgagagcgaattaaggcggacgcatttattacgacaaacgctcacagccgtccttcttcacattgtctgacaaacaaacccttgctaattgcatttcctaattattacttccccactttagcatggtctacgattatttcttggccacaaatgacaccaaatttctccacgaagtgttgccagtgcttgaaaaggtcagtgcaataactaatcaacgccataattacttcctgataagccaaatccgaattttccttaaggaacttggccatggagcaaaaatcggtcggttgaagtcgaagttggcggaaagcagcgtacattttaccaacgtatggtacgacttgaacattaaaagtggaaagcttcacgaggagtactacggtagtaatggaaaaacccaagggcttcgtaacttgattaatgatacaaaaaacctttccgatcaaaaaatttaaataaaaatcatttacaaaaagcgaggataacatggatagagagtagttcatccatcaataacaacaacccaataaaagaatatacaaagtgcggaaaaagttgtgcaactcgcttttccatggagaatcccagttcaaaataaaaagaaaaccacataggtaancttgataatttcattcaaaaggaacttatttcaaatgttcaattagcctcccatgggctgaggatacattcgtccaaacgcttc

SEQ ID NO: 318 - DNA, 2907 bp, Heterodera glycines
  unsure (1)..(2907): unsure at all n locations
caatggaaaagcgacttgcaaacttttgccgcacactctgtaggaaaataggaataaagtgatcaccactgatcaatcttgatttatcatcacaggctttcggtttcggttacggtaacagtgtgaccatgaaatacgagacgctttcgctcaattcattttgcatttataacacaaaattaaaaagaaattgaattgggcgaaaacgaattgattgagcagaactccattagaggttggaaaatagtgttggacgcttcgtaaaagtgccacaattggtcgaccataatgtccgacccagcagaaatttaaattcttggtatcattcgaaaagttctctaggagccttggaactacaagaaactttccttaatttcaacaaaaaccaaattgggtccaacatggagttgacctggattttctggacaaaaatccaggttgccgaaaaaatatctcgatgtcaagttcggactttatgcccatttggcggatttacgaaccgtccctggcaccctgcgtcgccctcacacaattgggaggaatggcgaattcaaaaatcccaaaaatttgtttcggtatttcttccacttttgctcgtccgtttcttcttccatttcgaccttctccttctccgcattttccttcgtatttttgaacattaagctcattttcacctcaaaaagtttccgaattttcacttccgaatttttctgaaaattattttgaaaatatttcaactgtttttcgttcagcaaaattggcttcgtttccaattgggaaaagcctttcaatttgtaactttcagtccgtttgaaattctcgtcaaaataaaacattgaaatgcgaattaaatgttcgatttcgtcaagcacgggttccagcaattcgtcgtattgaaattttggcttaaccgcgggcatttgttgacttacggttttgtcactggctgttcaattttaaaaaagaaaaataatttttttctataaataaatatatatatatatatatatatatatatatatagtgatcattagggagtccaaaaatatgaatataaaatcgcgaaatatggccaaaaatatggacataaaatggcaaaaattgcgaaaatggacataaatggcaaaaatgtcaaaatatggacataaatttttcaaaattgagtgcaaaatttcttcaaatttgttggttgaaattgcatatgagatacatttccaaattttttgactcggtaaggcgctttgacaaagacggctttcgttttgcaattagtcggtcaacattcggaaattggtctcgaattttttcggcaattacgtgcaatcattttaaaagaaaaaaaaacataaaagctaaaatttattaatttttttagcgcaaaatcaacaacaaaagcgaaattttcgcttttttgcttatttttgacataaatttattaatttttaagaaaatttaaatttattcaatattctcgagaaattttggcgaaaaaatgatttttttgaaaaatttttcgggttgtgggctcaaaaaggctaatttagctgctggggccgttctaatagatgtttttttgacaaatgccaaaatatggacatacaatatggaccaaaatgccaaaatatgcaaaatatggatatataaatccttcctacaagcttcaaaccaagctaaaaacatgtttttcgtgcgtttcaggccctcaacagtccaggaaaaaaatatggatttccatataattggactccctagtgatcattattgatttaatctcactgctggtgagaaaatacggtagaggaaaatgcatgagagatcgaaagagagttttactatagtaaaattttctgaaaacttttaattgttaattggtttgtgaaggaacctacctgatttccaattacagtatacaattttcatatgaatttttctattcatcaaataacggaattaatgacttcagaatcagtacaaattatcaccctttatactaggactgagactccgaggtcagaattgggaaaagtcggagttggggtttgacggggtcagcaagtttggggccggggccggggttgaccaaattagtcggtaccggtgcttagagagtattttttctttgtcccataaagccaaactttcccccacgtatttatgtacatggagaaatagaaaaattgaaatgctcgtttgcattttttaacccatttacatcaattttttaatcaaaatattttttgttgagaaaaaattccgaaaatttaattgtatgcgtgcaaaaagcaaattttgtgatttcctattttgatttttctaattaaaagttcagttattcatttcaaagctgttataatttttccacattttcattaaagaaattttaaatatatttcctaataaaaatgttagaagttgtcaacggcaatagaacaaatggccaaaaaactaatattttttattaaatcagaacattgttggcatataatttatttttcggcacttccttccctcccgttaccttcgacgtacactctgaacagatattcgtacacaatgtccaaatgtcggcggaatgtttggcactttgcccggtcctccccctgcacttcctccacaacattggcacagttccaattttgccacaataaatggaccgcgcttagccgtgccgcaaatttttgtgccaaatgttcccgtaattggtcaaatgtcaaatttttcaattcacttctgtactgcaccatttttttcttgatgctttcgtccgttttctcgtaaaatttgtcaaagtttggccgacccttcacaaaggcaaggaatgcttcttcttcaaaccaacacaactgctccactctctcctaaaaaattatttatttatttttatgatttcaacgannatgacctgca

SEQ ID NO: 319 - DNA, 2210 bp, Heterodera glycines
  unsure (1)..(2210): unsure at all n locations
agccctttagtttctatctagttgtgggtaattttccgattaaggaaaaaaagtaagccgaaattcacttttcgcagctctgagacagatagcctagagcttcagccgcaaaagtcggctaaccgctgaaacatcttagaatttaaatagataaaaaatctcctataattcatacttttcaatttttaaaaccggcttttcaagctttacccaaaaatctgagaaaataatgacaaattcattaaaaaaaaattgagatatattaaaacgtttgattgttactttcgcaatgcttatctcctttattttattgactattttaaaaagattgctaatatccgaatataaaaatagcaacttttttaattttaagctatccaattaaactgcgcatttcttttaaattcattgcttttgctttaaactttatgatcatacatatatattacaaatggcataacagtcaaaaaataaatacggataaatataatcggcacttttttaaatacattggctgcttgctttaaattgtccattaattcgttggcattatttccatcgttttgtgccattccactgttttgcccagcactaaattcgtccactcgctgctgctgtttgctgctcagatcagcgacacgtgttcgtcgctgatcgaaaaaatgcgctggccggggaaaggcagagaatggtgcgtgaactgcggagtgagtatatgccgctgcacgggcccattttggatgagttggcggaggatgcgcaaggactcggcgttggtcgacggtgttttgtagagcagcgagtcgaacttggcggacgggtcggggccggcaaattggagcagtacggcacggagaagagaggaggcgaccgactgaaccaattgaacatatgttttagcagagaaaaaagggaaaattgggcaaatgtgcgtatgaactaattagctaattataggtaatgatattgcctaaggcagtaatgcatcattagctattaaggcactttagaggcattattagcacaacaattagataagaaaattgttgaaatttcacacactgaccgatctttcggcattgaacagactgatgccaatccttcggctcatcagatgccgtgcctgacacatgccgataacttcgcccgtctctttggatatggcaacctttgaaggaatttggcattgaaatgatagagagaatttggcatcaatgatggcacaccttcgccacagattcgggaagtcgcagtgcctctcgcaaatacatcgaccggtcgatgcccgccgtctgttgaacgtcgaaattcaacagtgtctggaagggcacttcttgccaatccttcagcaccacactcgagtcgttgtccagccgctcgggtcgcacgtcggcacttttggcgagcagtgaccacagctgccagtccaagaaatggcacatgccgtactcctccgcgtatttggcccacatttcagcaactaaagcgggttctctcaacggaatacaagcaaaaccaaatttgtcgaaatgtaatttttcttaaggagaaaataatagtacgatatgttttcctatttttgactaattatgctcaatctcgagttgaaatgagcggaaaaaaaaccccgagagaagagttttctcaagtcgagacagagagtctcgagcatttgactgtatcagaaaaatttaatacactttaaaatatttgtgaccaaaatatcgaagaaaaacaaaaatctatcgcaatcttaattttttcgatgaagcgccaatcggcaccgccgggcccaaaaattcataaatcttaaacccgagagttttctcgagtcgagaccgagagtctcaagcattgccaattaaaaaataatgcgctgcttccccacctccgtaaccgaaaatgtgtctatccccagccatttccatggctcgtcgagtgagcgcacggcccaattggtgtccccggtagcgttccttcacgtaatacatgctccaatgtgcaatttttgggtacaccgccatgcttgtggacgccatcggcaatcggtcttcgtccagggcgaagaacatgccgaaattgttgngcccaaacgcttttcgccacatggcgtagtcataggcgggagtgtcccagccgaaccgatcgacgatctgatcaaaaatgaaccnaactcagtggactgatncatgctttattttgccacctct

SEQ ID NO: 320 - DNA, 4683 bp, Heterodera glycines
atttaaaatcataaaaaattaaataatatgctattttttgaaatattttaattaaataatatgctattttttggaatattttaattaaataatattttatttttaataagcaattaatgcaatttgtgatgccggcgagtgaaaggaatcttgagaattcgaattttttgttaattgtttatcaagaaacaattaatttcttttatcaaaaattaacataaaataaaaccaacggaagactgtcaaattggaaatgtcttcaaaaaaaacaatttttgtttgacaaacttttaaattgtaataaatattatatgctaaaatggcaaattcaaattaaattaaaagaatctttctgctatattttcaacaattgctgaatcgctttaaattctaattaaattaaataggaaaagggcttttcctcatattatttacaaacgcccaccgccaagctttttgctaattttttaaaatatgtgtaattttttatttttgccgaatttcaattttaaggaaagttaattttgatgagacaattatgaatttgatgtttaattatttaaacagaataaaacaacataaaatacttgcgaattttgaaggttaaaaattaaaatatgtaaataaaaaagcatcctaaaagcatcaaaccaaactgaaaatactatttcgtatttttaggccgaaataagtatacaaaaaatatggaaatcaatccatacaaatccgggcctttctgataacatatttaattcagcagaagaattacttaaataaaaaaagacgtgaaatatagccaaaagaaagagagcatttgttttataagtttaagcttggtaagtaaagtaaacaaaatttcacttttaaccctaaaaaatcaaaaacaatttaaataatatattttttttacgttcgaaattaattactgttgaaaccgacatcttcgaaatctaacatcagatatgtataaaacttattaattttaaaatttgctcaataaaatttgtctccattttgtcgacccatttttcgcatttattttatcaatttgcactagggttcgagccccgtgggcgggggtgaattttcgcgggggcggggttggcgggggtcagagtcgcggatgcgggggcacgataattccgccccgcggggacgggggtatgccatgaattagctcccaaaaaaaaattcttgcaaaaaataagaattttaaataatgtgtttttcataattatttggtttggtcctcataattatcgttttcctcttcgtccaaatcatttgatgggcctcgattcaaaaccttttggcataaattgcattgtactactttcgttgactgtgaaatttttcaaaacaattccaaactttagaagcacaagcgtccatttttgcctgattcgaagaaaaaaatagttgtgattgaaaaatgtgttaaaataaaaaattggaaagcattttaattttgtggcataatgtaatttcaaatttagattaaaatttttgtatcatcagccaactaactatgcatcactctctcggaaaaccaatctttaggggtgtattttcacccccgcgggggcgaaggtcacgggggcgggctgaaccctaatttgcacttgtgattttggccaataaatgaaatatttaaaaaaataaaaaaacaaggtttatctgtagaatgaacttttatcgaaagaaattatacatgagaattgcatttatatgaaagtgcaactttttgttttgaaaggtcctcggcgcgcccaattaaaaatttgggctatttaaatgccccgggagggactgattagccagtcgaagcaatcacaaagccaaaattcacaacaatgagcatcattcgacgacaattcttcgccaccaaactgttctctccccaattggctagcaacaaaatgggtaaaaatgaaaatatttaagggaattaattaaagataattaaaacaaaagcatttaaggaaattaattaaaataattatttaaaaaaaacatttaaggaaattaattaaagataattaattttcatttttggtccaattttaattatttctatccgtcccttcccaagctgtgctcccagtgcgccattgcgtaagcgtcgccacgccaacacaaaatgatgtgccatacaatccgtcgcccaccaccgcgcaaactttggacaccttaggcattggcacgacggtgcagccaccggagccaaaatggcaaaaggccggactccgaattgagctaaactgtgccgacgagcaaatcttccagagcattgtccaagaggtggcaaaataaagcattgatcagtccaactgagttggttcatttttgatcagatcgtcgatcggttcggctgggacaactccgcctatgactacgccatgtggcgaaaagcgtttgggcccaacaatttcggcatgttcttcgccctggacgaagaccgagtgccgatggcgtccacaagcatggcggtgtacccaaaaattgcacattggagcatgtattacgtgaaggaacgctaccggggacaccaattgggccgtgcgctcactcgacgagccatggaaatggctggggacagactcattttcggttacggaggtggggaagcagcgcattattttttaattggcaatgcttgagactctcggtctcgactcgagaaaactctcgggtttaagatttatgaatttttgggcccggcggtgccgattggcgcttcatcgaaaaaattaagatttttgcgatagatttttgtttttcttcgatattttgtcacaaatatttttaaagtatattaaatttttatgatttagtcaaatgctcgagactctctgtctcgacttgagaaaactcttctctcggggcttttttccgctcattacgcctcaaaacaataaaatgatgattgagcataattagtcaaaaataggaaaacatatcgtactattattttctccttaaaaaaaattacatttcgacaaatttggttttgcttgtattccgttgagagaacccgctttagttgctgaaatgtgggccaaatacgcggaggagtacggcatgtgccatttcttggactggcagctgtggtcactgcttgccaaaagtgccgacgtgcgacccgagcggctggacaacgactcgagtgtggtgctgaaggattggcaagaagtgcccttccagacactgttgaatttcgacgttcaacagacggcgggcatcgaccggtcgatgtatttgcgagaggcactgcgacgtggcgaaggtgtgccatcattgatgccaaattctctctatcatttcaatgccaaattccttcaaaggttgccatatccaaagagacgggcgaagttatcggcatgtgtcaggcacggcatctgatgagccgaaggattggcatcagtctgttcaatgccgaaagatcggtcagtgtgtgaaatttcaacaattttcttatctaattgttgtgctaataatgcctctaaagtgccttaatagctaatgatgcattactgccttaggcaatatcattacctataattagctaattagttcatacgcacatttgcccaattttcccttttttctctgctaaaacatatgttcaattggttcagtcggtcgcctcctctcttctccgtgccgtactgctccaatttgccggccccgacccgtccgccaagttcgactcgctgctctacaaaacaccgtcgaccaacgccgagtcctgcgcatcctccgccaactcatccaaaatgggcccgtgcagcggcatatactcactccgcagttcacgcgccattctctgcctttccccggccagcgcattttttcgatcagcgacgaacacgtgtcgctgatctgagcagcaagcagcagcagcgagtggacgaatttagtgctgggcaaaacagtggaatggcacaaaacgatggaaataatgccaacgaattaatggacaatttaaagctagcagccaatgtatttaaaaaagtgccgattatatttatccgtatttattttttgactgttatgccattgtatatatatgtatgatcataaagtttaaagcaaaagcaatgaatttaaaagaaatgcgcagtttaattggatagcttaaaattaaaaaagttgctatttttatattcggatattagcaatctttttaaaatagtcaaaaaaataaaggagataagcattgcgaaagtaacaatcaaacgttttaatatatctcaattttttttttaatgaatttgtcattattttctcagatttttgggtaaagcttgaaaagccggttttaaaaattgaaaagtatgaattataggagattttttatctatttaaattctaagatgtttcagcggttagccgacttttgccgaccgacttttgcggctgaagctctaggctatctgtctcagagctgcgaaaagtgaatttcggcttactttttttccttaatcggaaaattacccacaactagatagaaactaaagggcttagattttgaccaggcctacctcacaataacattaaaaacaaagaatataaaaatgtatttttatatctttttcccaaaattatccaaaatttttgttccaaaaataaagagcaaaattaaaataattaggtactcatttatgtaccaagacaacataa

SEQ ID NO: 321 - DNA, 6710 bp, Heterodera glycines
  unsure (1)..(6710): unsure at all n locations
ttgtttttcttcgatattttgtcacaaatatttttacagtatattaaatttttatgatttagtcaaatgctcgagactctctgtctcgacttgagaaaactcttctctcggggcttttttccgctcattacgcctcaaaacaataaaatgatgattgagcataattagtcaaaaataggaaaacatatcgtactattattttctccttaaaaaaaattacatttcgacaaatttggttttgcttgtattccgttgagagaacccgctttagttgctgaaatgtgggccaaatacgcggaggagtacggcatgtgccatttcttggactggcagctgtggtcactgcttgccaaaagtgccgacgtgcgacccgagcggctggacaacgattcgagtgtggtgctgaaggattggcaagaagtgcccttccagaaactgttgaatttcgacgttcaacagacggcgggcatcgaccggtcgatgtatttgcgagaggcactgcgacttcccgaatctgtggcgaaggtgtgccatcattgatgccaaattctctctatcatttcaatgccaaattccttcaaaggttgtcatatccaaagagacgggcgaagttatcggcatgtgtcaggcacggcatctgatgcgccgaaggattggcatcagtctgttctatgccgaaagatcggtcagtgtgtgaaatttcaacaattttcattatctaattgttgtgctaataatgcctcgaaagtgccttaatagctaatgatgcattactgccttaggcaatagcattacctataattagctaattagttcatacgcacatttgcccaattttcccttttttctctgctaaaacatatgttcaattggttcagtcggtcgcctcctctcttctccgtgccgtactgctccaatttgccggccccgacccgtccgccaagttcgactcgctgctctacaaaacaccgtcgaccaacgccgagtccttgcgcatcctccgccaactcatccaaaatgggcccgtgcagcggcatatactcactccgcagttcacgcaccattctctgcctttccccggccagcgcattttttcgatcagcgacgaacacgtgtcgctgatctgagcagcaagcagcagcagcagcagcgagtggacgaatttagtgctgggcaaaacagtggaatggcacaaaacgatggaaataatgccaacgaattaatggacaatttaaagctagcagccaatgtatttaaaaaagtgccgattatatttatccgtatttattttttgactgttatgccattgtatatatatgtatgatcataaagtttaaagcaaaagcaatgaatttaaaagaaatgcgcagtttaattggatagcttaaaattaaaaaagttgctatttttatattcggatattagcaatctttttaaaatagtcaataaaataaaggagataagcattgcgaaagtaacaatcaaacgttttaatatatctcaatttttttttaatgaatttgtcattattttctcagatttttgggtaaagcttgaaaagccggttttaaaaattgaaaagtatgaattataggagattttttatctatttaaattctaagatgtttcagcggttagccgacttttgcggctgaagctctaggctatctgtctcagagctgcgaaaagtgaatttcggcttactttttttccttaatcggaaaattacccacaactagatagaaactaaagggcttagattttgaccaggcctacctcacaataacattaaaaacaaacaaaaaatataaaaatgtatttttatatctttttcccaaaattatccaaaatttttgttccaaaaataaagagcaaaattaaaataattaggtactcatttatgtaccaatgacaacataattcttaaaaattcaggaatttataaaccaatgcattgcacaagttgatctcagatcactccttaagggtgttatgaagtgactaaaatttttggcaccaagtgcaattggaagacgaatttttttggaaaaactttataattttttcatattttcattcgccttatgtaaacattcaaataggatctacctttattaaatttgaattttggaactatcaaattttattgagaaatgcagtcgtctttcttttctttttttcgacagttaagccacaaatgtcggtccgcaaatctcgcactacggattcagcaattttagtttaaaacaatggtagcttgggtcaaactacaaagatcactgttgaaattcgaattatttcgagttgtaatgcatggttagtttgtccctctctctgctgatttgtgagtcacaatgtccgactgacaattggcaaactgcgctgctgctgttgttgttgttgttgatcagctgctgcttgtccttgttggcctcttcgacgtgtcaagttcgatgccgaagcaccaacgaaaacaacgttagaaacggcattttgctgtttggcgagccaaggaaaggctttttggaagcaatgacgatattcagcgctgaactttttaaaattttgggaattggcaagtaaaaatgaggtttttggcgaaagtcgaatcctcccccgcccccgctttcgttttggataacgttacgactagagctcgacattttgaaaaatggcctggacctgaacatggatttcctggacaaaaatccagaaaaatcaaggctcttctagacctctggatccaagcctggccctggattttttgaaatttgttttaaaagcaaacaaatgggaacatttaaaaatatataggtaatttacaataataatctgtttttaaatctatttaatcattttttgaaaacttgaaaaaaaacatcagtcatttgaaataataaattctaaaattttgtccaggaaatccaggttttttcgtgttttgcctggacctggatttttttttcacattagacctggacctggattttctggacaaaaatccaggtccatgaaaaacccaggttgccgaaaaatgtcctggacctggacccaggaaaaattcaggcctgtatccaggtccaggtcgagctctaattatgaccaatcccgaatttcgctgtcatatttttttggtttaaattattacactcctgggcacattttcccacctgaacacatagagaacgggtgtattgctggccgatgcgacgagagtcatctgaacaagcccagcggcaaaactgatgctgtcctccggcgacagcttcaaaagtggcatataaaaggtgctcagtccgttcagagtccagccgaacatgacgaacacaatgatgacagtgagggacttgagaatgtgcatgttgctggtcgaagtgacttagccattaaggaatgaaacaattaataatcaattattatttaatcaattatttaattagttttatttaagaataaatattatttagacaattaacaataattatttaaacaattaattaataaaaatttttattgaagccataaaaattatcatttgggtgatagaaatttcaaaaaaatttcatatcctaatatttcattaaatcaatttaacggtgatggtgattttttcgttagctgcaatgtagaacataaaaggtaactcgcccggtgggaatcgaacccacgaccccagcaatccgtgccgtgctctaaccaactgagctacgggcgttccttttagaggttctctcaggtcctttgtcccactttctcccacactccgttccttctggcatcacagcaatcaaaattttaaggatttcacctaaatttctgttttttaacgaatcaaaatgccatcatcggcgggttgtagttttttaagaaatagaagccgttcaatagtttgacctccaatcggcggaattgatgatgatttaaacaaattcccggacaaaatttaggacatttaagactaattaatcaccccattggctgttggaggtctggtagaattatttattgaaaagatgagggtattgtttttggagcgattgaatttgatgaacaattttgtcagttggtggtaatgaacttaatgcttctggcgttttcggacacgcgcttcatattcctccttgagttgttccttggtcagtgcagggcggacgaacagacgagccaggtttgttgagatcggagtcgagcacgctcacgcttccagcctccgagtgccatgtgtcggtgtaggcatgaccaccttgagcgggcgcggtgttgtgcgctgagggtcgtagcggccgaggcgaaaaacggcggttggctcagcctcaacatcaagatggtccagaattttggtggccactttcctatcctcctgtacacgttccgatggaagagcagcagcgctttccggaaggccaaggaaaaccagtgtgcggtgtcgttcttgttctgtgagtgcaacagtgtttgggtccaggtcctgtgcaggtgccattgaacgtttggcgcgaggcggagtgatgtttgttgcgtttgttcgcttcatgtcgaattagaaaataatattttttgcgatcttaatcggactatcacttaattggacaatttcttgtcgattaaaatttcggtgaagcaaaaccaaatggatttggattcaggaaacgcacccattcagagttttttgaaatcgtggttttttcgggatatattatcaaacaatacccgggttaggatatggaggatggaagcaaaaataacaaagacaagattccgtgttcaattttcgcataaaatatttctaaaaattcgtcattcttggctaattaaaaaaacagaagcctggttccattctcgacatagaatatttttaaaactgcgttatccctggctaattaaaaataaacaaattcccattttaaagaaggcgatgtaggaaataaaattttaattaataattagggctaggatctttgcggatagcatttgatgagagaagcacgaaaatcatcacattttctccaacaattttttgaattataatttttagtagcaacagtgttaactattttgggctttttgttaattgccaactcttttggcttgtgaaattttttaaaaactatttttcaactattcttgtttgagaacaaaaaattttctgatgaaaaatgtatttaaaaaataaaaattcaacctgcgaaccggcctaaaaatctttcaaaaaatacatccccctaagaattgatatcctggccatgatttggcggacaatcgaaaactttttcgcttgaaaatcttgaaattatgtttcatttacaattgtgcaaccgaaatggaaaaagaataaggcaattttggaaacatcacacatttgttggcatttttttcacgttttttggcatttttcagtttttagcaactatttagtcacatatttctcgatttttaggacctaaaaatcctcctttaataaagaatttttatataaatatttttatcttaaagcaagtaggtatatgcatttttgtacattccgatcacttttttcattcatatttttgcctttgttcaataaattgtgctgtgaattcggataaccggtgttgttgtactccttgcctcccatttggcgatgattttccatggccacaatttgttcagcgcttcacgatactcgagacttaaaaagcacaaatttttattaaaaaacaatgactttcactaatttataagtgtaattctgttttctagttgtttttttcatttatccaaaacatttttttctcgccgcttcaaattcttataaatttgttcaccccaaaattttttttattaacccaataatgtgatgaatctgttaaatttggtattttaagaataaatttttttaaaaaaccatgaagtacaataatcatgtatgtgcaattggaatatttttaaattttaaatgacatacatgaaattttttttaaaactttaaatttaaggcaattaaatttctataaataaaataaaaacagaacgccaaaagaacaaatacaaacaataaaaagtagacattttattttacccttgattttatgaaatttttttagcttataactttttcaataatagaccaaataaaaccattttatgctcattttgaagggtaaattctgaagaatatttcttaattagtcaaaagtttaaaaaaattgtttattgacaaaaaaatgaaccattattttatatgttagagacatggaaatagtgcgtcaaaatgagagaaaaagaaaaaactttgccctgggaaaaaattttttcctgtgggtaactttttttgaaattttgcataggcccatattttgaccccctctatcgaatcacagtttattttttagctgtctagtttttaactcgagatcggctcttctaattttacaagggaaaatccccaaaaaatttcaagttttgcaaagttttggcgttctgattactaaataaataataaacttgataatatttattcaaaaataaaaataaccaaaagaaggacatgtgccacttacacttttggcggaaatgaggtgaaatggaaagtagttataaaagataattgaaattttgaatggaaaagcagaaattagaaaagtcagacctccaacaaagggaaaattgttgttttttangggttgtagaagaggaaaaaaatttattatttttttttgagtaaaattttt

SEQ ID NO: 322 - DNA, 3278 bp, Heterodera glycines
gagagagagacacagagagagagagagagagacagagagagagagagagagagagacaaagggactgagagagagacggggagagagagagagagagacaaagagactgagagagagagacagagagagagagagagacaaagttagcacacgttgccgttttgacaattaattggtgacacaagaacaaatatctaaattgaaattttgagtggagaagcagaagtagaaagtcagacctccaacaaagggaattggttttttttatataagggttggagaaaaaatttttgaggaaaatttttaagaaagtttgaactaggtagtttagtaatttttaattttatttgaagaaattgttggaggtctggttgaactatttattgaaaagatgagggtattgttttttgagcgattgaatttggtgaacaattttgtcggttggtggcaatgaaattaatgtttcataacagacgaggattgttttatcgaaaacttccggcggttgggaaatatcgtcgctggcctccttctggttaggtccatcttcgacaacgggagtcggggcatttgtctgtgagcttgccggtgccattggagttggtgtcagttgacgttttcggacgcgctcttcgtatttcttcttgagctgttctttggtcagcgcagggcggacgaacagacgggccatgttctgttgagaaggagtcgagcacgctcgtgcttccatcccccgagtgccacgtgttgatgtgtagctgttggcatgaccaccttgagcggacgaggtgttgttcgctgggggtcgaaccgtccgagtcgaaagacggcggttggttcggcctcaacttcaagatggtccaagattttggtggtggcttccctgtcttcctgaacgcgctccgatgggcgaacggcattgctttccgggagaccaatgaagaccaatgtgcgttggcgttcttgctctgcgagtgcgacagtgtttgggtccaggtccagtgggggtgccatcgaacgttttgcgcgaggcggagtgatgtttgatgcgttggttcgcttcatgtcgaataattagcaagaaataaagagagagggggagagagagagaggggagagagagagaaagagagagagggggaaagtgagagaaagagagagagggggaaagaaagagaaagagagagagggggagagagagagaggggagagagaaagagagaggagatatattcattccgccgttgctaatagcacgacagacacaaacatactcagaagaacgacaatttaggaagcgaatttgatgggctgcggttgggatgcgcgaaatttggtggcgggggaaggagaaggaagaggaggaggaagaggaggaggaggggatgtgtgaagtgaagttggaaattaattggaattgttaactcgttttggggatagggaagagggaggcagtgtgtctctaatttcatccttagcgacgaaaatttaaaattttatgattcatctgtttaaaataattttacgccaaattcataacctttgtgattttaagcctttttattagtcagcattgtttacatttaaatttctgtcagcccgcctatgtaaaattgccgtatttaaaccattgtaaaatcaccatttttttatcgttcaatcgttgaaatcgttcattaataaatatatttgttcgatcaaaattcactaataaagtgtgaaatataattgaagtattgggaaatccaataaaattaatttaatttaaataaaataaatatttaaattaattcttattgactatctgaaaagagagtcaatacagtgcgcggaagagagagttgagtaaaagtagcaaaagaaggggggaggggcaacgaataatttgatgggatttggcgaggacaaaaagacagtgacaaatttatgaggaatggccatagtttggctaatgacagagactgacgactgattgatggcttggctttgacctttttatgtgatcgggtttttgttcatttgtgcgtggatggactccacaaatacgcattgtgatctgatctgatcagcggtgttagctttataagtttatcccattagatgaattgtcatgcgttgacaaaaagcgtcgttctcttcagcagaaaatcaatttctgatcgaattcgcttttccttttcaatgccaattcatgcttcttattgtgcacaagtctttgagcattatcagcagccaaagaagtgactgacaacaaacatttggaaatatttggcgattgaatttgtcgctggtgcggtcgatcattcactgccgtcgctatcatcccaaaggggggggggggggtccgtcgttctgtagcgatgaatattcttcgcctccacagcccaatctgtcgactcatattcaatcattcattgtttgcctcccttttacacattttccccatgcattcattcgtccgtcctttttacccaccgaccattttttggtgatcccatccaaaaatgagaatgaacaatcattgaaagaggatgaatgggtcagggatataacttggctattgtagaaaaaaagtcgagagaagcgaaggactgttgctggggagaagggataaagcgcggcaaaagatgaaagtgggaggggggggggagagataatggcgaaaatgggggaggggcgaaggacgcggatggaaatgcccagcaaacaatcggcagattggacttctcaaacacacgtaaagcacttccaaggcatcgtttgttgttatgcaaatacataacggcgcgttgtttcgcggtttaaaatgcgattttcgagagggcggggggcaattctcatgcttttctcttcctcttttcttcccatcactttccatgagtgtttgttgtttttgttgtcccactcattcgtcgatgactcaacaaacgcagccctaaaagcattggatcggggaaatgcttaacggtctccctcctcgcccgaccatccatccgaaggggaatgcatgtgagctccatcatcgattctgaatttaagccttattaattcgctctaatattaaaaatggacgccaccaaatggcacacttttgtcaaccaagtggccggtgaatttcccattttctgtaattaccgaattcgccttcacggcaatgttaagccacgggcccaatcacaaaggcggcgatttgtggccaagacggaaatatttgggccaaatctgacaatttcaatgagatttcaccgccctttcccttttaatatcttttgattttt

SEQ ID NO: 323 - DNA, 1553 bp, Heterodera glycines
ctttgatgctatttattttttctaactctcttggcccacacccggttttttatctaaatttaatttatgagcccaatactttatttatttatttttttgcataattattttaactaaaccaaattaattacaggaccccttaagatgaacaaaataaacaaatcaatgaagaaggggaaaagtgctgcaataaggcctaataaacaaatcaattaacggaattttcccaatttttgattttaaaggaaaaaggaacgagggttataattaaataatatttattagttaaattattataaaaaggtttaattaattaattaattattattattttattattatttaaataataacaaataattttctttttaaatttactataaattttattctaaaaataataataaatattttattttaaactagcaaacaattaataattatttattttgaatctttttattaataattaattaaatttatttattgtgaattttctcatcaaatttttctatcaggtcaaattaattccaatacccataaaaagggctaaacaaacaatcaattatgaaaggaaaagagtgtgggaagggtgccccataaagaaaacaattaatggaatttttctaattaattaaaaatatttatcaaattgttattttctcaaacaataataataataaattttatttgaaattcacaaataaaaaattataaataaataattaattattataaaattaatttaaaaaattccatggaagggtgcccaataaaaaaagcaattaacgaaattttccttgattatttaattattaagcaacaacaataataatttttatttgaaattcacaaataaataaataaaatttatttttctcattaaaatttattattttttgtaacaattaattacctacatccttacttttgaataatattaaaacaataataatttttcttttaaattcataaataaataaataaataatttatttaagctcaaattaactccggtaccctttaagggggctaaataaaatcaatggaacgaattgggggactgtaaaataaaaattaataaactaaatttaatttaaaattgattaattaattattattctaaaattaataataaaatattcatttactcttataaataattaaaaaaatatttttttcttaataaaatttatttttaatacataatttagtttactgcctcctgtttaacttttgattttaaataaattatcaaaagggaagggagcccaataaacaaataattaacggaattttccaaactttaaagttaaaggaaatggtggaccaaataattaaaataatatttataaattaaattaagtaattaaaaagatttatcaaattattgttatttctgaaataataattatattttttattttaaatttacaaataaattatttatttttctcataaaatcttttttttataacagttttatttatctacatgattacttttgtacgattttattatatatatatattttgaaaaaatttctcattgtt

SEQ ID NO: 324 - DNA, 12624 bp, Heterodera glycines
aaactgtcccagtggtttgcatacggattggctgcgtgatctttgcattatggactcgctgaaggagcacaacgatggataccggtatattcttgtctgtattgatgttcttagtagacagatttatgtcgccgaagctgagtcgaagaagagtgagcatatgattgaagcgtttgaaaaagttttcaaaaaggcacaagtgctgcctaataaaatgtacagcgacagtggcctagaattccaagccaaacgaatgaatgagtactggctttcaaaagatatcattaaacatgtaatgtacagccctcatctacatgcaggtgttgtggagagagcaaatcgcacaattaaggaaagactttaccgttattttagcgaaaaaaacacacacagatgggtagacattattgataaaatagttaaaaacctgaacaattcagtgaaccgtacaacaggaatgcgtcctgttgatgtgaattttcgcaatgcaacagagctgagaaatcgtctatataaagacatggaacaacaaaagcgaatacaaaaattcaaaattggtgatatcgtaagaattaccaaagagaagggagacttctccaaaggatattttccaaattttactgacgaattattcaaaattgttcgggtaaacccgaccaatcctccgtcataccgaatcagtgatttagaaggtgaaaatataaaaggtattttttacgatcaggaactggtaaagactgttgctgctgaacagacaactcatcgagcagaaattttgaaatccagggtgcgaaacggtgttaagcaacattttgttcgttggataggttattcagaaaatcacaataagtggattaaggattcagatctcgttcgttaggcatggacgatttttatattgtactgccatcaaatgttccctttccgggaaatacggcatcccattttaccgtaagacttccacataccttagagctagactcaaactggtccgttgcgctttcctccatcatctatccacactcgttcccttccgtaggggtggatgaggacgactttgtcaacataaaacttctcaatcctgactataaaccagacggtacaggtccgactactgtaactctgaaggtaaaaattccaagcatacagtttcacagcgtagagcatatgcaaaaatcattgaacagcattattcaatcggcctatgatgtaaagtttccaaaagaaaaaagggtaaaaagagcggcggctgcttctgcagacaaagaattggaaccagaaacgcgaccagaaccggataaggaactgacacgtgaagtgccttcatctaaaacattggataaggaactgatacgtgaagcgcctttaccagcaacacatgacattgaactacaacgtggagatgagccaaaaccatcggagaaggaactaggacgggaaacagaaccagcgcaactttctgacaaacaattgggtgaattagaaggtgaaaaactgcaaaaggaacaactgccacccactcccattgttgatcatggtgaaatatctacgatagaccaagagcgcatggacttagccaaacgagtaacggaacaatcgtggaaagagaccgttaaattggctgctaatgcagccgatatcgcggaaaaggctaaaacagccctcaaccgagctgaacaagcccgcaaacgggcacctaatgctccacatgtaaagaaatggttcgacaggctatcaaatatggagaataatttgcgtgaacttgtggaaaagatttcacaagagtcgaaaaaggcggccgaagcaaaacggaaattagatgtacattatgattccaagaacttgaatgaatgccgtaaacatgcagatatgtcaaaacaagctcttaaaaactcgaaaaactacattgctcagcttacacccatgtattttagcacagtacctgaggatcagcttggcgtgaatgagcttgcaaatcgtgtagtgacggcagtgaacaattttttaaatgcagaattaacggttccaaggccggtcaaagaccctcagctctctgccgggcaaccgaaacagcagcaagaaaaacaaatggaaaagctgaagccaaccgtagaaaaggaagttggaagcataatcaagccaccagttccaaaactgtctgatgaaaaagaaacgaaacgcgaacctacaaagccaaccgtagaaaaagaaatggaacgagaaccagtaaaaccaccggaaaaggaattggagcgtgaaagcccaaaaaaagcggacaaagagctggaacatatggtaaaacaacagtccacgcaagaagacaatttgttagaaaaagcaaaaaaggaaatagaccaaacagcacagaatgcagccctaaaagctgaatatattcgcacactagttgccaactcaaaacataatagaggcgttgcagaaggtaggcttaacacatattcaggtgtccctcaattcaacgaatggcttgaccaaattgttgaattagataagaagatagacgaattggcaaaaaaggtaggaaatgaaccgtcaaaggtaataaacgctaagcaacaatttgataaaccttatcgaatgaaaaatttgacagaagcgcgaaagctaatcgaagctgcaaaaaatgcgtttgaagttatactaaactattcactggaaataaaacagttgaataataaaatgcatgaattaaatgacaaattcactgttgcagtcaaagagaaggaggaagaagaagccaaagaaggtgcggcgattaatatacaacaagaaaagaagctagaaaaggaaattcctcaagtcttaaaggaactggagcgggaaaaaagtcagcatgatattaacaccactgctgagaacacggaaaccgaatttccctcctccgaatatgaaattgacgacagctctgagaagcagccggaacgagcggaacaacaggcagaggtatcgtatgtattgaagaaaaaggaaggaaaattggaagaagaaaaaattgaaaccaaggatgataccgccattaatgaatttccatctacagaatatggaatagaagagagtgaaacggaggagacagagaaatggtcaccggatcaagccaaacaaaaaatattgaaaggaaaagaggagccgtttgagcagcccgatggccaaaaagatgaagagacaattttagttatcggtaccgataaaaaaggggaagaatttccatctaaccaatatgagattgaagataattattcatcgtcgtcatcatcatttattgcccaaaacgaaccatcggtaacgaccaaagatgaagaaggattgttaacggtccaaattaaaaaactaccaatgacaggggataatgagcaaaaaacaatacaaatggtaccatcagattttccttcatataatgacgatgatagcagagatactactgtcaatgaattgtcagaagaacagcatgcttctactgttcccgaagattcgaaatcggagccttatgatgtagatgagctcccagatctgcctgatcctcaagcgctttctgccaaggggagaggaggtgataaaaaaggagtaacttctgtgtctgacagggtgaaaatgctcatgggtcatcagaaacagcaaaggaaagcagtagaatttcttttcaatgagataactcaaagattttacattaacataggtagtggagtacaacatgttgatgcgagtagccatcttgcatatgtacttggatttgagaacactcgactgtactataatcatccggccaaatacttaccagatctgtcgggtggtgtaaggcaattgtatgtttatgcaccaaagttggtggaagatacaattattggagaccgtatggctccattgttgcgcgttgtcaacgtgtcaggcacagttcctctggacgtgccagaggttatatataccaatgagttttttaaaccgatacagaacaaacgaatttccgaaatcaaaatcgaaattcaaacagcgtttggacgttacattaaatttaactggggtaattgtgttctaacacttcattttaaacgaaaactattttaaaatgactcatgtctttttcaaccctgactccatcgaatggtcaacatttctagcctcgcagcaagaaggaagaggcgaacagcagtattttgttggtacacgttaccaacgcggaggcggtcttctgcaaaatgtagcccgatttttgatgccagtggcatcaaatctactctccagtgcatcgaaggagggaattgctgcaggaacacgtgttcttggcgatttgtcccaaggtaaagcattgaaagaatctcttgaaacgcatgctaagcaaggtttcgaaaacctggcaggaaaattacaacaatgtgggaaaggtggaaattatggtgccgatggtagaagaggacaacgagtgtcaaaggttaaaaaagctagtggcatcagctccagtgattctattattggcagaattgggactgttaaacgccgacggaacaaaatcatggatcagttaagcttcccttgacaccttgaacgcgaaagtctataaataggtaaagaattttgcaaaatcatacatttaggaactcatcatcatcatatagcagtactaaatattccttattgattaatcatgagtattatcaaaaaaattgacaaagatagtgttgaaggtcttgaaggtagtctatcattgtttaaccttccaccgacaaatgtggctattaataaaacgagcgttcgggagcttttaccattgtccgctctcaaccagacaggaccctatctttttcgtctgttttccgatagtcaatattgtgatcttagcaaaacgtacatgtatctgctcacttcgatagagcgtaagaatgccgccggagaatgggtgccgaccgacgatgcgattgaagaggacaaacatgtaggtgttattcaaaattttggaagcagttttgttcgatcattgaaagtcaacatttctggtgtcgaagtgtttgatagctcaatatactatcactatcgtgcgtacataatgcaggagcttggctattcacatgagattcgcaaagcatttcacgaggctggctgctattatccggatgaaaacagtcaggatagctactcaaacaaaggttttaccagccgagcacagcgattctcaaacggaaaacagtgcgaaacaatggtaaaactcaactttgatttggctcgtcaaaacacacttttgctgaacaatcaggatgttgtgttcacaatccatcggaacagcgatcctttccttctgcttacaccaaaatggaaaaccgttacagatgcggtcaaagatgcacaaggtaatataattacagcagcgcgtgtgacatggcatgataacacagccgaataccgtatccgtctacatgatataagactttacgtacgcactgtagacgtaacttcaagccttaatattgcgattagtagacagttggaaagcacgccggccaaatatgcgcttcgtaaggtagagatgcgttccatcttcttaggcatgggtcgtactgagctgtcacacaacgtgttcacctcaacccttccgcgtcgtctgatttgtgcgtttgtgtcaacggatgcatactcgggcgcccggcatctgtcacccttcaattttgagcacgcgaacgtacggtcaatcagtgccgaagcaaatggtttgacattcccaagcacaccatatctgttatcgtttggcaatcagaaaaaatttgtgcgcgcatttgtggacatgtatgcagggcttggccttgacgattcggacaacaaaacggtgtccatttcaatggcacgatttctcagcggatgggccttttttgtaatcccgatgacatccacactggatgacacgcctggctttgagctgatccggcaaggcacttgcaccgtcaaagtccaatttgagcagcctataaaagcggacggttatgaaatgctcatattaggtgaattcgattcagtcctttccattaacgctgatcgtgtgttgagcactgacggaagtgtatgaaagaaaaataataatgaattcggttcagctgaaaacaattctaaagggcgtgcaggctaccagaactaagtttattggcgtcttcccatcggataaaattccacaaccaaagtggagaagaaaatacccttattgtatgatcataaatacagacaagtcaggaacacggggcgaacattgggttgcctgtttcgttcctaatgcatcaagggttgaatattttgacagtttaggcaaagcgcccaacaaagacttaggcgcgtatttaaacacttttagtgacataaaaatcaataaacatcaaattcaatcgtcaacagcagacacttgtgggcatttttgcatttattttctagtcgcgcgttgctctggcgtcccatattgtgaggtgatgggcactctccatcgtacacgtactatagcagatttgcttgtaaaggggtttgttcgtacacttttacgagtataaaaggcataaaaaatcgacttcattgttaccagccatgagtacattttttctcctattttttgccgttttctgttataacaccagcgcagaaggcgaattgcttacacttgaagtggcggttgatcatcctaattattttgacaacaattaccggactttttctaaagatacaggtggtgatcagctgtttttcggatatgacaaaaataatgcatgtttggtaagaaaaaataacaatagccaatggacaatcagtttgcaaagctataataaactgattctctcttctcctgtaactattcaaagtattcgaccaattgaaccgacggcgtgttttgagtataacggaaagagctatgtgttctttgaggaccgtgaggcggacgagatgcacatttattgtggtcatcagcaaaaaattgtcaggggcttttttgcgaacgccaacagaccaatatttgactatatgacagaacgtttgtacatttctgatagacatgagagtcagatcagtgaaattgatctaagctatcttgagcggttgtggacaaataaaaatcaaacaaattatgcgattataaaagtcaattttgtatgtctgttacccagggataaaaccgatttcgcaattctagacaacaatatatacttgattcgatcagaccttcgcatttataaatatagaattgttgaccgtcaagttgaactaaagtttgtggtcaatagtagtagcgcgaaattcaactttttattatttaaagaataccgcgacgacgccaataataataatatacttcaagcaggctctcaaacgcctcagttaaaattattgttaggggttgcttatacctttgacgtactattgatcataatttgtgcatttgccgtgaaacagatccgccgagcgagcagcagaagtaacacatcttccgaaaatcttggcatgttcgacctagtggaattggcagcgcttaaaaataattccaaagaacttgtgtacacgcccacaacagtagtcaaagagaggagtatttaaggtaactattctggccatcagcgctcatttcgtacactaaaccactatatgcaacgagcaatcaaatattttattgactattacgccataaacgacattactcaactgtatgctctgttaaaattggaaatcgactcacacccgtccaactatttcccaaaccctctgctatcagtctcctgtgttcatattgtgaacaccgagttcgaaaatcaaccggtgatagtggaaggaacgcttgatttgatagacgagctgctcttttcgacatgctaccccaagacgaggcagggagtcggctggtaagtgagggattaatgtcaattatttaatattttttattcaggagcgaacctctgtatgtggaactgacggatctaatggtttgtccgggcgatttgccaatatgtctgtcacacttcggacaacggaaggaacgacgacccagcttgatggtcgacgaactggattggcacgacagcgacgacgacgccgcagacgaagcctggtgaaagtgttatgcgaattcaataaatgtagaccggaatatctcgctgtgacgatcagaagaaggaagaaggaaaatatcgaatttctatgcgatcaaaaaattgaaactgtacacctaagaaagaatttacaagttttccccgaatcatttaccttgtttggtgcaaatcgaatgtacgcctatcgtggtcttctaggagtcacggtagagcagcatttatacgcaagacatcgtgctcgcctaaagtttcctaaccttccatgtattgtacacattggtggcaacggtcatcaaagttattttccaattgaacttttgaaaatatcatcataatcatcattatcaatgtaatattttttttagtaaaaaaatatgcaacaaaatttcattcatatccaaaaggtaaaacatcaagattttcagtgataattcctttttggcaaacaggcaaatatcttttattttgcttccttgtaattatccgactgtcctttgtaggctggatttttttgtagttgaacactgcggcatcattctgttcatcctcttttccatagttgagaactttgtgcacaaatcgttcaaactgtagcgcttgagagttgttgacgtcaaatgtgatgcctcgaatcttctgcacatattttattgctttcgtctgcttatggaccattttcagagcgtattgtttcgctccgccacatgcgaaagtcgcaatgtcataatccgagtattcctcactcatctggcccaaaaactcgccagtctctactggaacaaggttgcgtttgtgccgcacaattacactgtctgtgtcagtgtacagcaactctgcgccaggtgtattgtaacattgttgcatgtagtcaaacagtttcagtctggctcgacttgtcgtccacagactgagcacaatgttgctggatgtatgttcaacagtgaagtttttctttggcttatacatcacccgaatggctgcatctgtgattggaattattgacgagatttccttaatttatataaattattcttatatcccaaaaaaaatacacaataccattctatggtcaaagactagatcgtaaaactcctttggtcttgtcataactttattcgacccaagctgatttctcatgctgaattttcccctgaaaacgattggataacaacaacaacaaaaaaaaacattattttggagcaaaccataagctgttgagcatcaattttgcaatgaatcgcagtcccggattctttttgatgcgaccaaaatccaaatcaaccccgtaaatgcgccgatactcatcgatatactgctgtttttgttctgacgtttccacaccttccggaaatccacttgattccacctgtgcaattaactttgataaaaattttttttggataattcgctaaccttgagccttatgaattgacggacatatcctttgaaaatctgatcactccattctgcgtaatgccaggccctccaaaatcgatcgacaacatagcccagttccaacgctttttcgagttcaatgtgggtgaagttgccagtgaaggccctctgctgatccgaatgggtgcatttgtgagaacagcgcgtcacacatttacggaacaatgctgcgcatcggtgacagcagctgaacagcagtctctcgtcaattttcatcggcagtacaggtactcgcagtccacgcggagggatgacacgaacacggtaaaggccccggtactgtagatgttcaggttttgtccagttgacattcatctcgtctgcgtttggatgaataatggtaggaattccaatcgggtaatcagtgtcgtagttgacccatgggtacagtgagacaatgtcgaatacggatatcttttcatcctctgccggttcagcaaaaagtcgtaacgggccagttcttccgccgcaatatgcaagtctagggtcaagagggccgcgctcattggatatgtcgtcaaaaaatgctttcattctttcatttttcttcagctggtcgtttatttcacattcccagatctcttcgacttgcagacaacgtccatggtcatcatactcacgaagttgacgaagacggtcttgtgtagtatcattcagctcacgacatgtttttccatcaatgagctgctcatcaggtttgaagcatcgctcgcaaccgtgccagtagcagccgagcacttctatgcaccgttgctggctctcaatccatccgtcgagcttgaactgcttccatcgtttttcccgaccgttgcctgcatgttggatttcaataccttcactttttgcgcgccagtccaaatatttgatggcgaggacgcttgctctatcgtttctttcatatcccagttcagggaccattgccaactgttcaggttccatgaattgcgccttgaagatgttcatgcatgcactgtaaaataaacaaatgttaacggagcaatttatttttttaaacctagctatggtacagctaatcggcaccacatcaaatccgtccgtgatctcattcatcaaaatctggcggaattttaccaaagctttgagtagaatttcggtgtcgttcagacagtatgccctaagttcatcgggcaagaaaaacggtgtccttttgttgtcgttgtaccattttttgaacttttcatacttgtcagccttcatagtgcccggctcgtactcgctttcgtccggaaggttttccattctgagcgaatagttctcttttctgttgaatgcgtatgggaagaatggtttgtcgtcgcagtcaaggttgaaagtcttctttaattcagcgagtgcaattggcataatcagacaggagtcacgccaaataagcattgaatgctttctgctatgctggacgcggaattcgaagattttgagcccgttcatcacaacatccggacgtcttgcagttttgcaaagatgattaagggcgaaatggccatcaaatctcgatgcattgtgagcctaggatttttttgtaagacaaattgctcataaatcacttacccatatgtatgtggtgtattcattattccacgccctcagaacccactcaacaaaagcggcaacaggttgatcctcgccatctgcttcactcctgttatttgaaatttacctttaatttaaataataatcatatcccaccattcttttgctcgttccaacgctccatcgttttgacagcaaatctcacaattgtcgtcgtccgtttccgttgattcacagcaatcggtacaagtaacacgggccgaaagaaaattgaccctatgtatacgctggccttcgtcctcaagttgttcaaggcgtgtttcagtatcccagacaatgatacgatagcgttgttcttccggtgatactcgaatttttttgatgaaacagctcctcttttccgcatgataaacctgaagacagtgttgttctttttttatatattttccaaacagcttagtctcactttgcatcgtttacaatagcgtgtgttacatttgtgcttctggccggtatccgatcgataaactctattgcatgatgaacaccgtttatagagtctacatgttgtcccccggtgaccatcgtaacagaatcgcgaaaaaaaataacggttgcattctgtgcataaaatttggacaccgtcttgtttcgggcatggatgttgaggtccgactaaacattttggttatagaaaatattaacattatttttctaacctttagcacattgaggacatctgctcttacaatgcattgtatgtttagcgtcaacagtgtacgtgcactcacactcaatgcaatatttccgaccaagtttgaagaaacaatgaatttttttgattacgtcataatgatcgctggatagaaaaagtgtgacgttaaaacgatgccctcctgggcctttccatattggccgaggtaactcttctggtctgtcttcaaacaaaactaagcggtatgtcccgggaaaaacacgattctgaaatatatttctaacacttaatgattaaaattttgttatacatcatacccagtattgttgaacctgctgaatatgttcaattccataagaagtctggtccttttgaatgcccgacgcattcatcagctcttcaactgcagtttgcattcgaccaatgtttgataccagacgattgaatgcctcgtagtctttgcaaaaatcgtgtctgttcattatgtttgccataaattgaggctgctgctcatctattgggttatgagtaaggcagaaaatatcgcggtcatgataggcacggcctgcaacaagcgcatgaaataaacagtagctatcgttgttgcgtatgcgaattctttgcgattcatcgtatccccaattttggtatggatgtaaacgtggggctgaccctactggaggggtcaaacaggtgacgatgatctccacaggatcgctgagcagcaaagtttttttgtcagcacctccatcgtctccctcgctctgaccaacttgtcaagctcagccatcaccacgtcgacgttgttttggattggagggcgca

SEQ ID NO: 325 - DNA, 502 bp, Heterodera glycines
taaaataacgggaaaatttaataaaccccatggggtctaaagaaatattgtttttgactcatggcaatccaaaattgtcgagtcgtattatccctgaggggctcaattaattggaagatttaaaaaaaaataataataataattaaaaaaaaaaaagaggaatttattaaataattattaaaagaaaaaaaaacatttaaaaatatttaaattgaaaagagtgggaatggaattgaaaatgcaaatcacgtgcacggcaacgtccgatagtcggtcaccgtacaacgacaaagagatggccatctccttcatcgcttgtcccttctttcccccccccccccccgcttctcatttcttccatagcttcgacccccgtgacccatcgcttgcgttcatttccctcccccgcttctcatctcttcgccactccttggcccatctacccctctcagcaaattatgagtgtgaatggccaaagtgacaattacagaacaataaaatg

SEQ ID NO: 326 - DNA, 2158 bp, Heterodera glycines
attgcgacttttgatcagtaccatttttctttcatcaaattgcgcgcaattcttctgaaaaatcgcatcctaccccattcccattgatcaatctcatccccctcatttttcatttatcaatttgctccaatttcctctgatcagtcacacctcccatgttcctttgatcaaattgtcccaatttattctgatcggattttgttttggccatttcttttgttcgacttccccattttcagtgatcaacacacattttttttgatcagtgccattccctcatttctttttgatcatttggcgcacattctcttttgatcagtgccattccctcatttctttttgttcatttggcacacattctctttcgatcagtgccattcccccatttctatttgatcatttggcgcacattctcttttgatcagtgccattcccccatttctttttgatcatttggcacacattctctttttgatcagtgccattccctcatttttttttgatcatttggcacacattctctttcgatcagtgccattcccccatttctttttgatcatttggcacacattctctttttgattagtgccattccctcatttctttttgatcatttggcacacattctcttttgatcatgccattttcccatttctttttgatcatttggcgcacattctcttttgatcagtgccattccctcatttctttttgatcatttggcacacattctcttttgatcatgccattttcccatttctttttgatcatttggcgcacattctcttttgatcaatgccatttcccttttgatcaattggcacacattttcttttgctcagtgccgtttccccccatttcctttgatcaatcctaccctgaggggttcatttattgcctcacatttacatattatgtttgtatgtgcctacatttttattctatttactaaatgttagtacattaatcacattttacaccataatgtcatttcaacaaaaaaaaaaaataataatattcattatacaaattaaatgcaaataaatataataaaataaaataaaatattaataatcaatcaaacttaattcgcgcattagccccacctccatgcaatttaatcgaatagcatacatacattcgggtactaggggttccattcaggctgaatccatgcggttttcttagatcgctcaaatatgctctgcttatccatgccatctatcatctatgattctttcatgcacgcattattcacgcaaacattcattcacgctagccttattcaatcattctttcattcattcacgccacgtgctttcatagaatcatcgcgtttataaattttcatcgcattacttataaatcgtaataaatattataaatcggtgcggaattagcttatcacattcagatcgagaaccaaaaatctcgccttctaagctttccaatcccgaagttttaacaagtgatgctagttcatcgagtgttgagagccctcgcggggaccatttatcgaatcattcgaagcgttgagcattgatagctcaaaagcagctcgcaagccctgaggggtccgctaatgttggggctgaaattgttattgaagggactgaatccaatgaaaaccctgaggggtccggatatgatgaagtgagaaacgagggtagtaacgtcacatttaaagcgatggaagtggcgcttgaccaagtcgacgcagaggcttttgcgaataatgactttgattatgaagaatctgaagcatgtcctccggccaaagatgtgagcaaatcctcgcttcttttatttggtttcgcaagccggagacggctatgtcattgtttgcaagaagtcgcccaagtcgaagcccaaatggggcgttcttcatgaacattgacgacaaactcatcgagtcggctccaggcttccagcgaaagcttcgaagttggcgacttttgtggcagttttcctcgttttgagtggaatcagaagctgcgatatttggctgaacatcgccaagatgccacacagtcctgcaaattttggttcaacgaaaacacgcaactgttgccaaagcaggctgatgccactgggcgtggttcaactcatgtacatgaacatcggacgcaagcagatcaccggggtcgtttactggata

SEQ ID NO: 327 - DNA, 8831 bp, Heterodera glycines
  unsure (1)..(8831): unsure at all n locations
ttaattcgcgcataagccatacgtcatgcnaattcattcaaattacatacatacattcggacatatatgggttgtattcagtatacatttatcatgcggtttcattgattagctcaaatatgctccgcttatccatgccatttatcttacatgattctattatatatggctcctttatgtgcattagtcctgcatgcattcattcaattacgcactcattcattcaattattcactcattcattcattcatttattcattctttcattcattcacgcataacataggcattcatagagctatcaggcattcatagagccatccattcatacattttaattatcataaaatgtcagaaataagcttatctcattcagatgagatccaaaaatataccttctaagctttccaatcccgaagttcctgaccaaatggacgacaacgcattaacgagtgatgctaggtcatcaagtgttgagagccctgcggggaccatctatgaatcattcgaggcgttgagcattgatagctcaaaagtagctgcaagccctgaggggtccgctaatgttggggctgaaattgttattgaagggactgaatccaatgaaaaccctgcggggtccggatatgatgaagtgagaaacgagggtagtagcgtcacgtttaaagcgatggaagtgccccttgaccaggtcgatgcagagggttttgcgaataatggctttgatgatgaggagcctgaagcatgtcctccggctaaagatgtgagcaaatcatcgcttctttatttggtttcgcaagccggagatggctacgtaattgcttgcaagaagtcgcctaagtcgaagccaaattggccattcttcatgaacatcgaagacaagctgattgagtcggcccctggctttcagcgtaaactcgaagttggcgactttgtggcagtgtcctcctttgagtggaatcagaagctgagatatttggctgaacatcgccaagatgccacacagtcctgcaaattttggttcaatgagaattcgcaactgttgccaaagcaggctgatgccactggcgtggctcaactcatgtatatgaacatcggacgtaagcagatcaccggggtcgtttactggataaagaggaaggtccaaagcattccctccagcttcgttcacgcaaacatcgcgtgttgtggtctagcggtttcggcacgcataaatcggcgtcatcttgatggcatcaatccggaagacctcaagctgggctcacttgtgacggtggttgttgccaacattccacaggattcacttgtatcaatgggatacattctgccgaattcttcaccgtacaaactgggaacggaaagaagagccgaaacacctgaatttttcggtgcagttgcgtgcattcgtcctcatctgttggagtggccaaatctgaatgcaaacatgacgcccaaggtttatccatgctccgcggagcttactaaacatcatgttgtggcgatggagcatgttgttggagcagctctccagattgagatggagcgagaggttgacatgatgattgaagcacgctttgaaggaagggctcggaagttcgatggtgctgattgtctgattgtctttggttcgaggtcgaagaaagaagtgaatgagttggccaaggtctgggagccggagtcccaagtgaaggtcttcaaagaattgggtgagaagcattttgctctgggagtggtcaaggatgttgaggtgctccacgcagaatacgaaaagttggaactccacgtcgtcatcttcttgaacaacatccaggaaaggaagaatgtcgacatcgcaagaaaagtggatgagttcatccagggtggcagtgttgtcatacacccggtccctgccactgcggttgaggacagactgttctgtttccgctgcaacgtcccatcaataattgctgatgaagactccccgaggggaaggataatggcagttctgctcggccgtccagccatggaaggcattcgaatggagaagcaaagcgttgacgactcaacggattcgtggatggaagaagaaggaccgctccaccctgcaattcttgctctcaactcgcggcagagagtgactgcacgcctaatgttgggaggaggtctggtgcaacaacaggcgccgccaggcaccggcaaaaccaaagtcgctgcggcgatcattaaggcaatgatggactcaaatcccgggttccggattgtggtgatggcttgtgccaacattccagttgcaaagctggtacaagaggcggaaggcacatgtgctgaaaaggatttggatggagcacgagcaattgccttattttccggttttgccagatgcaaatacacggatcaaataaaagatgttcaacggcatacgctgccgaacaaagtaaactctgaggagttcgtcaagcagttatcgcccaatgtacagaagcaagtgaaggagtaccttgctcattgtgagaagaacccgcgcttggcgcctgagagagcgattggaaaagtattcaactcatgtatggcaccgaaaatagtcttctcaacagctgccatggctgcgaatttacttcatggtgaaggaaacatcactgatgcagacgttttgctctttgatgaaagcactcaagctcagtgggcagtggtggttcacttggttgcgcggatgcccaagctcaaggcattgcttttgacgggcgatcgtcatcagctcggagtgcatcttcaagaactacctgacatcttccactcaggctatggattggaaagcgtcatcctacaagccgaggcttcggttgggacgaactacactttcctcacaaagatgtacagaagccatccatttttggcaaagctcatcagctatgcctcatatgagttgcacaatgaacaactcattccagcaagaagtgctgaagaacgctcacttattacgggctcaggctttcttatgccagttcaagaatgtcctgtgggacttatcaatgctttttcatcgttccgtgtggacccaaaaagcgactcgctcacagatgaccatcaaactgaagtggcatcattcttggtacaagcactcctggaacattttggcaacgatttttcgtcaagaatcatcgttttgtgtatgtacacgtaccaaacttcggaaattgaacgaaagctgaagcactgcggtgttcgtgcactcacagttgatgcctatcaggcacaggagtgcgatgtcatcataatagtgacaacaagatcaaaatactccgagatgggatccggaaggacggacaacatgcacttctttgaagacgatcaacgggctactgttgctctttcaagagctcgccacgctgtcttcatcattggagacttggtttcaataagtacaggacaagtgtggaagcgcttcatcgaaatggcgataacaagaacaagtgtagtccgagccgagtatgttttggcacttctgggacgaacactcgtgaggtcgtcgacatgcctatttgattcggccaaaagagaatcggtggaggatgaaggctttcttgaaagttgggcattgaagcatgggttgcgcctggaccgaacgaatgcctttggacaacaacaatcacagcagccgcgagctccctcattccaattccaaaatcgccactttccggcactacaggcgacagggccctcagaccaagccggtccatctggcagcggtggtcaacaaagaggtgcgcctactttggcaccacagtatggaagaggtcagggaagacgtggcccggacaatcaatggatgcactacggcggaaacccgaaacgacagaagggtggcagacgctgaactcatttcacatgaagtcctgcgggtctcacttctcttcctttcaccatcgctacggtatgtctaagtagttcataattcttttaacttaattaattagttaggtaatttacattttaccctttcattaaatattttattttctttcattttttctgcactcacaagtttttttttctcatgtcacccctccttaacttccggcgttcgcactgtttacgctgtgatacaatcagtagggacactttcccaccatattacggtattaatggatttccgctattttttttttctcaaaacaatttttattacactatttcccataacagaattattgtaacactggcacgccagccacgcccattgtcggggccttttaatctaagcactgcacattcattcattcattcttccattcatttgatttactgttttccactttagatactcttgcacaatcccactgctaattctcatctcacatttcctcttattatgttttctttctcaggtgggggtccacctaatcaaagcgctgcggcgtcaagcaatgcacagacagaccctgaggggctctccaatgatttgcctgagttatcagttgttgataaactgatgtttgctggaaagattctaagcacaccagcacgtttgtctgatgtggacaagctccacacggacttagttcggactgaggatggtgtcaatcgtatgacacgtcaccttaacaggaagataaatcaaaccaatagggatttgactgaacttaaggatgatactcaaactctcataactcaagtaaatactctcgcaaatggttataatgcggttcaagtgttgcaaaacccaaaccagtcaccaagagccaataaccctcctgtcttaaattgggcaactccctctccactcaggaacccgaacaatagctttggcaatgctaatacttcggtggttgaagccatcatacctctcggcaataatgaggaagattcccaggatgaagaatttgaattaaatccttcgggattccatcatgttaacatgcttttcgcagaaagcagtccctctttcacgatattctctggaacatctccattagaattcgatcgttgggcaagaaagttcacggacctgcttgactgcaatggcagaaagtgggatgattctgaaaaagtggcacgcctcaaggcatgccttgatggtgaaccaagacgcatttttgataatttacttcctgcccacaaagcaacttcttcggaagccattcaaaaaatcaaggaaaaccttgacactccacaaaataaagaactcatctatcaggcactaagcatgtgtaaacaaagggaaggagaatctgtagatgagtttagtgcacgactgattcctctaattgaggccaccacggcagaccttacaactaatgctagtgaggaggtactctgtcgagcatttttggaaaaattgaatccaaatctcaaatttctcactcgaaccctgagtgggcccgtcagaagggatttccaaatattgagaatgaatgcacgggaagcagaaatgatgcatagagagattcctaaatctattccagcacctcttttcccaatttcggaacaacaaaatccgagattcaacaacaccgagccgccgaaccacccggaaggcaactttagaacatgggctcccacaggctctaacagagagcctataagtcccagacagaggaaccggaacaattgggataacaatgcccaagcctcaagaggctcttttaacagatcaaataatcatcctcaaaatgacagaagatggaacaatcgcacttccagaaatgatagacgatggaataatcaaacccctcaaaatgaccgacgctggaatgctcggccagtttgcaactactgtgggaaggttggtcacctcgcgtttaaatgttttaaacgtcgtgacgaatttacccaaccatctaagaatttgaatttcatcagagcaattgatgaacaaaacagactgataaacgatctatcaactaaagttaatagtttaacttttagaaatgaccaatccgctgaggcggcctctcaaaatataaaaaccattcaaaaagtatctgaatctagtacagacaaaactcattcatcaatgatgaatgatactctcaaagcaccctccaaaataagtaattgggaaaccagtaaaatggttcagccaaaattttttccagtgctaatgggtctgactcttatttcctctctctcttccactttagttaaagattttaatacaattccatccggtccaatgatttgtcaaactcgcgttcaaccaatgacgtggtcccttcccaaatttccacgatgccccaggatgtcaattgacacaaccaaaccactaactaaacaaagacgcaccatctattttcccaattcactcgaattttctaccaaggcctgggcctgtcgcagaatcatcaaaagtattcggaaatatactacaatcagtggtgtttctgtagaacaacatcttgactctgaacaaacattgatgagtcatgatgaatgtttacaaatggcaaacaataagcgctgcagcttagggtatctcaaaaatgactcaggattgtggcacacagataggaaaattgaccagacaccccgtccttggttattaggctctttttcctggaagaaagtccagagtgagaattgctttgcctttgaaactgaagtatattcgcacattggtgccacttcaattataactcctgcgggaaccgctcaagcttgttcttatgacaaaggaaactgtgtcctctctgacaaaactgtcttagtatgggtccctcaaaaggacaaaatgtgtaaatacagtcccatcggagtcatggatggacataatcttggaaatgtatggctttccactttaggcgacttgggtctaaccagctcaattgttagaaatatttcagattgcggtcgaaatattactgtttctgaccaaggaccagcttttacaattaactcacaaagcccacgccataaaaggggtatttttggattagattctgaaggtgtagtcacctcctctcagttagcggcacaactttcttatttacacactaacatatctcgttcagttaacattgcttttgctcaggcatttaactccttttgtgatttaatgcttgacacacaacgttgggtacagtcatcctatctcaatgatcccacaagccttacgaggttcattcaccaaaataacttcttaattgcgaagagagttggagtttctcttctgagaacatggccatgtgtccctctcagtcagtctgactttgaatttcgtccaacccataccaattcatcctgttttgaatttcttccaataatagtcaaattaaatggaaaggaacatattgctttcttgaaccctacgtatttgacagtctctcttcattctaaaacagctccttgcgaggaccagagaaatattttaattcaaatggctgatcgcacaattgaagttgaccaagtagacggaacaatcaacaatgttcatgtccatgaaatcagggaggttgagcttgactttggtaagccaacgcgcattccaaagctctcaccacatgccttccatcatctggtcattcttaatcttaccgatctcgccacacatgcctttgcttcaaacttggtacaagtaagtcaattcacataccgagctgataaaactcattcctctgaaattaaaactacgctctctgatgaatggtcagcactagaagaatctatagttcaaaaagctgtgggaaattattccctggcatggcaaatttggatcaccatttgtcttttattgtgcatggtagatctcctgacacgccttttctttgcatacattggtatcagacttcaagatcccgtagagacattaggtcgaccaatgatcaccactatagctaatctttttggcaggaagaaacaaaatctagactgcgataacaagaaccatcctaattcgccaaccaaaaccattggtcacattacttactcacatcttcgaagcgttgctgcaacgcccataaatgaggctacaggtcagtccatttttcgagatacgctgaatggtaactcatgtaactttattgaggcataccctcaatcatcaaactccaaggagttcaaaaaaatatggtttacaaaagaaactaatttctctgcttggttgaataattatctctcaaaaccagttaatcacgaaattcctctcctacttccgcggaactcaggcgaattagcacaattcctcgatgttgcaacacactttggaaaagaaattccaaatttcaattcaaaaattgtcccattagcagaatctcgggagatgaacatcttaaatgggacaagcaacgagtctctgcttatcaggtcattttggggcatatacacatgctgattcatggtagaacccaaaacattccacaacaacgatttcataggcctcgctctgtaataagagagttaccaatgttcttggtattgtgcatgatattgcttccagcaacccttgctgcaccaattacctcaaaaggtcctcctccgaacttgaaaaactcaacctttgagtcagcaaattttatattagcattaccatccattgtagccataattatattgagtgctttagtgtattcttggagtcgttcttcactcaaaaagaatatacgtcaaaaaaataagaaaaaatatatactaaaatctgctctcttatcagctagcgccaaaaggtcatcagaagggcgaaaaccacttactctgacgactgttcatataaaagtgtcgtgagtaagtgacaaattatatggatgacaacaggggaaaaaacacaaaataccgtatatgctctaattatagcccattctctctattaatcccacagtctccaattatccccaagtctacgaggtgtttgaaaaataatc

SEQ ID NO: 328 - DNA, 5603 bp, Heterodera glycines
  unsure (1)..(5603): unsure at all n locations
ctaagtatatgtaaacaaagggaaggagatctctacaggggtttagtgnacgactgattcctttaattgagccctcaaagggagannttanaantaatgntagtgaggaggtantntgtngagnatttttggaaaaattgaatttatatttnaaatttntnantngaannntgagtgggnnngtnagaagggatttnnaaatattgagaatgaatggangggaagnagaaatgatgnatagagagattnntaaatntattccagcacctcttttccaatttcggagcaacaaaatccgagattcaacaacaccgagccgccgaaccacccggaaggcaactttagaacatgggctcccacaggctctaacagagaacccataagtcccagacagaggaacaggaacaactgggataacaatgcccaagcctcaagaggctcttttaacacatccaataatcgtcctcaaaatgacagaagatggaacaatcgctcttccagaaatgatagacgatggaataaccaagcccctcaaaatgaccgacgctggaatgctcggccagtttgcaactactgtggcaaggttggtcacctcgcgtttaaatgctttaaacgtcgtgacgaatttacccaaccatctaagaatttgaatttcatcagagcaattgatgaacaaaatagattgataaatgatctctcgactaaagttaatagtttaaccatcagaaatggccaaaccgctgaggcggcctctcaaaatataaacaccattcaaaaactctctaaatctagtacagacaaaaatccttcatctgtgatgaatgatactctcatagcaccctccaaaataagtaattgggaaaccagtaagatggttcaaccaaaattttttcctgtgctaatgattttgagtcttatttcatctctctcttccactttagtcaaagattttaatacaattccatctagtccaatgatttgtcaaactcgtcttcaaccaatgacatggtcccttcccaaatttccacggtgccccaggatgtcaattgacacaagcaaaccactaaccaaacaaagacgcactatctattttcctaattctcttgaattttctaccaaggcctgggcctgtcgcagaattatcaaaagtattcagaaatatactacaatcagtggtgtttctgtagaacaacatcttgactctgaacaaacattgatgagtcatgatgaatgtttacaaatggcaaacaataagcgctgcagcttagggtatctcaaaaatgactcaggattgtggcacacagataggaaaattgaccagacaccccgtccttggttattaggctctttttcctggaagaaagtccagagtgagaattgctttgcctttgaaactgaagtatattcgcacattggtgccacttcaattataactcctgcgggaaccgctcaagcttgttcatatgacaaaggaaactgtgtcctctctgacaaaactgtcttagtatgggtccctcaaaaggacaaaatgtgtaaatacagtcccatcggagtcatggatggacataatcttggaaatgtatggctttccactttaggcgacttgggtctaaccagctcaattgttagaaatatttcagattgcggtcgaaatattactgtttctgaccaaggaccagcttttacaattaattcacaaagcccacgccataaaaggggtatttttggattagattctgaaggtgtagtcacctcctctcagttagcggcacaactttcttatttacacactaacatatctcgttcagttaacattgcttttgctcaggcatttaactccttttgtgatttaatgcttgacacacaacgttgggtacagtcatcctatctcaatgatcccacaagccttacgaggttcattcaccaaaataacttcttaattgcgaagagagttggagtttctcttctgagaacatggccatgtgtccctctcagtcagtctgactttgaatttcgtccaacccataccaattcatcctgttttgaatttcttccaataatagtcaaattaaatggaaaggaacatattgctttcttaaaccctacgtatttgacagtctctcttcattctaaaacagctccttgcgaggaccagagaaatattttaattcaaatggctgatcgcacaattgaagttgaccaagtagacggaacaatcaacaatgttcatgtccatgaaatcagggaggttgagcttgactttggtaagccaacgcgcattccaaagctctcaccacatgccttccatcatctggtcattcttaatcttaccgatctcgccacacatgcctttgcttcaaacttggtacaagtaagtcaactcacatatagagctgatagaactcattcctctgaaattaaaactacgctctctgatgaatggtcagcactagaagaatctatagttcaaaaagctgtgggaaattattccctggcatggcaaattgggatcaccatttgtcttttattgtgcatggtagatctcctgacacgccttttctttgcatacattggtatcagacttcaagatcccatagagacattaggtcgaccaatgatcaccactatagctaatcttcttggcaggaagaaacaaaatctagactgcgataacaagtaccatcctaattcgccaaccaaaaccattggtcacattacttcctcacatcttcgaagcgttgctgcaacgcccataaatgaggctacaggtcagtccttttttcgagatacgctgaatggtaactcatgtaactttattgaggcataccctcaatcatcaaactccaaggagttcaaaaaaatatggtttacaaaagaaactaatttctctgcttggttgaataattatctctcaaaaccagttaatcacgaaattcctctcctacttccgcggaactcaggcgaattagcacaattcctcgatgttgcaacacactttggaaaagaaattccaaatttcaattcaaaaattggtcccattagcagaatctcgggagatgaacatcttaaatgggacaagcaacgagtcgctgcttatcaggtcattttggggcatatacacatgctgattcatggtagaacccaaaacattccacaacaacgatttcataggcctcgctctgtaataagagagttaccaatgttcttggtattgtgcatgatattgcttccagcaacccttgctgcaccaattacctcaaaaggtcctcctccgaacttgaaaaactcaacctttgagtcagcaaattttatattagcattaccaaccattgtagccataattatattgagtgctttagtgtattcaaggagtcgttcgccaatcagtgcgattatacgtgcaaaaattaatggtttagaaattagggcactagctgatacgggagcaacgataagtgtagctcctctctccttagcaaagaagataggatgcgagctttatgagtcaaaagtggaagctattagcgtctcctcacatgtaataagcatatgtgccgtgggtgaagtaataataaaacttggtgatatatctctgcggagttcaattaattttatacctgatgaccaagcaggagccatgaaaaattatgaaataatcataggatgtgatatctttgttaacctgccaccaataacatttgacttcacaaaaaaggaagtcatgataggtaaatcaaaactaaacatggaatcaaatcatagtaccctctcaaacctaaaagttcgagctctagagcaccaccgaattcctcctggtactcaaatactggtcaaagccaggatagatactatcttctcaatagacaaggacattcttgtagaaaatttggacccaagattatctgatgaacacctaagcacaccagccacagtttcaaagcctaaggacaatttattgaacattgtaatttgcaatccaaccaattttcctaaaaatataattaaaaatatgtgcattgcgactgcatgtgaattaaacaaatctgatcatcctaatcttgaaatggaatgcacctcggatgagatcaatctcctgagggagtcacaaaaaataattcacgcagatccgtcatttaaagttgatttttcaaaatcatcagtctcaggtgaaaatcttaacaaattaaaggaattgtgtgaagtattccaagatatttttagcaaaagtcaatatgacttaggctcttgcactgcaggagagcatgatatagtgaccacgtcggatactcctgtgtcgtcgaagccacaccgaacaccattcaaatatcgtgatgaactccaaaaacacattgatcaacttttggcatccggagtcatggttgagtcggacactccatgggtctcaaatatcgtcctagtgcagaagaaggacggtgggttgagaccatgtatcgattttcgtaaacttaacgaagtgactgttccggatcattatccacttcctagattggaaacgatcatggaacgaataggtaattgccgctactattctagtctggacctgtccagcggatacctccaaataagactaacggaaagggcatcccgaaaatgcggtcttattactgaaaataaaatttttcagatggtcaatctcccttttggtctaagaaatgcaaccagtgcgtttgccagatgcatggcccatgtcctcacaggtttggacgattgtgtaatcgcatatgtcgatgatattctggtatacaccagggatgataactttggtgagcatctcaatgctttgagaagtgtttttgaaagatttaggaggttcaacctaaaattaagccctaaaaaatgcacattcgctgcggcgaccatgaattttctcggatacttagtcaatgctgacggctacactcctagtctaagcaaagtggaaataattaaaaaccttccagaccctaaaacaactcgagatgtgaaacatgtagtaggaatggcttcattctttcgtaaacatgttcctaatttttctacaatcgtagaaccattgaccagactaaccaaaaaggaaaccaatttcgagtggggtacagaacaggctgcggccttcaatgaagtaaaaagaattttgagtgagaaaccaatattggtgtttcccaattatgataaaccctttcacatcttcacagatgcctctaatgttggccaaggtggcgcactcatgcagtggaatgagttggcggaagcatatgaagttattgcttattgcagcagaacgctttcagcatctgaacgcaaatggcctgctgtacaagcggaattgggagcaataatttttgctctgcgaaatttcaaaccctatatttttctgacagaaattgaattacattgtgatcataaacccctcgccttcctacttaaaaaggcagaagcgcatccacaccttgcgcgttggttaattgagttacagaattacaatattaaaataattcatgtagcggggaagcagaatcttttagctgacggtttgtcacggtacccacatgaaagaacccaagagattgccattagagatttggctgaattagaagacatag

SEQ ID NO: 329 - DNA, 2488 bp, Heterodera glycines
  unsure (1)..(2488): unsure at all n locations
aaaggttagaatttttctttgtcaaccaaatcanacatttgttggtagcaaaaatggagaaacgtnggaagaggagaaaaaggatgaaaatagcattggggaaggaggagagacggaagagaaagagagaaaaaggaaaaattcgacggaagaaggagggggagaaagaggaggaaaaggatgaaaatagcattggggaaggaggagagacggaagagagagagtgaaaaaggaaaaattcgaagcaagaaggagggggagaaagaggaggaagagagaatgaagcagaaaagagggaggaacagcagcaaatcgacactttttgattttgccggtgctaattgctaatggatgtcgtaaatccccgtcaaaatcctgaaaactacacaattttcgaaagaaaaatgcattcattcgattacacataggcaaaaaatttatgttgtggcgtgggttttgcaggagcacagcttgttccccaaatcccattaacgatttaaaaaaatcattaaatttctcagggaatttccggcaaatttcaaacaatttattacaaatagagattcttagaccccctaagaatcggtcggggccgttttcgcgtgagtagctgttcaggactggaattggtcggatttgtgcaaaacatccatgtttcgaatccgaacccgcattcggacaaatttcttaactttttaatttttttatttcttgcggctaatatcttctacagtaatttgtcagtttggtcggatgtgcgtcaaacggaaaaaatatttaaaattttataaaaatataacaaaaaataacaaatttcagaacaaactaaggtcgcatttcatagtttcgggaaacaccagtgagaaaattgataatgttttcgggattcacattggcattggcataattgtgatcattttgggggaggtgaatgttattgatgtcgttatagaatgcgccgtttttgcaaattttttctcctccaccggcagaagaaacgggacaaagcatcacaaatgggccgtcttcttctgacaattagtgacggacaaaacaacaaaaacagtgatcagcagcagaagaagaaataaattgattaaaaaatgatcggttaagaatgatggaccaatcataatttatcagtgagcaaatgcattttatgaagaaaaactctcaattgataaataataaaaaatggtcgatcgtaatggaaatgggctctgaccccccccccccccccatggggggccaaagtcgatcgtaagacctctttaacatcatatttttatgtactttttttatttattatataataaagtttttatttttatctcatttttgccgttttcccaactctttcgcctgcagcagtttgtgcctgtctttttgggtcaccgttttgccctgaacaatcaaaggcaattcgaataatgcataaacgactcaaatcaaataacctttctctttttattatcttttgtccatcccattttctctcattttaaagcattaacagtacaattatggtgaataaaaagtatattcacaaatttttgtctcaaaaaaattttgcaaaacaaaagtcactccccccttttgttttgataaaattaaaaatctgtcactttataactagcgccaagtttgttaataggcccaaataattgtcatattcgtgatcactgatcagcgacctctaaaacccccgggcacttggtttcatgactttataaacaaaacaaaaaaatttaccaaaaaaaagtttaaaaaattttcaaaatcggtgactttttcactagcgcctcgagatttttagtcactaaaattcctagccctagttattaccaaaaatgttgtaaaaaacttggttttttgagcttctcaagtcctcccattggcacattgtccaacccctcggacgccaattggcaacaatttaaggcgaacaaaattcagaaattatttggataaaatgtgatttttacgtttctttcatcaagtacatactataaggacactttggaaaaccgaacaaaatctcaacaactaccaaaaagaaactgataaaataagctaaataagaaagaacaaatcttttttcacatttctgtttattttgcgaacagaaatatgtcttttaggcagagttatgttgaattttctaagttttcaggagaaattaagggccaaaaggcttaaatcgcctctaacatttgcccaaccgaatcaaactaacagcaatcagcactaggataagttacagacatcctttaagcattttattcattttatgccataaaaaaggcattaaacacaaaatttttgcgggtgaaaaaatacgaaaatctgagtaaattcgaaaaaaaaattctagggggttggaaaaaattttccgtagaagatgattatgacgaacagaaagagcacaaaattctctacaaaatggcctttgaatgagggaggtctctacgtcgcgtctccgcgaagg

SEQ ID NO: 330 - DNA, 10352 bp, Heterodera glycines
tcatcacaagacatggatggccagcggatttttcatgaaatatggccaattttttcggcaaatattcgccacttgggctttctcaatggtgatgatttggaccatttgcgtcgtctcatttcaccgacaattctcactgatcttaatcagttgaattcaatcgatttatatggtcggttgcccgctgcaattggtgattttgatgggccaaatgcaactgctggccaagcattgtccaaatggttgcacacgccgagaaaagatggccaacccaagcgattgcgttgtggcagaaatttgaacgcacaagcggacttcgattgggtcaacaatttcaaggaggtgtggcccaacatttttgtgatttttgttttccctaattgtttagcattttctccgtgccaatgccatttcttccgtcagttaccaaattcatttttcttttcgcgtgccgtcaatgcaaatggtgccgtttgaattggtgaacgaatggacaaaggaaaagctgacattgaccaaaaaaaacgaaaatgactgggagatttggataatgaagcgatgcaaaattggagaggccgcggatgttcagcttcagaaagatgaaaattggggcaacaattttaacaatgtggccatttggcttttcagtactgattgcattgggtgagcaattaaaaaaaaggcatttaattttgtttaaataattcaaatttcgcttaattaaggccattgtctccgccatcagcagaagaagaacaagaagcgggacaaagcagcgaaaaagggtcgtcttctgctgacaattagtgacggacaaacgaacaaaaacggaacggtgatcagccgcagaagaagaaatgaattaattaagaaaataatggaccaatcataattgattagtgataaaattggcatggaatggcattttgaatgttaggccaaagaggcaaagggcgtggccaattgttggcatcattttttggaggggaggcaaattattatttaattgatttacacccaatcaaacattaaattattagagagccctcctgtaaaatttcaaaaaaaaattggccaaaactcaaaaagaaaaaattgaaatttctcgcgcactttttgttttttttgccataaatttttgcgaattggcaactttttgaaattttttgtgaggtgataaagcacactatacgccttcaaaaggataacaagagaatgtttgagtttgtgggcaaaaatattttggcactattttgaagctaaaccgttataaacagtcggccaaaagtgatgtgcctggttagttttcgtcgcccattgcgccggcgggcaaaggcaaattaattaaaaaacggggcggggggacaatttaggatggaaatttaatcgaacaggaaaatttgctaaaggatagaaacgaaagaaagagaatgaatgtgaatggaattaaaatgggaacaaagccgattaccatatgccgaaggaatgaatgggtactgtagcaattataacaataatttctcgggaagtattattaatttacataataaacatgattttttcgaaaacataaaatcaacaattaaaaatggacaaaaaaaagtatcaaaacaacaatttttcattcaataattcgaaatgatcggcaatttgtcaaatgtaattaattggctaccacataattaattaggcgctcttttctccgcttcttttgttgattgtggatacaatggcctaaattaagtgcaatttgaatttgatgatgaacactttaacaaactttaacaatggcaaatgtcgttgctgctcacccaatgcaattattgccacaataaaagtgtaagaatgtgccgttcaaattgttcggcggattctcgttagtccagcgaaccgtctccccaattggacaccgccggattatccattgaatagtaaatccaaatgtgccgtctttggccattgtcagcttttcatgggttcgttcgttcaccaattcaaatggcacaattggcaatgaggcggacaaatataattgaattgtgtagcaggcagaagacgaatctgatttaatttttgaaatttttatttatttttccattattttttaaattattattttttaaatgaaattttaaaattaatttatttctaccttgaaaaaacctggggattcgataaaaacaaaacaaaaaaagttgcatttattaattgagaaaggaaaacctaaaacattttcaaaaaaaatttgttataaatttgtgcgtccgtcgtttttaatcattttaatttcttcttggcaccagggacaaatacggcgacttggacagcaacttgatttcgttcgggccgtgccaaacgccgacattggcattttgtgtgggacgacatgacgaaattgtgcagttcaaaccgcaaccgtactggctgctgcaggccgaggtacagtacacacccgagacaattaactatactgtaattatgggcagttttttcgataaacctgggccagaaataaaaatacggccaaaaaattttaaataatttccaatttatttacacggccaaatggttttgaatttggacgtgggttcgaccggaccgggtcggttgggcgttcgccgattgggcgccatggggaaatttcatttcattaaccctgcctcgaattggggataagaatcataggtgaacaaggggtgcgccggcgcacccccccccccccccccttgttcgtcgtaaggggggcggctgtaaaggagagggggggggggggggcataacgtagggggaaaaacctaaaatttgcacatttccttagcgaaatcaatacaaaattcaaaaaaactttctggcggcgcctagcggaaccgccggcccccttgttcccgaaaattttttggaaaaaccacgccgaaaaaaactgttttttgaatagcaaaaaaaaaggtcgtcgttgggaaaaattgggggccttcgtacgaaaaattggtccttgcgcaccccccctgcgccaatcgttcgtcgtatgggcctcgccctggcgcaccccttgttcaggtatgataagaatgctttccaggacggggatattcattttcaagaacataacgggaaaaatttcattaaattcaatgacacaaaaatcatattcaatgaaatttttattcaaatggtttgtagttttcgctggaatgaattttttcaatatttttttttgctgatcattttcctcatttcatcgcacgttctattttcaaaaaattttttgagaacattgggtccggctgtgccgaccacccgtaaatttttttgaaaatttcagtggtaatttgtaaacatattttgcacaaacaatgccatatgattaaaacattgtataaaatttcaaatactgtaatatgttaaatgttttttctcgaattctctttttcaaggacattaaattcaagggcagtttcaaatttcaaagttagagggcctaatttcgaggacccttgccatttaaggacgaatgggagacctcacatactacctatttaccgcaagtctttggtaatagacggtagtagccagtccccctctccaatttttcgaaatttttttttttcataaatcagaaagaattttgagactgacacagattttaacccactgaacattaagggtgtcgggaacggcaaatgaacattggcattgcacaggcatttctcaacaaagtgaaggtcggtttctgtaccgccagttccgtcccaggcatgtttaaaacatcataacttttttcacagttggccaaattttataaatttggcatcattcggaagctctacatatttaaaagcagtgataagctatttctaagcgattgaacaacttttaaaaaggttgcaacatgaattctgcaaaattcgattttgcatatttttatttacaacttttttacatgtaggtatatagttgtgatttttggaaaccaatagagcttgttaaaagctctcgaatgatcccaagttttttgaatttggtcaacaaagaaaaaagttatggtgctttaaacttttaatctttctgtctattttcataaaatatacttttgaaaattaaaaaaagacgaaataaaatacaatccgagcccctgataaagtaacaaaaattttaaattagatacctaaatggaattataaacagtgacttttcgcttttatacccaaatttatatgtgccgacaaattttccgataattcattttcctttttctgtgaaaatcacactcaaaaagtgtataaatatggccacttttcggctcaaaaatcattccttccaatatttttttttcattttaatttctatcgtcaattcgtcaatttttcttctaataatttcacccattcatttcatttagcgttcacacattttgccatctgtcaaccaatcatcatcatcgtcaacatcgtccgtcaacagttcaacaacaaaacgttcaaaatggcgcagaaactttgcgcaacacaaccgccgtcagtggaggaagtggggacaagcgagagtgggagcgagtcggcctcggactccagctattcgttttcttccagtggtgagtttgagtgcggggcggggaagggcacaatttcaatttgtatccattaataaaactgaattttcagattcagatgagagcgaacaacccgccgggcatggaggaggacgttctcagacgccgcgcgagaagaaacaaccgctgaagaagaaggcgccgggcccgagcagtcgcaatcctggtcgacgcgtgaagaaaccgtcaacgaagaagtcgcctgctccccgccatgcaaacacctccaccaagaagcgcggacgtcctgccaagaaagcggaacaagccaaaccatcggacagcggaacagccgccgatagtggccgcgacgacagcggacgtgagttgaatgggggtggggaatggcacaatttcaattgtataatcctaatgaaattgaattttcagattccgaagagagtgcctcggggacgaagaagaaaccaactcgcaagagcgctgctgctggacatcccacgaaacagaaggcgtcgcgcggaggacgtgcgggcaacaagaaggcgcaggaagaacgctctgaatcgtcaactgaatcgggctctgatcgcgaggaggatgaagaatgaatgagccagccggagaagaatgctgcttcacgagaccaccgcgataataacactaaccccaatttaaaaaagagaaattgtatctctatgtatgaatatgtatatattgtatgtccatatccctgtggcattgtcttgctgaatgtaattctcccataaatgtttgttgttctatttaactatgccatatatatgtgtatttttaataattgtaatatgtttgccctgtttatgcatgtttatggtcatttattctcattgccgaataaatacatttatatgaatgagtacattttccatgtcatcatagcaattcctctaaaacttgttgatttgtcgtggtgcctatgagtagggctccaatttttaggcactaaaaacggttaaaaaaagtggttgaagtaccgagtcaaaagccctttctactcgagatttaattgagacgaatcgggatttgttgcttaatgacccaattaatcccaaatgcctttgtcactttgcatttcgcgccccctttcccgtcattctctgtccctttttttacttattgattcccctccgaggttcttttctactactactgctagcactataaaatggggcggagtgtgtgtttcattcgcacaattctcgacaatttgtttgctcttattttatttggatttggaaatttaagctgagcaaaatggccccccgggcgcccttttctgttttaattatttcccatttaaattttattataaaggttaaaggagagagcggggatctcgcgacgtaactgaatctatttgcccccccccctcctcattttggtcaattagtcatgccctcttgctcttgcagccctcccccctttttgcccccactaatcgattctcaaaggtcagtcaattcgttggtccgtccgttcatttggccgtttgtcccatcgattgattggtcggtcgtcgatcgatcagcagatgtttgttttttctttgcccatcacccggcacacaatatcagcagataaagtaacgtaatcacgcggtggcggcatccttttcatcgattacgacattcatttaccgtagcaatttatgccaatgaactcgctgaacatgggcaaagaagtggccaaacggtggatggccagcaacaacagagtgagtgacggaaatatttttttttaaatacgaaatgaaattccattttaaaaatgcaaaaaagcgctgaaaattacgaaattaaaaaaatcaaagaatgggagaaaaacagcagagagagagagagcatcatgggaaagacgctgtttctttgctgaatgaatcaaaaacaaacttaaaaaacgaactctgagctcattagcctccccccccctcccccgccttcggctgtctctttgccgtcattattcgtttgttcccgtcggcaatcgccgccaccaccattttgtcggccgaccaaagtacgctgtggcgagggggtgggggagggatacaaagggggggggggggacctttgggcctccccgccatccaattgggatgggagccggaaaatgcgacaccagaaaatgcgacaccaagaaaatccgacaccagaaaatccgacaccggcggaaaatgcgacaccgtagaatttttttaaaaaacggaaaatccgacaccgggaaaatacgacaccaaaattaaatttttaaaattatttttaatttaataaatgaaaatgaactacttattttccttaaaatcgaacattgagctataaaaataatttaaaatgatttaagtaatataatataaaatgaactatgattagttcaatgcaattctcatgaccctttagtaaagtggacagcagataatacaaaaaattcttatcagtttccgatttgcatatggacgagaattttcatcatcggcaattaattccctcaaaatatttacccacccacccattctcctgtcgatttctgcaattttcgtgagaagaaatcgacgcacaaaaaaacaattcttgtccacgacggttatgagtacgggttcgacaaattaagccgtgcagaccccagtaatattttcgccatcctctgcaatatttgcgcgcaatttcccaccgaatggcagaacctcttcaggacaaaaatcaatgatttttcatttttatagtttttaaaacgtaactaagaaccttcatttttaaaattaaaaataattttttaaaatttaattttggtgtcgcattttctgttttttaaaaaaaatttacggtgtcgcattttccgccggtgtcggattttctggtgtcggtgcgattatgatgagcgaaaattatgttggcactttgccatttaaatattgcctaattgtttgtctgtttatatttgacctttgcttgctcgcaaatgcgtccatttccgttgtgttttatgtgtattaattaattaattgtgagtaattgttgaaaaacggtaaaaatggttgagggtattcgttacttttcgagtttgccaaaaatatttcaacgatttgtaccgggggtaggacagggaccggaccaaaaaatgacgcgttagagaatgtagcaaaaaagttgccggtgatacgcaaattgcggtcgccttccacccatgtcttggaatttacctacgtttttaattttcgtttttttagagccattaaattttatggattcaaaaattgctgttgctcaaaatcacagcaccagctacctattttgttgtacttagtagtgatgttcgagagtctcggtctcgactcgagaaaagtctcgggttttttggtctcgagtctcggtctcgggttttcagtctcggtctcactttcgagactcgagaccgagacttttttacacccctaatgatcggctttttgtaagttagaaataaatatacttttggtatatttttgcttcattacctcaatagtgtgcgtggctcagtgggttgtgttcttggtcatgtcttcattttagcgttggatcggtacccctccaagtatttattttttcttctaatttttcaaaattattccttttaaagtgaatctaatcaaattaaaatcataaaatattgtcatttttagtactaaatttgttcacaaattgcactcaaattttaaaaattttccccggcggcgcctatcggcaccgccggagctccgaaataccctttatttttttaaattgacacaaaaactgcgaaaaaatcaaactaattttttgttttgtgcttttttgaaatgataaatattgtaccaaattgaatcaaaatttaaaaaaaaccaaaaattagttaagaatagagtcaaaaaaaatttttaagcgaataggaaaattttttgaaaaaagtctcgagtcttgggttttttgggtctcggtctcggggtcggggttttcagtctcggtctcggtctcggggttttcagtctcggtctcggggtcggggttttcagtctcggtctcggggtcggggttttcagtctcggtctcggggtcggggttttcagtctcggtctcggggtcggggttttcagtctcggtctcggggtcgggtctcggtctcgagtctcgggaaattttcggtctcgaacatcactagtacttagaacctcaccatccacgaatataagctgcccttggaggagggttgggtacttgcacagtttggaccacataaaaattttctttgttttttttagataaaaacgtgcttccaaacgtattcggggtcgctgatcacgaatataacatccatttcgaccagtttcgaaccccggacctgaactcgaacaaaagtcgaaaattcgtttttcacctaatacttttattgtctaaaaccgatgaaaatacaatgaattgaatagcaaataggggattcatggccattccatgcattcgaatcgattttgaacaataacgatggcttctatcagcaacaaaacaataactaacaacaaaataggtagcggtgctgtgattttgagcaacagcaatttttgaatccaaaaaataaaggaatgaatggggtccgaaggcgggaaaattttggccaaatttttaacaggcatttccaataacgtgattttttgatgcatgaaagcaataaaagtataaatatatcaacctacatgtatatgtatgtatataagaaaaagtttatgccccgcccatttttcgaaaaaataaacaagctcatattcgtgtgatcatctccataaattagactataaacagctttttatttgaaaatctcggggggggggggaactcacaaaacaaaagtaccaaattcccgagcaaaaatcaaaaaattgaagtcttcagttcagagtccatcttcaaaaacttccaagatttaaaattaggtaggtatggtgaagtgttggatttttctgtttttgttaattttttttcatttaaaagttttttaataaaaagcacgccgcagaaaaaaacattttttatgtcaatttcgggcggaaatgagtaacaacactaattcaaataaaggaatcaacaaatgaaagtgagagagcatttctcatcaaatccgaatccaattggttgagatcgttgaccatttcttaaatataattaataattttcgttgctttcattcgtccgctttttcttttccttcttccgctggtggcgacaatggcctaaaatttagtgaaatttgaattggatgaattatttcggagcaggacaaaactcggccaagaaaaaatcttataaaaattctttctaagaaaatttgatgaaaaaaaaaattcaaaaaagtttcaagcgatttttttcagttttataataaattagttttttcaaaaaaaaatcgctgggaatttttttaactttgtttttcttcgagttttctaagaaaaaaattttctatgattttttcttgaaaaatttcatcaaatccgttgttgctcacccaatgcatttactgatggtaccccacaaactaaagtggacattgttcaaattgtcgtctttcttccgctgaaccgtcgccgtctccccgacaattattggacatcgtttcatcagccaattacactcggattcttccaacagtatcagcttctcatttgtcgcttcgttcaccacttcaaaaaatggttcagttacggtttgcgttgctttcatataataagaaattcgaatat

SEQ ID NO: 331 - DNA, 2515 bp, Heterodera glycines
ttggtacgggtattttctgatcacatgaagcggttgtcgggatgtgctaaccatgcccgaaatgatgaattcgatggccaagccgaatatggtgcctatggctatgttgatcggttcattcgaaactggatccaacaatcagcaaaccaaaatcgggcagctttgtttccgatggaattgtggaacatgtgtgatcggtaaaaaaaaccaaataataattaaatgaattttgtaaatgatagggtggaaggcgacctctgcagaaccaataacagtgttgaagcttggcacagaaatctgaacgcgttattccgttcaccatcgccacgtctaagcatttttcttcggaaagttcggcaagaagaaagccattggcgtcagcaagttgaagactttgcaaacaacccagcaaatggaatacgtggcaagggaatgaaacgcaagcaaacttatgtggaccaagacatgaatcttaatgagttatacgtcacgcgaaacaatcgccatcctctgcaatatttgcgcgcaatttcccaccgaatggcagaacctctttaggacaaaaatcaatgattttttcatttttatagtttttaaaacgtaactaagaacctctttaggaataataattgatttatttttcatttttaaaattaaaaataatttttaaaaatttaattttggtgtcgtattttccgggtgtcgcattttctgttttaaaaaaaaaaatttacggtgtcgcattttccgccggtgtcggattttctggtgtcggattttcttggtgtcgcattttctggtgtcgcattttcagggagccattgggattcgcatttcatttcacattcatcactcctcacttatattcgctgtcgtcgtcgtcccatttccaaatgcagtaaattgaatgaattgggcggggggacacacaaaaaacaatatgtggcattacacatgtttttccaaattttcaactctttttttccatttttgcgtttccatttttgtccttttttctcagagaatggcgcccttttccctttcgcccgtcgaccgaatgcgtcaaagtgtgttccgagttcgaagtcgtcttgtcgtcaatttgttgtccgaggggttggccacctttctgctgctgctggtcggcaatggcattggggcacaacacattttgggaggggggaagctggacaattacatgcaggtgaatttcaaggggaagtgccaacggccaattcaatggagccaacgagaactaggaacaacagacaaatgggatgggagagaagaacatttatgtaattgagtgtcagtttgacaactttagctttgccaacggcaaaagcccaaacaaagagttggccatagctaaagctccccgggtaaagcagagggggggggaggttattttaagttagcttttccatttttgcctccctcatgccatataaaacgacaaattttcaaattcattcatttctttattatgtaccgagtctgtatcgttttggcgccgccgttttggcgccgctgttttggcgacgccgttttggcgacagggtcgttttggcgctgccgttttggcgccaagccaaaattaaaaaattgtgaatccaagatcgattccaatttttaaaaattaaaacttttcataaaaatgtaaataacaataactagggccccgacttttagtgaaaaaactttttttttgctcaattgttttgaagaaaggagctcaaaaaacgcatttccgcgtaaaaaatttttcatttggacgtcatttttcgtcactaaaaatcactattttggcgttttgtcacttaaaatagtgaaaattcacttttttggcactttttcgtcactaaaagtcggggccctaacaataacaaacaaaaagaagacaaataagaaaattcatgggttcatatgataattgcgcgaaacgccacgaaaaaattccaaaatgatatgatgattttgatttgggttaatgtggtaattgtgatcgttatcattgttcgggttcacggaatgtaattctgcaccaaattgaagaggcgcttgtctgccgcttatttctgcgtctctgattttttggcgccaaaacgaccctgtcgccaaaacggcggcgccaaaacgaccctgtcgccaaaacggcggcgccaaaacggcgtcgccaaaacggcggcgccaaaacgaccgattcccttatgtacccaagccggctcaccaaggaaaatgcgtcagtgatactgtgtttttttaataatattctgtagctttataaaattgactaggaacatagttctgaattcaccaaatcaatttttaaaaagtttgtatactttaataaaattttcaaaaattcctaaatccataaaagttaaacaccgtgaatggattactgtaggtttttcctatatcaattcacgcgtaaaaattataatcattccactatatatgtacaatatctcgtttcaaagtaatactttgccactgacgcattttccgatca

SEQ ID NO: 332 - DNA, 12103 bp, Heterodera glycines
tgggattttgcgtaggatgcatccgtcgtaggcattgtaggcatgcataataccgtacatacctttctcgtctgatgcatctgttgtaggcattgtaggcatgtatgctaccgtagtgggattctgcgtaagattcatctgccgtaggcatcgtacgcatgtacgatttctggaccgttgaatatcgtgagtaagttgatgcgtacgcacgcatctaccgtaaagccttaatttaccatagtcatgtagacaacgtaggcatcaagaatacgtatgtgttgatggacgtacgcatttctggagcgttgaatatcgtgagtatgtggatgcgtacgcacacatctaccgtataacattaatctaccatagtcatgtagacaacgtaggcatcaagaataaatatgtgttgatggacgtacgcatttcaggagcgttgaatatcgtgagtaagttgatgcgtacgcacgcatctaccgtaaaacattaatttaccgtagtcatgttctttgcattattttgctgcgaaaaatattggtggctggcgggggatttttttaatctcttccattactgtctcggctttgctgggcgatagatgaccgtggcttttaagccacctaattaaaacgaacaaaaaagcaaaaacacaggaaatgcaatgatataattagaaaaaagtaatacatgcaaaagggtttcattatgctcttcaggggaattcaaaatttgtatgtctggcttcgttgtattagtgttattcattttaaactaaatttaataataaagttatttataatttatccaagctttgaatcggtcacaatgtgccggttgtaatcaaccataatcatttgatcaaattctcccatgacaatgagatgtcaaatgaacgctccgaattagccatacccagtgcctcatacatgtcaacaaaggcgtagacatagtgatcttttgaaaaatttagtttataaggaacagctgggtagacaatccctccagcatgtatcgaaatttaacgcaaatcaaacggctcaaacatgaagggactcagtttgtagtcaccatgaaatgctgaattgccaaccaacgcagttattacgcgtcgaggaatggtcgcgctgaatacattgtactcaaattcgtatcgaccaacactgatgaatgaagacttgatttccgtcttgcgtacagcgtacgtggcgggttgtttttcaagtgttttgtaaaggctcatatttagtgagggttgtacctcaaccattttagcataaatcttgacatcatgaacggccaaacgatatttcgttgcatcatttgcttttaatgtttgcaaaagaaagacatctttggccttgtaaattgtgaagagcaagtccaaattatttaagagataaagctcttggtttcccaaatcaaagtcgagacgggagaggaattgcgcatttttaccactcttaaaaattttacaacgctctttgaacccctcgtctgttgagtcatcttggtttaaggtgtgataataccctgttgaaccaagaaaatttttcttggcatttattggaaagcttaactcattggtgatataggccttgaatgggtataggtttccgctatcgtatacttccgtgttgccaaccgtaacttttagttgctggacaaatgtttgaccaatcccttgaatggcagagacactagtatccgcgtcctctatcgcaacccatttatcgtttgctcccggtttttcaatgtacagttcgagataaagatatatccgagataaatcagtccacaaattgtcactgtaaagccgaaataggtaaggcgattcttgcgtgattgttgcgagcggaagcacctgacgaaagaatgaacgaacaacatacacattggtaggtggaactgagaaaatattcagaccactgttaattgctagtggactgctgtcactgattttttgtgggcaagtcgtttttttagtaggttcctaatgagtcaatacgcagacgtttatttttggttttagcaaccataggtggcccgattgatgactgcagtttatttatattttttcgcctaatttttacaatttttggagtcgagtcttttttgtatcgcttaaaatcaaaaccttggcccttctgagtgtttatgttgttggctgctttttcaagaaggttttttagtcttgatttactctcactaacgagcgaatctttgaggtcttttccctccaacacattggtgaggacgcggtttccactttccattccctgacgtccaattgcagagccaatttgctttcctatcggcagcaagtatctcataaggctcctgaacactgcgccaactcccgctccacgctgatagggtaatccccggtaaatgttgtatccaccaaattgcacatactcggacgagaatgtggaccaatccacttgtagaggatcaaaatcaacatgcattttttttaaaaattaaaaccgcacctgcgttttccgctctgtgtgaggggtccgcacggcgtgagagagggtccacccggcgtgagagagggtccgtaaggcgagaggtgggtccgtctgcgtaagatgcatctgccgtaagtatcgcattcctggagtattgtgtaggcacgcatctaccgtataacattaatctaccatagtcatgtagacaacgtaggcatcaagaatacgtatgtgttgatggacgtacgcatttctggagcattgcatatcgtgagtatgtggatgtgtacgcacatctaccgtataacattaatctaccatagtcatgtagacaacgtacgcatcaagaataaatatgttttgatggacgtacgcatttctggagcgttgaatatcgtgagtaagttgatgcgtacgcacgcatctacagtaaaacattaatctaccgtagtcatgttctttgcattattttgctgcgaaaaatattggtggctggcgggggatttttttaatctcttccattactgtctcggcttcgctgggcgatagatgaccgtggcttttaagccacctaattaaaacgaaccaaaaaagcaaaaacacaggaaatgcaatgatataatgagaaaaaagtaatacatgcaaaagggtttcattattcttttcaggggaattcaaaatttgtatgtctggcttcgttgtattagtgttattcattttaaactaaatttaataataaagttatttataatttatccaagctttgaatcggtcacaatgtgccggttgtaatcaaccataatcatttgatcaaattctcccatgacaatcatctccacaccaccaactggaattggtgaattaaatgtggctcgtacgtttgttgtgccgcttctcaacagctcaaatccacagctgtcgtcaagtgtggatgtcatgacaaaaaaggcccacccttttttgaactgggtcattgagatgtcaaatgaacgctccgaattagccatacccagtgcctcatacatgtcaacaaaggcgtagacatagtgatcttttgaaaaatttagtttataaggaacagctgggtagacaatccctccagcatgtatcgaaatttaacgcaaatcaaacggctcaaaaatgaagtgactcagtttgtagtcaccatgaaatgctgaattgccaaccaacgcagttattacgcgtcgaggaatggtcgcgctgaatacattgtactcaaattcgtatcgaccaacactgatgaatgaagacttgatttccgtcttgcgtacagcgtacgtggcgggttgtttttcaagtgttttgtaaaggctcatatttagtgagggttgtacctcaaccattttagcataaatcttgacatcatgaacggccaaacgatatttcgttgcatcatttgcttttaatgtttgcaaaagaaagacatctttggccttgtaaattgtgaagagcaagtccaaattatttaagagataaagctcttggtttcccaaatcaaagtcgagacgggagaggaattgcgcatttttaccacccttaaaaattttacaacgctctttgaacccctcgtctgttgagtcatcttggtttaaggtgtgataataccctgttgaaccaagaaaatttttcttggcatttattggaaagcttaactcattggtgatataggccttgaatgggtataggtttccgctatcgtatacttccgtgttgccaaccgtaacttttagttgctggacaaatgtttgaccaatcccttgaatggcagagacactagtatccgcgtcctctatcgcaacccatttatcgtttgctcccggtttttcaatggacagttcgagataaagatatatccgagataaatcagtccacaaattgtcactgtaaagccgaaataggtaaggcgattcttgcgtgattgttgcgagcggaagcacctgacgaaagaatgaacgaacaacagacacattggtaggtggaactgagaaaatattcagaccactgttaattgctagtggactgctgtcactgattttttgtgggcaagtcatttttttttttttttttttagtaggttcctaatgagtcaatacgcagacgtttatttttggtcttagcaaccataggtggcccgattgatgactgaagtttatttatattttttcgcctaatttttccaatttttggagtcgagtcttttttgtatcgcttaaaatcaaaaccttggcccttctgagtgtttatgttgttggctgctttttcaagaaggttttttagtcctgatttactctcactgacgagcgaatctttgaggtcttttccctccaacacattggtgaggacgcggtttccactttccattccctgacgtccaattgcagagccaatttgctttcctatcggcagcaagtatctcataaggctcctgaacactgcgccaactcccgctccacgctgatagggtaatccccggtaaatgttgtatccaccaaattgcacatactcggacgagaatgtggaccaatccacttgtagaggatcaaaatcaacatgcattttttaaaattaaaatttgacgttcttatcattatttatattctttgaaaattatgctttttacaaaatagtttacgagcttatcaggttgcagttttccaaagtgcaaaaggctaacaattttctcaaaggtcactccaacacatcgacagtacaaaaagaaaattacatgtcgaccacacgcacttgagttgggagactgaagggggagagagttatattgaatttgtttgcaacgagacaaataatccacaatgtgaacactgggcggtggccacatccctaaggagtcataatattccaaattcaaaggagaaggacaataaatgcatacccaatgagagccatgcgaggtgctggggtcaatattcactaccatacagtgtggaaattttacaatgacaccggttggtatttggtctgccgcaaaacaaccaatataatagtggcgagttacgttgttgtttgccaatattttgtcaatttccaaagtgttcattatttaaaaataggacatttttctaaagttcagtgttaatgtacatgttccgtattggaatggcatcaagcttccgctattggtacggatctcaatcagaatttcagaaacttcctttaataaaattttgtgatactgtatggcaaaaaattgttcttcaaccacttggtcggggtctccccgtatggttacaatgcgtaacactggggccgtgacgtcgccaatcatcattggttcaataaggtctggagtgtaaacgtgaaaggatgacacaccgccgctcatgtctggcatgaatcttgcctcctttttgggctgtgtaaactctgtgttgttgaagccgagaatgtaagcaagttgaggcgagatttcaacctttttaacgtaccgtgggtcagtgttcagaacaaaacgattcctactgatgtcataattaaattggcagactagacgtatctcacggtaggcttgaatccatgcttccgttcccatttcctttgtggcttcgaggatcacacgttcctcttctgtcaaatttttgatttcggcattcaattttatcatacccaattcatcaacaatgctcaagtttttctcacttaatttagaaaagtagtcatccaattttttctggtacgaatcgttatcgtcagttggcgttctcaacgcgatattgcttgtttcagcatgcttttcgcgtgccagaaggccttgcgtcacggtgttgagaccaaccaatggtccagtatctgtcattagggcctgtaggagcagctcttcgtcacggacgcccagtttttctttcgtttttcgcctaatgtactcttctctggcccagcggcgagccttgtttgttgcaagcatgaaagaattctgtgttgagcgaaccttttttgccaagggatcacttccgtcagccaagagcctgtataaatttttgctaagctcgtgggggttggtgacatttgatgatggaagctcaatccgcaccatattccctgtctgccactcaatctgaacaaattgttgctccacagtgcctatggagggccaagagtggggatacacaataacggcaagacccacctcccattccgaattgaattgcaacttgcgaggtaaacgcactcggaaagaatttgtcctattcccttctatattggtgttagacggaaggacaacataaaaagaatttgaaggcattttttgttaaaatttattaaaaactgctttttatatagatttctcgctaattgagtgtgctgtaatccaactattgaagcgagtatcgtaacctttccatttcacaagtgcatattttacaccgttctgcctctttttctttaatattttttcaatttcatacattttttgctgtttgttttctagcgttttgcataaatcatttgcgtaaaaccaaccactaataatttcattattgtcatcacgcaaccgatagacaactggtgaacgctcagagtgtacctctaccaccgtgaagagttcattgctgaagcgtgggaggtaacccttttggaacacgtgcttatacttttcaatgcgcacacgatcccccacacggtattttggctggtgtcgtagaacatttgaagctgcatcatgtaatttttgtctcaatgcttctgcgtttttaaagttcacgtctgctgggcacattccaatgctcgaattttgcgagtggttaattgcgtaaacaaggtcttgcacaacacctatccacttgtacgtgttatgctccgtaaagtagcgataaagtcgctctttgatgctccgattcgcacgctcagccattccggcatgaaattggggagaagtgagcatacaaaagtgttcaacgtcttttgtgcggaaaaactgttgcactgcgcgggcagtgaattcctttccctgatccgttagcaccttccaaggaatatatttagaccttttgaatatttgttcaaaggcattgatcatgttagcgctcgtcttggtctttacgggttcgacaaacacctgtcggctaagggtatcaatacagactagcaagtacttgtagccacgattttgtttagcaattcggtcaaaaatagccaaatcggcctgccattcagtatgcaagccgggtgccaaggttggcaaacggcggtagcgccgctttgcctggcgatgcagtgtgtatgtacgttgggtagctaaataattttgaacatcaattcgattaatttttggttgacttttccgcgcctctttcagaagcggctcaacgctcgtgaatgagacaggcgaacttaagtccttgtacaagaactcgagcaaacgaaagtttttcaaatccatatggatggtttaaacttaagtaaagtgtttttataaattcctttgccggattggccttcggaaaataaatacctactcaattgtcgattctgctttgccctttcaataaattctttgaatgctgttggctctttttggccacgcttgtccttattcagcaggtgactaacaatatcatcgacactgctggttataaatggccgtccacccgctctcaagacctgtccttcctccgacacccccagagattgagcgtttttataaattaaatttaaaatttccatttgtgtgggacgtttatttgtactcgacgcgcgtggagtttcataatcatcttcatcatcatcatcttctaattgttcaacattttcttttcgcgcacgcccaaccttgagatggcgacgagtagctacaacaatcggtcttttaatgttgaatggttttggcatggcgtcaacaacatcactcaaattttctaatttaacaccgacgggacgttcatcctcgtcctttttgagcttgttgagacgcttaatttcctgctcatatttgactgctctttccgcctcatttatggcgtcatcattttttatttgtttaattctggcacggaccagcccaattggtgaaccgtcagacggtgacagtgttgccaaactctgataaatctcttcggggaccaacaaatagcgctttgtatgttgcattttactttttttaaaactttatcaagcactatgtataattttcaatgacgttcgcaataagcggaagggcaatcgatgcaatgagccctacaatggctgggaggccgtctccgtgctgtagcaaaacgtttttggcagagcgagaacaacgtgtgcgggcgagacgacgaagcatctgtgcgtgagctttcagcttctttaaatgacgtggacgcaatggaactcggccctttagaatgttcagacaaatttcgaccatgcataatatttgttcatcggatgcgtctctaataacaattttcgcctttttggaattagacagtgtctccaaaaaggattcatttcttgcaatcaattgcgaccctttcattttggcatataaactatttgtttttgttcatatatatttgttctaaggcgaatctcttccgaactctccgggtgcatgtcaaccaaaaggtagccaaaatttttagcgcatgcgtcacgataggcttccataaagtatgcggtccttgacgggaagaggtgggtggctattgtgcgaatctgaagggcgcccgctggatttctcattaacaccaaataatgtgagtttgtacgagagacgcgcaactctttgttgaacaggtgttgggtcaccaaaattacgctcacgccccaattgtgtgagccgcgtgtgaagagcgcgtccaaatactgttgactcatccccaccaccaaatcatccaatattagcaagagtttttcttttttggcgcaatcgcgcacctgttccgcagatgggacgccgctgtgcacagtgactggcacattgccaattttaccagtgcgttgtaaattcaaaatattagtgttcaactctccgtaaccataaataacgcgctcaattggggtagagatcattttctctaaattgtgtagcagacgcattacccactctgacttcccactgcctgtactcccagacacaatcattgtgaatggatgacgaaattgcaagtccacgtgatcaatgattggaaacgaatccattttttatttattataaattcgttggcattttttatatatatatatatatatataaatacaattagatttcttttacagattctttaaaaaaatggatttaattcttgctaccgattggatacataacgcttatcccgaaatggaccaacaggaccataacaaggaaccgccaaaaagggaccagcaggaccataacaaagaaacgccaaaaaacgaccaggaggatgaggaggagacgaaggagcctagctggatcagcctcattgacgaagagcagaagcaggaccagttcaccccaatttatgatgagccgccaagagcaagtattcagttttcttttttttttaaacaaattgattaatttaggtaccccaaagacttgtgcttgtgccgaacgacctcgcccgattccgctcgtcgagcatctatgcaagcggttcaactgtagcgcgcatgagctgcacgtgttgttccgaaacttggagaagcgccgagacattgtcgagcacttgcgctctgctcagctgcgaaccgcccacttgcgcccttttgttcgaaatttcccggtgcgctgtaacgacctctccattctcgacgcacactcagccccggcctaccgcggcttcttgggaattacggtactttttttttggaaatttggtggacataattaaagattttaggtacgaatgcattactacataaaacatggaatccgtttgcatcatcccaacttgccgtgtgtcgtcgaatttggaggcggagatcacaaaacctttttcccgcttgaaatgctcactattatgttttaaatgttttccattatttaattgttgttgtttttttttttaataaaattgttgcgtaaaattttttttcattttaatttagatgaaaatttctaactgtactgtcatttttaaaattaattcattgaacacgcaacagtttttgactattgcacaacgtggaattaatacagaatataatccacgccgtttccacgcaatcatcatgcgaatccggtatggagcaaaaactgtggctgcactcatatttcaatcggcacgtgtcgtcctcactggagttccacaccctgatcaagcccaaaagtttgcagcaagggttctacgacgaattcaatacactcaatgcagaacaatgacaatctatgagctgcgtgtggtcaacattgttggagttttaacgtttgaccaaagaattcgagtggagaaactacaacaatctctgggtggcatctatgaccctacgatattcccagcccttcggtgcaaattagataatggagccacgtgtctcatttacatttccggaaaagttattctcactggggtgaaagatgtagaaaatttaaaaaattcatttgattacttgtctaaaattgttcctaattattttcgataattttatttaatacaaataaatgcttacaaaaaaaaaaacaaaaaaaaaatacattgaaaaataagttaaaaccatcgcgaatgacccgggttgggtgggatccgcttcaatcaaagtcctctttcggcgtactggtggcgggggcgggggctgctgttcgacatccattggctgtggagcgtcttccacataaccaaatgggcgcgtttgcatcccagggcgcacacgtccctttgcgtagaagggccgatagtccttgtgggcctcccgggtgaagaggtcggcctggacattacggtcaatctgtggaaaggagacgcggatggcgcgatgtgctccaccaccgtagacgaacaagtcgtcgttgtcaatgacatcatcactaaattgaatttgtattattattaaaaaattaaagtggaaactttttacatgggtccatcaatgttgtacgtagacagcgtcagctccttcattgcatcgaaattgataagctgctgcgttgcgtaggagagacggaagctccgtatcttcagattcgcacgttcatccgctctatctcgggctgtgtgtcggatgccgtagttctttgggcctcctgcgacgaactccacgatgcgcctgtccacgagttcccgcttcatttgtcccaacgcttcgccctccggtacgcacggagctccaatcttgttgacgtaatagattgagtccgtgtctgaattaccgtcactgataacattaaacggtagaagacaaaccacagtagagaacctcagcgttgttcaatgccaacacttgctccatatatccgtacagatggaggcgtgcgtacgaagtgacgaagatggccactggaaggcagttggtcaatggtgctttggcgaactcgggtcgcttccggacgacgacacggtccatgtggtcggagacgtggacaaagtccagtttgtcgtaagtcgagtcgtcgagcagcttgtggaattcggcaggcgtgcgcgtgtactgtatctcagtgtgaccgacgcgctgcgcgagctttccccttcaaa

SEQ ID NO: 333 - DNA, 2705 bp, Heterodera glycines
atggaatccgtttgcatcatcccaacttgccgtgtgtcttctaatttggaggcggtgatcacaaaacctttttcccgcttgaaattctcactattatgttttagatgtttttcattatttaatttttgttgtttttaaaataaatttgttgcgtaaaatttttgtccattttaatttagatgaaaatttcaaactgtactgttatttttaaaattaattccttggacacgcaacagtttttggctattgcacaacgtggaattaatacagaatataatccacgccgtttccacgcaatcatcatgcgaatccgatatggaacaaaaactgtggctgcactcatatttcaatcggcacgtgtcgtcctcactggagttccacaccctgatcaagcccaaaagtttgcagcaagggttctacgacgaattgaatacacacaatgcagaacgatgacaatctatgagctacgtgtggtcaacattgttggagttttaacgtttgaacaaagaattcgagtggagaaattacaacaatctctgggtggcatctatgatcctacgatcttcccagcccttcgatgcaaattagataatggagccacgtgtctcatttacatttccggaaaagttattctcactggggtgaaagatgtagaaaatttaaaaaattcatttgattacttgtctaaaattgttcctaattattttcgataattttatttaatacaaataaatgcttacaaaaaaaaaaacaaaaaaatacattgaaaataagttaaaaccatcgcgaatgacccggttgggtgggatccgcttcaatcaaagtcctctttcggcgtactggtggcggtggcggggggtgctgttcgacatccattggctgtggagcgtcttccacataaccaaatgggcgcgtttgcatcccagggcgcacgcgtccctttgcgtagaagggccgatagtccttgtgggcctcccgggtgaagaggtcggcctggacgttacggtcaatctgtggaaaggagacgcggatggcgcgatgtgccccaccaccgtagacgaacaagtcgtcgttgtcaatgacatcatcactaaattgaatttgtattattattattaaaaaattaaagtggaaactttttacatgggtccatcaatgttgtacgtagacagcgtcagctccttcattgcatcgaaattgataagctgctgcgttgcgtaggagagacggaagctccgtatcttcagattcgcacgttcatccgctccatcacgggctgtgtgtcggatgccgtagttctttgggcctcctgcgacgaactccacgatgcgcctgtccacgagttcccgcttcatttgtcccaacgcttcgccctccggtacgcacggagctccaatcttgttgacgtaatagattgagtccgtgtctaaattaccgtcactgataacattaaacggtagaagacaaaccacagtagagaagctcagcgttgttcaatgccaacacttgctccatatatccgtacagatggaggcgtgcgtacgaagtgacgaagatggccactggaaggcagttggtcaatggtgctttggcgaactcgggtcgcttccggacgacgacacggtccatgtggtccgagacatggacaaagtccagtttgtcgtaagtcgggtcgtcgagcagcttgtggaattcggcaggcgtgcgcgtgtattgtatctcagtgtgaccgacgcgctgcgcgagctttccccttcaaatcattttttttttaatatatcgtagaaaaaataaaataccatagagagttcgccaaagtcttggcgatcagacggagacccgggttcaaggccatcttcgtcgggtccagatgaatcccttccgtacgcagaaactctgcgacgaaggcctgacgttgctcttcggcgtcgcatccctccggccatccactcgcctgcactttgagaccgacgaagctgttgacgtagctactgaatagcgtgtcgtcccactcagcgtagtcccacacctattgaaattggttcaaaaaaaatgctttaaaaaaacaacctcaaagaggtctgtgacgacgtagccgagttgaagtgctttgttcagctccacgtgggtgtacgcgcacacccacgatcgtttgtcgtcatcatgccgacacggtcgttgttgccgacggtccgcacataagccacacagtggaaatgtgaagcgctcgtctttggtacggtagccgagaagtggcacacggatgtttcgtggcgccagaacccgtacaaggagaaggccacggaaggtgttgttttctgggcatgtccacggaagaggtgccgtcggtggatggaggagcacttcacgcgtcagcaccatcgggttccccacgggaaagggattcaccttctaaaatttaattgttgaaacgaacccataaaaaaaatgcaaaccataacgtagggatagaggctgacaatgtcgatgcacagcacctcttcgtcgtcggcgcacacgtggtggagcttgaagggctccgtgcggcctcccctcaatgcgtcattgcgggggtccagtgggcatggcgtgaagacggcctcgtaccgttgcttcagctcgtggtcacggcggaggcgctccttccactgacagccccacatcacatgtagttcacagcctatgttgatgttccaactcaaaga

SEQ ID NO: 334 - DNA, 14667 bp, Heterodera glycines
tggcacctattatctgttgatcattgcctctaaggatttttttttttgatcattaggcacacattctcttttgatcagtgccactccccaatttttctttgatcattaggcacacatcctcttttgatcagtgccattctccttttaatcaattggcacatatttttctgatcaataccattccccttttgatcaattggcacatattatcttttgatcagtgccattccccaatttctctttgatcattaggcacacattctcctttgatcagtgccattctccttttaatcaattggcacacattttttctgatcaatgccattccccttttgatcaattggcacacatttttttctgatcaataccattccccttttgatcaattggcacatattatcttttgatcagtgccattccccaatttttctttgatcattaggcacacattctcctttgatcagtgccattctccttttaatcaattggcacacattttttctgatcaatgccattccccttttgatcaattggcacacattttttttctgatcaataccattccccttttgatcaattggcacatattatcttttgatcagtgccattccccaatttttctttgatcattaggcacacgttctcttttgatcagtgtcgttctccttttaatcaattggcacacatttatttttgatcaatgccattccccttttgatcaattggcacacatttttcatgttgatcaaatcgccgcgatttttatttgatcagtctctttttcgatcatttcctttgatcagtcccaccctgaaatattcatttatacaaatatccatgccatctatcatctatgattctttcatgcatgcattattcatgcaaacattcattcatgctagccttattcaatcattcattcatgccatgtgctttcatagagtcatgcggttataaattttcatgcattacttataaatgtaataaatattataaatggtgcggaattagcttatcgcattcagatgagaaccaaaaatctgccttccaagctttccaatcccgaagttttaacaagtgatgagagttcagcaagttttgaaagccctgcggggaccatttatgaatcattcgaggcgttgagcattgatagctcaaaagtagcttcaagccctgaggggtacactaatgttggggctgaaatcgttattgaagagactgaatccaatgaaaaccctgaggggtccggatatgatgaagtgagaaacgagggtagtagcgtcacgtttaaagcgatggaagtggcccttgaccaggtcgatgcagagggttttgcgaataatggctttgatgatgaggagcctgaagcatgtcctccggctaaagatgtgagcaaatcatcgcttctttatttggtttcgcaagccggagatggctacgtaattgcttgcaagaagtcgcctaagtcgaagccaaattggccattcttcatgaacatcgaagacaagctgattgagtcggcccctggctttcagcgtaaacttgaagttggtgattttgtggcggtttcatcatttgagtggaaccagaagctgcgatatttggctgaacatcgccaagatgccacacagtcctgcaaattttggttcaacgaaaacacgcaactgttgccaaagcaggctgatgccactgacgtggttcaactcatgtacatgaacatcggacgcaagcagatcaccggggtcgtttactggataaagaggaagatccaaagcgttccatccagcttcgttcacgcaaacatcgcgtgctgtggtctagcggtttcggcacgcataaatcggcgtcatcttgatggcatcaatccggaagacctcaagctgggctcacttgtgacggtggttgttgccaacattccacaggactcacttgtatcaatgggatacattctgcctgatgcttcaccgtacaaactgggaacggaaagaagagccgaaacacctgaatttttcggtgcagttgcgtgcattcgtcctcatctgttggagtggccaaatctgaatgcaaacatgacgcccaaggtttatccatgctccgcggatactaaacatcatgttgtggcgatggagcatgttgttggagcagctctccagattgagatggagcgagaggttgacatgatgattgaagcacgctttgaaggaagggctcggaagttcgatggtgctgattgtctgattgtctttggttcgagatcgaagaaagaagtgaatgagttggccaaggtctgggagccggagtcccaagtgaaggtcttcaaagaattgggtgagaagcattttgctctgggagtggtcaaggatgttgaggtgctccacgcagaatacgaaaagttggaactccacatcgtcatcttcttgaacaacatccaggaaaggaagaatgtcgacatcgcaagaaaagtggatgagttcatccagggtggcagtgttgtcatacacccggtccctgccactgcggttgaagacagactgttctgcttccgctgcaacgtgccttcgataattgctgatgaagactctccaaggggaaggataatggcagtcctactgggccgtccagccatggagggcattcgtatggagaaggaaagcgttgatgactcaacggattcgtggatggaagaagagggaccactccaccctgcaattcttgctctaaactcaagacagagagtgactgcacgcctaatgttgggaggaggtctggtgcaacaacaggcgccgccaggcaccggcaaaaccaaagtcgctgcggcgatcattaaggcaatgatggactccaatcccgggttccggattgtggtgatggcttgtgccaacattccagtcgcaaagctggtacaagaagcggaaggaacgtgtgctgcaaatgatttggatggagcgcgagcaattgccttattttccggttttgccagatgcaaatacacggatcaaataaaagatgttcaacggcatacgctgccgaacaaagtaaactctgaggagttcgtcaagcagttatcgcccaatgtacagaagcaagtgaaggagtaccttgctcattgtgagaagaacccgcgcttggcgcctgagagagcgattggaaaagtattcaactcatgtatggcaccgaaaatagtcttctcaacagctgccatggctgcgaatttacttcatggtgaaggaaacatcactgatgcagacgttttgctctttgatgaaagcactcaagctcagtgggcagtggtggttcacttggttgcgcggatgcccaagctcaaggcattgcttttgacgggcgatcgtcatcagctcggagtgcatctgcaagaactgcctgacatcttccactcaggatatggattggaaagcgtcatccttcaagcagaggcttcgatagggacgaactatacattcctcacaaagatgtacagaagccatccatttttggcaaagctcatcagctatgcctcatatgaattgcacaatgagcaactcattccagcaagaagcgctgaagaacgctcactcatcacgggctcagatttccttctgccggttcaagaatgtcctgtgggactaattaatgctttctcgtcatttcgtgtggacccaaaaagcgattcgctcacagatgaccatcaaacagaagtggcatcgttcttggtacaagcacttttggaacattttggcaacgctttttcgtccagaattatcgttctgtgtatgtacacgtaccaaacttcggaaattgaacgaaagctgaagcactgcggtgttcgtgcactcacagttgatgcctatcaggcacaggagtgcgatgtcatcataatagtgacaacaagatcaaaatactccgaggtgggatccggaaggacggacaacatgcacttctttgaagacgatcaacgggctactgttgctctttcaagagctcgccacgctgtcttcatcattggagacttggtctcaataagtgcaggacaagtgtggaaacgtttcatcgaaatggcgataacaagaacaagcgtagtccgagccgagtatgttttggcacttttgggacgaacactcgtgaggtcgtcgacatgcctatttgattcggccaaaagagaatcggtggaggatgaaggctttcttgaaagttgggcattgaagcatgggttgcgcctggaccgaacgaattcctttggacaacaacaatcacagcagccgcgagctccctcattccaattccagaatcgccactttcctgcactacagacgacagggccctcagatcaagccggtccatctggcagcggtggtcaacaaagaggtgcgcctactttggcaccacagtatggaagaggtcaaggaagacgtggcccggacaaccagtggatgcactacggcggaaacccgaaacgacagaagggtggcagacgctgaactcacatgacgtcctgcgggtctcacttctctccttttcttcaatcagcacggtatgtctttcggtcattttttttattattaattagttgggtaattttcctttttgacccctatcatttaagcactttattttctttcattttctctgcactcacaagctttttgatttcacccctccttagcttccgatgttcgcaccatttacactgtgatacaatcagtaaggacactttcccaccgcattacggttttaatagatttccgctattttttctcaaagcgatttttttttacactagttccgataacaaaatattgtaacactggaatgccagccacgcccattatcaagggcctttaatctaagcatttcacattcattcattcattcttccattctctcgttttactatcctctattttagatattcttgcacaattccactgctaattctcatctcacattcccattccctctcattatgtttcctttctctgatggggatccacctaatcgaagcgctgcggcgtcaaacaatgcactgacagaccctgaggggctctccaatgatttgcctgagttatcagtagttgataaattaatgtttgctggaaagattttaagcacaccagcacgtttgtctgatgtggacaagctccatacggacttagttcggactgaggatggtgtcaatcgcatgacacgtcaccttaacaggacgataaatcaaaccaatagggacttgactgaactcaaggatgatactcaaaccctgataactcaagtaaatactctcgcaaatagttatggtacagttcaagtgttgcaaaaccaaaatcagtcaccattagtcaacaaccctccggtcttaaattgggcaactccctctccactcaggaatccgaacaatagctttggcaatgctaatacttcggtgattgaagccatacatagtgaggaagaggatgaggaatttgaattaaatccttcgggattccatcatgttaacatgcttttcgctgaaagcagtccctctttcacgatcttctctggaaattctccattagaatttgatcgatgggcaagaaagttcatggatctgcttgactgcaatggcagaaagtgggatgattctgaaaaggtggcacgcctcaaggcatgccttgatggtgaaccaagacgaatctttgataatttaatgcctgcccacaaagcaacttcttcggaagccattcaaagaatcaaggaaaaccttgacactccacaaaataaagaactcacctatcaggcactaagcatgtgtaaacaaagggaaggagaatctgtagatgagtttagtgcacgactgattcctctaattgaggccaccacggcagaccttacaactaatgctagtgaggaggtactctgtcgagcatttttggaaaaattgaatccaaatctcaaatttctcactcgaaccctgagtgggcccgtcagaagggatttccaaatattgagaatgaatgcacgggaagcagaaatgatgcatagagagattcctaaatctattccagcacctcttttcccaatttcggaacaacaaaatccgagattcaacaacaccgagccgccgaaccacccggaaggcaactttagaacatgggctcccacaggctctaacagagagcctataagtcccagacagaggaaccggaacaattgggataacaatgcccaagcctcaagaggctcttttaacagatcaaataatcatcctcaaaatgacagaagatggaacaatcgcacttccagaaatgatagacgatggaataatcaaacccctcaaaatgaccgacgctggaatgctcggccagtttgcaactactgtgggaaggttggtcacctcgcgtttaaatgttttaaacgtcgtgaggaatttacccaagcatccaagaatttgaatttcatcagagcaattgatgaacaaaacagattgataaacgatctttcaactaaagtcaatagtttaacttttagaaacgaccaatccgctgaggcggcctctcaaaatataaacactattcaaaaactcaccaaatctagtacagacaaaagtccatctatgatgaatgatactctcaaagcaccctccaaaataagtaattgggaaacgagtaaaatggttcaaccgaaattttttcctgtgctaatgggtttgactcttatttcatctctctcttcgactttagttaaagatttcaatacaatcccagctagtccaatgatttgtcaaactcgcgttcaaccaatgacatggtctcttcccaaatttccacgatgccccaggatgtcaattgacacaagcaaaccactaaccaaacaaagacgcaccatctattttcccaattcacttgaattttctaccaaagcctgggcctgtcgcagaattatcaaaagtattcagaaatatactacaatcagtggtgtatctgtagaacaacatcttgactctgaacaaatagtgatgagtcatgatgaatgtctacgaatggcaaacaataagcactgcagcttaggatatctcaaaaatgattcagggttgtggcacacagataggaaaattgaccagacacctcgtccttggttattaggctctttttcctggaagaaagtccagagtgagaattgctttgcctttgaaactgaagtatattcgcacattggtgctacttcaattataactcctgcgggaaccgctcaagcttgtccatatgagaaaggaaactgtgtcctctttgacaaaactgtcttagtctgggtccctcaaaaggacaaaatgtgcaaatacagtcccatcggaatcatggatggacataatcttggaaatgtttggctttccactttaggagatttaggtttaaccagctcgattgtcagaaatatttctgattgcggtcgaaatctcactgtttctgaccaagggccagcttttacaatcaactcacaaaccccacgtcataaaaggggtatttttggattagattcagaaggtgtagtcacctcctctcagttagcatcacaactttcttatttacacactaacatatctcgttctgttaacattgcttttgctcaagcatttaactctttttgtgatttaatgcttgacacacaacgttgggtacagtcatcctatctcaatgatcccacaagccttacgaggtttattcaccaaaataatttcttaattgccaagcgagttggagtctctcttctgagaacatggccatgtgtccctctcagtcagtctgactttgaatttcgtccaacccataccaattcatcctgttttgaatttcttccaataatagtcaaattaaatggtaaggaacatattgctttcttgaaccctacgtatttgacagtctctcttcattctaaaacagctccttgcgaggaccagagaaatattttaattcaaatggctgatcgcacaattgaagttgaccaagtagacggaacaatcaacaatgttcatgtccatgaaatcagggaggttgagcttgactttggtaagccaacgcgcattccaaagctctcaccacatgccttccatcatctggtcattcttaatcttaccgatctcgccacacatgcctttgcttcaaacttggtacaagtaagtcaattcacataccgagctgataaaactcattcctctgaaattaaaactacgctctctgatgaatggtcagcactagaagaatctatagttcaaaaagctatgggaaattattccctggcatggcaaattggtatcaccatttgtcttttattgtgcatggtagatctcctgacacgccttttctttgcatacattggtatcagacttcaagatcccgtagagacattaggtcgaccaatgatcaccactatagctaatctttttggcaggaagaaacaaaatctagactgcgataacaagaaccatcctaattcgccaaccaaaaccattggtcacattacttcctcacatcttcgaagcgttgctgcaacgcccataaatgaggctacaggtcagtccttttttcgagatacgctgaatggtaactcatgtaactttattgaggcataccctcaatcatcaaactccaaggagttcaaaaaaatatggtttacaaaagaaactaatttctctgcttggttgaataattatctctcaaaaccagttaatcacgaaattcctctcctacttccgcggaactcaggcgaattagcacaattcctcgatgttgcaacacactttggaaaagaaattccaaatttcaattcaaaaattggtcccattagcagaatctcgggagatgaacatcttaaatgggacaagcaacgagtcgctgcttatcaggtaattttggggcatatacacatgctgattcatggtagaacccaaaacattccacaacaacgatttcataggcctcgctttgtaataagagagttaccaatgttcttggtattgtgcatgatattgcttccagcaacccttgctgccccaattacctcaaaaggtcctcctccgaacttaaaaaactcaacctttgagtcagcaaattttatatcagcattaccaaccattgtagccataattatattgagtgccttagtgtattcaaggaatcgttcgccaatcagtgctattatacgtgcaaaaattaatggtttagaaattagggcactagctgatacgggagcaacgataagtgtagctcctctctccttagcaaagaagataggatgcgagctttatgagtcaaaagtggaagctattagcgtctcctcacatgtaataagcatatgtgtcgtgggtgaagtaataataaaacttggtgatatatctctgcggagttcaattaattttatacctgatgaccaagcaggagccatgaaaaattatgaaataatcataggatgtgatatctttgttaacctgccaccaataacatttgacttcacaaaaaaggaagttatgataggtaagtcaaaactaaacatggaaacaagtcatagtaccctctcaaacctaaaagttcgagctctagagcactaccgaattcctcctggtactcaaatactggccaaagccaggatagatactatcttgccaatagacaaggacattcttgtagaaaatttggacccaagattgtctgatgaacacctaagcacaccagccacattttcaaggcctaaggacaatttattgaacattgtaatttgcaatccaaccaattttcctaaaaatataacaaaaaaaatatgtgcattgcgactgcatgtgaattaaacaaatctgatcatcctaatctcgtaatgaaatgcacctcgggtgagatcaatctcctgagggagtcacaaaaaataattcacgcagatccgtcatttaaagttgatttttcaaaatcatcagtctcaggtgaaaatcttaacaaattaaaggaattgtgtgaagaattccaagatatttttagcaaaagtcaatatgacttaggctcttgcactgcaggagagcatgatatagtaaccacgtcggatactcctgtgtcgtcgaagccacaccgaacaccattcaaatatcgtgatgaactccaaaaacacattgatcaacttttggcatccggagtcatggttgagtcggacactccgtgggtctcaaatatcgtcctagtgcagaagaaggacggtgggttaagaccatgtatcgacttccgtaaacttaacgaagtgactgttccggaccattatccacttcctagattggaaacaattatggaacgaataggtaattgccgttactattcaagtttggacctgtcaagtggatacctccaaataaggctaacagaaagggcttccagaaaatgtggcttgattactgaaaataaaattttccagatggttaatcttccttttggtctaagaaatgcaaccagtgcgtttgccagatgcatggcgcatgtcctcacaggtttggacgattgtgtaatcgcatatgttgatgatatactggtatacaccagggatgataattttgatgagcatctcaatgctttgagaagtgtttttgaaagatttaggagattcaacttaaaattaagccctaagaaatgcacattcgctgcggcgaccatgaattttctcggatacttagtcaatgctgttggctacactcctagtcttagcaaagtggaaataattaaaaatcttccagacccaaaaaccattcgagaagtgaaacacgtagtaggaatggcttcattctttcgtaaacatgtccctaatttttctacaatcgtagaaccattgaccagactaactaaaaaggagagcaatttcgagtggggtacagaacaggctgcggccttcaatgaagtaaaaagaattttgagtgagaaaccaatattggtgtttcccaattatgataaaccctttcacatcttcacagatgcctctaatgttggccaaggtggcgcactcatgcagtggaatgagttggcggaggcatatgaagttattgcttattgcagcagaacgctgtcagcgtctgaacgcaaatggcctgctgtacaagcggaattgggagcaataatttttgctctgcgaaatttcaaaccctatatttttctgacagaaattgaattacattgtgatcataaacccctcgccttcctacttaaaaaggcagaagcgcatccacaccttgcgcgttggttaattgagttacagaattacaatattaaaataattcatgtagcggggaagcagaatcttttagctgacggtttgtcacggtacccacatgaaagaacccaagagattgccattagagatttggctgaattagaagacatagcaaattttcccgtctgtcttgcgctgaatatgaagccaagaatggttcatgagcattttcttttaaccatcactgctcgtgatatagaaggaaaaacattcgccattgatgttcggaaagaacaaaatgacgattctgaggttaggaaattaattgaatttgtaaattttggttcattccctgaggggaccacagaagttgaaaaggaagatattgcatcaagagcggaaaatttgagtctttcctcaggcatattataccaacacttaccagatcaaaatgctcgaatgtacattccgctttctcttcgaccactaatttttgaagcttttcatacttcacaaataaatggtggtcacatgaatatcaaaaagacattagggaaatgtagaaagttttattggccgattatgcaccgtgatataaccaattggaccagacaatgcatcacatgtcaactaagacattcacccaatccttcatatcgtgcataaatgcaaatgccaccaaaaaatactctcttcgctcaaattgcacttgatttggcaggtcctcttcccctcacgcagaaaggtaacaaacatatccttaacataatttgcacatttaccaaatatgtaatctctgtacctgtccctgatgctaaatctcaaacaatagcactagcattttttaaacactgctatttaaagtttggaggctgtacgagtcttttaactgataatgccacggcatttacctctgatttttttaagtccttctgttcgcttctctatattaataaatgttatgctattccccattggagccaaggcaatgcagtagttgagcgatcttttaggacatttcacaatatacttgcgaaatatatttcaagtgaagaaccagattttgatgaatttcttgaatgtgccaacttctgctataacacatcaattcactcttccacaaaggagacccccttctttttggtctttgggcgagacccgatattttgcattgagcaaattctgaatcccaacaccgaacccgaaaacaccagtgaagttgacaatgtcaagcagaaattagttaagtctcttagaaaagcttgggaatccgctgcggcggtcattaaagaagctcagttacggtcaaaagtacaatatgacaagttagtacgaaatcaaaccgttcaaataggagatagggtcctattacgcaattacgcaggaaaagtcaaaacatccaagaaatttcaattaccctggaagggactttatcgagtcattgagattaatggtgtccttattacaattgtaagctgcacatctcctcaaacgaacccaagaattgtacacattaatcaagttaaaaagtattttgagtgctcaggacccccttgcaccacgaaaaatcttcaaaaagatgaagaacaagcactaaaggaggtagaatcaagagaacagatcaatgtacctggctattctcatgactcctatcagaaaatttctgataacacagtattaatagaaaacacacctgcactcacccctaatccctcacccccttcacagtccaataattaggtaaaagaaaaagaactaaatagaaatctttgctcaaaacataatctccgcgaaaaccctaggaaaaagaaacattttggtaacttttcggaggactaattacctgggatagccaaattcaatcattttttccattcttttaatcatactgtattttaagtacgtggaccaacctcgggaaacaacttcagcctgtagaataccaacaaaattgaacagtctttcggaatttttttttaaacaataagtcctgcgggactatttattgctttatctctcctttatcagttctgaggaacttacatatcatcgttttattaaaaaatatattctaatcaaaatcttgaaacttatcgctcttcttttgatcctatacagttcgaataattatctttaagtcttaaaaaaaaaagaatagtatattttatcactaaccatttttattgtcactaagcaaaatgacatacgccgcggcgttcgaaaattttaatcttggagagatgaggatgatttcgctacctgatggccattctttgatggcctttcaaggagcgaacgatccatttagtaacttccatttttcgccatttgttcatgaggaggaaaaatactgctgtgtggagcaggcatttgtaatgaagaaagttcgtacatacgaactcaatggagtggcggcggaagtgatgcaatttgtccacaaagacgactccacaccaaactccccgcggtggcccgacggtcacccacgtgaattaaaatggttcggacgtgaagccgaagagagagcctctcccgccactaaaagaaactggtcggagaacgcacaaagaagctccatcgctttctttgtggagctgaagtttcggcaaaatcagcacttggcagctcttctgctagcgacaaacgacatgtggattgcggaagcgtgtaaagatcgaaagtgggctgtcggatactacaaagatgatccattcttgcacaactacccaccagaaaatggggcatttgggcgaaattggatgggcaacatcctcatgagcttgaggatgcgaatgctaaatgagcagcaaagtgttgctggtccttctaggcaaattggtaaacgggaggactcaatagcttataattaagaaaactatgaggagttaatataattttgaaactttggtctttatattatgtcttgtcacagatccgccgtctgctcctgtctatctcatagcgcaggagcttggcaatgggctgataggagctaaaattgattttgacaacagctttcacgcacatttgttcgtgctgcacgagatatgttctatctgtcgaagctggtcgtatggctatgatgatatgggaggtgtgtgacaagaaatttttgtaactttcggtcgcgcgcatacgacttaattgtattaattgtgtgtagtacgctgatctattcctctaccaccactatattacatttccgtgttatatttaagtcacgtcccttcttctcccacagcattgttccttatccattcatttgttattttccatttttatattttgttctgcatttctcctccggcataaattgtgtttattattttattgtgtgtccaaagttgagacacaacaattggcgcagtcagcagccatggttctcccatttgaagtcgcgctgggctgcgaccctacctcatcaaaaccaatagtcccaagacgggtgaggtccgcaaaatttag

SEQ ID NO: 335 - DNA, 832 bp, Heterodera glycines
  unsure (1)..(832): unsure at all n locations
ctcccatcccaaagggcgctnaaaggcacgggataccagccaangggggcaatcggagttcagtcgggagtcattcagtggaatggctaatcgatcnccgcctgggaggcgcccncaggcatccatcaacatcccttccctttccaagccctgcggggcctaattacggacgcgtaagagggctcctctggactaaatccctcattaagcactgggtatgggacttcacggctttactatatatatatatattcgttaacgagatataaattaaaaattttctaaatccaaataaatattaaaataattagttgcacagtaaaaaattcatttaaatttaatttatttataatcaataatttatttgttcacaatttttcggaatactcaaattcaatttttccctttttggatttattatctgatgtgatattgtttctttatgataattgaagtaatggtaaaatatcatttaaaaaagctgttttagaattaatataaataaacacatttttgcatcggatctgaaattttgaaaagtgatatacttaaactgtcataagaaaaagtgcaatattttccaaccatcaaatttcataattaaaaaaaaagaaaatacttaaatatgcaggtagaaataagtgaacaatctgcatacataaaaaccgatttatgaaaaataaataaatatttatcacaatgaaaatttcgaaaattgtcataaacttttcatgttttagtaaaattttagacttttgttattcttgtttttgtaacctggtattatattgatgaaaatattctgtatattcaatatttaataaaaacaata

SEQ ID NO: 336 - DNA, 7006 bp, Heterodera glycines
  unsure (1)..(7006): unsure at all n locations
cagttgctggataatttagctttatctttttttactcttataattgaaaaaattattgcctattatttcctaatttggggaatattttaatgtatttaagtaataataatttccctcccgtaaaaatgtcatgttatggaaaatataagaaacttttctgtgatagttttagttgctaattaagaatctgccagctttagttattattctcagaaataacccataagtttattctttacaattatatattttttacttggaaagtggtgaagcaaatgcctttttaagaataaaaaaaattttacaacaaaatattatattttagacacaagtcgaaattataattatgacaaaaagaaatgaaattaaataaacattccaaaaatgacatttagagatggaaaagagaaatggtggcaataaaatattataaaagtgagcgaattttaaatttttaaaataatgccaaaatgtacaaaagtaagggtccgtatcgttttggcgccgacgttttggcgccgacgttttggcgccagggtcgttttggcgccgacgttttggcgccgacgttttggctccaagctataataaaaaaagaaaacacccaaatttaaaaattttgtaaaacaacaaaaaaaacgtatttttcgcgaaggtaatactgccgatggttggttgcccccctttttgaagaaaatttttttgttttcaaaagtcatgaaaacatgcttccaatggttttcagggtcgctgctcacgaaccaggcatccatttcgaccaattcggaacccggagccgaaattcgaacaaaaaatcgaaaataaaaaatttcaaaattctctttttgtttctaaaatagattaaaacaaccaaaacgttttggcgccgacgatttggcgccatgtagggaggaggtagaaatgatgaaatcgttataatttttctgacgaagtctatcaaagagccggatttaattcttcatttactctttttcgctttggcttatgttctcttaattttgtatttaggtaatgaatcgtcaaattgatacgaaaaaacaaaagcctaaaataacgcatgaaggccagcttcggccggtgggctgatcgaatgaaagaatgtttcggagacggcacattctcattggcacctccaatgttctaccaaataaattgtttccatttcttcattttgttaattattatatttaacgaaaaatttcattttttataatttttacaatttcttcctgcctttttttcatttttggcttggcgccaaaacgtcggcgccaaaacgaccctggcgccaaaacgtcggcgccaaaacgtcggcgccaaatcgtcggcgccaaaacgtcggcgaaaaaacgacctggtccccgctttttatttttcaatttggcccatcccttgttcttatccttttttcaccccccctgaaatttttttaaattatattttctagggtaattttatgtgctgaacaaatatatgacgtttatttttagctgttatgtttttacgtgtgttacgtgaaattttttgactagtcaactacagaatttcgtcggtaataatgtgctttgaccccccccccccccgatttttcgaaaaaataaagttttcaaaaagtcgtgtaaaacgccttccctggaggtttaaaattcaaattttttaaaatttttaatttttgttctaaaattgataaaacttcgactttttgttcgaatttaggtccagggctcggaatcggtctaaattaatgttagattcaaaattacccagaaaaattattttaaaaaaatttcaaggggtgacaaaaaaggataagaacataaatatgattattttgattttcaaatcgtttaatggcgcgctatttctaaaaaattttgggaacaaggggagggggaggtttggaggtaccgataggcgccgcctggaaacatttgaatttgagtgcaattttgttaaagattgtgtaaaaaaagtgcctacctattttgtaatttagagcaattttttaaagaaaattaatgtttttttggtcagtcgacggggaaaaacccgaattttgaagaatttttgagaaaaagaatccaattttaataaatctatttttttaaataaacaaaaatttactttaaaaaatttttttatagaaacaatcgcttcaataaataattttcactcagttatagagaagctatccttggttcttcgattcacaaaaggtgctaatttaggcgattgacaaataatgaaatcggggcgattcacaaaaaagtttaaaaaccaaatatccttatttcgtgatttggtacatattcatgattttatatccatatctcccttccaataaatcacctggcattgggaaaggcattggttcgttggtatcccctactacgacatggcactcccattttgcggcaaagttcggcgttgaaatttgctgaaccatgcgttcattgatgctatcggtattgtttaaatcctcgcaacccataacaaagaagcgtgaatcagctgaaataaaatgaaaataattaattctaatagattaaaattctgtctccctgctgacaaaggagttgtactgtacaactcatgagaataagcatgaaaaacgcgtttctaacatggttagaggcttctaggtataaacttttcatgatgatttttttaaaatcaatgaattttttaaagtctaacgttaaatcaagatttttaaggctaccgaatataaaaattagttcggctcaatttacgtttaaatgatttaaaatttttaatcactataattatatatgtatgcataatcatggtaatcatagcatgtttaatgcttttaagtagagatcggcattttccacatacacgggcacgggctacggggttggaaacccgtgttcaacagtgacatggggtccgtacactggcacgggggtttctttaaataattttttcaggtaaaaatcaatttcaaaaatacaattttgaataattatttaattataaaatgctgggctaatttttttgtgcttaatttagcattttagtgcattttttgtgattaattgacattctttgtaaaattttgacgaaaacagtaataaaaacggaaaatacatagaactttttaaaatttctaatttttgaaattttaagccgttttttaagaatctggcagtattaccctttttattgcagttgattttgaattctgaatttttattgccagtaaaattacaaaataatgaacagatacaacccgaattcacttccactttcaaaatttaattaaattttatgcatttaaatgattattttggcgaaatgaaaaaaaaacacaatttagctggaggaaaaaaccccgtagcccgtgtcccgaaatatacgggcacgggttacggggttggaaacaacacggggtacgtggtcacgggctaaaaccccgttacccagtgaaaccctgtcagcccaaaaaaacacgggttacgcggtacggggtccgtaaaccccgtgcacgggtctgtcccgtggtcgatctctacttttaagcaataacattaaaattttctttttaaattgtaataatctattaaaattaataaattaaaaaactattgagtttcaaaaaagttaaaataaaaaatcatgattaaaaacttattgaaactttatgaccataacttttttttattgtaaaaaaatttcgatttattattctggtagataacttaaactattaaatatacattaaaatattaatttgattgaaattgagccaagttagtaatttatatgttttccattttttggttttctagttcttggcggatttaagaaacgacccagcccgatcgccttttaccggctgtacaatttcctttgtagcaatagaggttcttggcagatggacagtcttgaactcgaaatggaaggtcatccttaactccggttgacccccaggcacatttcaatgcttttcattaaaatatttattaatttaataaaaaagcaaaataaaaaataccgccacaaaaatgggggagaaaagcaaaagaaaccaaaattgcggcaatattttgaagagcagtgaagaaagtcattttgtgagttttcgttttttgattatctgtcggtcaaaagttttggctttatttgagcaaaaaaacctaaataaaaatgaattcatttgaaaatcaacgcacccaaaaattaattttattggattttgggaaatgaaaaaatgatgatttgatggactgtgtgctgatcgtggctaatgctttcgtcagtgattattttcgttcatacagcaccctgtgagtgtgattcattgggaaagtggtggtgctcagcagggttcccagttttatatgtttaaaaaaattttaaataacatttgcgggtactttgttagaaaatatataaaacaaatacttataaaatttttaaaatctttttttcttgttgatttataaataagagaaaactcttgtagcataaaggattcattctcaaacttaatgttttaagtaaattaaaagatttaaagtttttaaaatattttttttgtcggaacgaaaaatgataagctgttttcagcctccgtacattaatccagtaaaaaaaattttataactccggtggaaaagctcaaaacgcctaggtattaggttttgaggaaaactttattggaaaataaatataatatacattaattattaaacagaattttttttttcattttccgttgcgtatttaataattttctttaattttaaaataaatttttaaaatgaacaccagttttttgatcaaatatttcctgttgaagatcaggtatattcgtcgatgaaacggtggttgtgatggaatacaaaattgttgcgaaaaattattcatgctgattggggaaaaaatggccaaatatgcactaaaatatgcctttagagcagcaaaaaatggcttttactctcaaaaaatgcaataattatctaaaaattcagaattgactttaaaaacatcaaaacaatatggctaggaagctttttagacaattgtaaaacatcattttattttaaaaatttatatatgcaattcctatattttcatattttattattttataccaaaataaatttttttagatcaaaattttttcaatagtttttggaaaagttcgaaatttttcggttttaacgttgtatttttattaccaaaaagtcgatcttatttgttagggggtgtattttttcgtttttattatttttctatgaaaatttgccaaaatgaccgaaattgcgcttgaatcgccaaaatggcaaaatatgcattattctcgaaactcccaagaatgcttttatgcactaaaagtatacactaaatcaaaaaaatttaacgaagaaatgttattttcgattccctttcttcatagcatataggcagaaaaaacatgcatatcataaatttatactctagttatcatgcattcattaaaaataggcactgttttagtggcttaataagaaacaaaataattgaggaacatgaaaggcttaaacaggcaagttgaggctgacgctgcgattcacaactccgtcagtaattaacaattaaccagtaatggacgcgcaatccatcagtaatggtgaatccgtacaatccgcttacaaagggaggtggccaagtgtccgtgggatttcggaatgagattttttgggtagatagagcacccatgggttcttaagaaaaatggttttattttctgccaaatgagcacgagtgccgagttatgacgtgccaaagtttttaatgattaaataaaagaaatacctatttgcacaagagcacggtgtccagtggtgtagcggtagtgcgctagtcagcatcttttagcccagggttcggatcccctacgtataaattagtttttttatttttgtcttttacgccaagtcaattataaaaatttattttatgaaaaaatttttatttttaattttttttaaattttttaatgcgcaaaatattcaataaaaatattcgccaaaaaaaatattttttaatttgacagaatatgtatgtattacatttatgtttaatgcaatttttgatttttaatggaataaaattaaaataaatattttgataaagaaataaaatttgataattgaattgctcacaaaaagcaaaaataaaaattacaaaatgaatttacacataggggattcgaacttttgacccaaaaaaaattttgactaacgaattacctctacactaacaatttctttgaagaaaggaaatagttgttccttttctttaattataaaaaactaaaaactttggcacgtcataactcggcactcgtgctcatttggcagaaaataaaaccatttttcttaagaacccattggtgctctatccacctaaccaagtttcattttgaaatcccacggacacttggccacctccctttgtcagcatcactttgtccgcgtacaccacccactcgccgccatcttcctttcttttcctgctacactcttcttgcagcacacgtcgggccttgagttcctcttggctgagcgaagggcgaattcggatgttgctcatccccattttttgattgatttgcgcgcgcactttgttccattgtgccttccattgtgccaaagtttgtttctgatgtttggagcatccaaaaattactttcatcaatctcgggcggttttgacctgtctttgtttggtctggggaacccattctgtaaacagtgattgggctctcgataccaagcttatcgagaacgcctgagatggcagttcggtcctcagcgactcgcttggacggcttttgtttctgcgattcggggagacccattacgacaacgcttcgccgacgctcatggtcttgaaccgcttcgtccgcaatttgccgctgtttgagagtgaaaagtcactttgnttgctgtggacttgttgtagaagtgtca

SEQ ID NO: 337 - DNA, 5278 bp, Heterodera glycines
tttttgatttttaatgggaataaaattaaaataaatatctttataaagaaataaaatttgataattgaattgctcacaaaaagcaaaaataaaaattacaaaatgaatttacacataggggattcgaacttttgacccaaaaaaaattttgactaacgaattacctctacactaacaatttctttgaagaaaggaaatagttgttccttttctttaattataaaaaactaaaaactttggcacgtcataactcggcactcgtgctcatttggcagaaaataaaaccatttttcttaagaacccattggtgctctatccacctaaccaagtttcattttgaaatcccacggacacttggccacctccctttgttagaatttttttttgagaaatgagcaaaaatcttgcgataaaaattgtttaatataataaaaaatataaatgatttttaaaatatttctacttactattttaataaatcaggtttttaaaaataaatcttactggcgtattttcactgggcgaaaaacccctaagagggggccgaacaatttggctctgtatacatcaaagttttgatgccctgcctttttgttgttttggaaattcttcatgattttttttttgcatttttggcggttttcatacccgattcttattgttagcactaataagatggctaattccttccggtcaaatgatgggctgaagaataaaaggagaaaagtaattagttctaagcatgtttgaaaacccaaaatatttattatcaaagggttaaaacaaattctatgctttcagttatttcgcaatgaaaaattaagtgctgtgctataaaatgaaaagaagctaaaccaataaaaagaaaaaattgacagaataaagagatgaagtgaaaaggtaaatgataaaacaatgaatggtttgaaaataaatcaactaatgcgaccaccaagctggctgccagcattagctccaattaaatttaaattttaatgaaataatgtgcgaaatgtcatatagctgaataaataaaatgagaaattgacagaagaataggcataaaataaaagggtaaattatgagaccaccaagctagccagcttaagctccctatataagcaattgctcaggcagaaattatatgataaacctattcaatgttaacttaaactacattgcagtcctattagtttttaaataaaattttatttattatttattgaaaagtaatttttaattctcgtaccaattgttaaacatctcataaaataaatctaaatattaaaaattaaaggccgttcagtcaattaattggccgaattggagctaaactggcgtttcagttcatttgatcatcattaccattcaaaaagttgagtatttaagaagtcttaattgtcagtaccaatcaaaattttgactttagcccaaaactttttaaattttatttttagttggtttgtataatgtcttcgcaaaagcccaacaagcaggacaatgacgtgatgtttgttgtttctgagccggactgggcggtgtacgatgaaaatgagaggagaagggcggaacataagcgcctacggcgtgaagaacaatctaggtttaggatacattcattatatatttgcttattgtttgtttgtttgcttgctgctcaatggaccgcgttatggcaactgattggattcacaacgcctaccctgaatataaacagtctggagccggaggcggaggaggagacgaaaacaacgaatcgagcaacgttgccattgctgatggcatcaactggctaagagtcaatgacgaggacgaggaagaggaggaaaacaaaagatgcaatggcaatgaggaggcggaggcggaagtggttaattcttttatgttgctatttaggtttttttaagacaaacaactataatttcaaaaaatgtaaatgtgggcacggcgtcccataccagcagaagcaacagcatgaagcgaaagaaattgaaatgccattgattgagcatttgtgtcaacgctcaaagtgcacagccatggaacttcaagtgttattgcaaaatttgacgacacgtcgccagatactgcaacatatgcgtttcaatatccgcctccgcacaaactatctcaggccggccatccgaaactttgtcgtgcaatgtagcgatttgtcgaccctttccgctagtgatacttttgcaatgcgtggctatttgggcattacggtttgcttgttttttgctaatgcatttggtagttgtataaataaaaaattaaaggtgcgtatctattattacgtaaaacacggaatccgcctacggcacccaaaccttccatgtgtagtgcgttttggtggaggtgaacattacgacctgttccccatggaatgtttgaatgtagtgaagtagacgtgagagagaagaaaacgataacagaacgttgattgattgactttacttgcaaatgtcaaaaaacagatataattcatttcttcattgattagcactagggcgtgtaattatatgcacatgcatatttttttttcatggactgtgggaggcccgaaacgcacaaaaaacatgtgttttgcttggtttgaagtttctaggccgtatttccatatgcatattttgtgtatctgtgcatatttcgcgatttactatgacgaaaaaagtttcaaaaatatcattattaggtattttctaaaaaatgtaactttaaaaaaaattggaaatttatgcaaaatcataatagaaaattctccattttttactcaattttcttcaaaataaataaatttacttttattttggtttttggttctaaatgaatattcatactatatttagctattttgggtattttatgcttaaatttaatatgaagtagatttgtaaagcatttaattacacgccctaattatcagaattgtaatactttttagccataaaattatgccggatatttaaggcctttttcctattgtcttcattcattcatctttacaattttgaataaaaaatgcttacaactattcgagttattagcacctattttctaggtttttattttcattgaacattaaaaatcggcctgaaattttgatttaaatttatgtatctcaatactatactggcttaattttattgatttttggacaaaaacgattttacaccccgaaatttgaaactaattactttatactgtcgaaaagtctaatgtcgcaaagtcccctcctaaaatttatactaaaatgaaaatgtcctgattgtcagaaatgatctgatttgaagatagcgaccaaaattgtactgatttcttaaataactttgaaactttatggcagaatttcactattttatcaagaaaatataaggtttgcgctaaattttgccattttttgcaaaaatctgttagcaaatcgcattaaaagttacaaattttccccggctgttgtccaaagaaaaaaaatgaagaaattcttttgtggcgggttcttttatgtacttgtgtaggtgcgtgctaatgacgttagtcaaaacccatcaaaatgtagtcaaaaaaccataaatgaaaatatttttgataattttgcttaaaagcaatcaaatttttacttcttaatatcattcgatagccctaaatgttctctattagcctgtataatttcaaaaaaattgttaattttcaaaaaattggttttttgagcttctcaggtcataaaaattttagggaaatggggttgataaaaaaataacttatccgaattttaaaaatccattttgcgggccgatctctatttaagccgcccgcacaagaactcaatgcaatgggccacatttgatgccaccacaaccttcaattgtcacattttttgtcgagcaggaggaacaagcggattttggcaattgccatgggaacgttctccgatcgctgggtctgctgcactgccagtacttttggctcttgtagagtttaggccccataaaatttttttacatttcagaataaaagaagccaatctataggttttcgtgctcgctgatcacgaattgggcatccatttcgacccatttcgaacccctgaccctaattcaaacaaaaagtcaaaagctgccatttcgttcttttgttccaactgaaatgggatggagggagggagggagggggtaaagaagggctttgaacggttgtcacttttttcaatcataattttcatttaaaatttttatccaaaattgccgcgcagtcgcaaactccgcgcatcgcgaaaatcccgcggtcgcgcatcgcggattcaatccccacggtcgctaatcgcggaaaaaaatgccgtgattcgcggtcacgctccacccttgactgacagctgctgcgcgaaataaatgaatgcctctgcgccaacaaattgtaaaaaattgaacattttcaaaatttagctaaacgaccatcgataatgaatcgcgtaagatatgggcattagtcctgtgaatttgatcatttccctccttttcacaaccatctttaaatatgttcgcctttattttgtgctgatcacacgttccgcggcagctgatcaacgtttttaaagcgccatataaagcataatttgcatatttgaacaaaaagaagtattacgagaatgtatttcgtaattttttacaccttatcattagggattaggggtgatatttttagactctaaaaactcccaaaataggcactaaaaatggaaaaatatactcagctgattgatcattaattgtccaaactaaagatttgtacttccaattccttcaccaattccgcgtcaagattgaaattccgagaaatttcaatagttttgaaaaaaatattaagggtaaaattttatgtccatatgaacgagcatcaaattcactacaaaatgctaaagatagagccaagagatagaacgaaagaaaaggaaaaaattgggacagaacatcaaaatttgatgattgatcatccgcgtgactggacaattggacagtggacaatcggacagtgaagacaatcggacagaggtggacattcggacagtggacaatccgacagtaaaatgcataaaaaagataagaaaatgccgtcgccggaggggaacgattgtgccatatccacaagaaggcattgtgcgcgagtaatggcaagaaaaggcgcttatattcatcaaatgtgcaaccgttgtttatgaaatgccaaacccaaactaatttgaaaagaataatgttttagactgcattcgcacttttttatt

SEQ ID NO: 338 - DNA, 4964 bp, Heterodera glycines
acagttggacaatcggacagtgaggacaatcggacagaggtggacaatcggacagtggacaatcggacagtaaaatgcataaaaagataagaaaatgccgtcgccggaggggaccgattgtgccatacataatccataagaaggcattgcacgcgagtaatggcaagaaaaagcgcttatattcatcaaatgtgcaaccgttgtttatgaaatgctaaacccaaactaatttgcaacgaaataatatttagactgcattcgcacttttttatttgcctgttttccctttttcttcatatggcacaatcgatcctctccggcgacggcattttcatatcttttttatgcattttactgtcggattgtccactgcccgattgtccaactgtccgattgtccaactgtccgattgtccactgtccgatcatccgcagtaataacggaatttctctttcaattccttcaccaaatcagcgtattcattgaaatgatcgaacagaaaaatgacatttttgaagcaaaacttttcgttcgactttgccaaatttatctttatactcatagatcttgtaaaggttattttctatcattgtttcttgagtgattaggaatttttcaacgagataattaatattggaaagatatcttcaacagttaaataaaaaatgtgccaagacatttcttccgaaattttcttctgaatcattgcaaattatttaattaaggttatattctttaccttcatgccaatgaagttgtattgatgtgccaacagaaatttatgaatgaatggctttttgctttttggaccaaaaaatgtgcacaacgattcacaacagaatacaactgaaaacgatcagccaatagaaggaccctttcaacacaatcatcttaattataatttaatacaattaagagttttattgtgcaaatttaaaaccgtaaaaatatatcgattttcgatgggaattccatgcccacaaaattaccctccaattcggcattcggtgaattcatgaaggaaattaatttttcaaaatttcccactgcatttttatcattgtcaatttctatttttggcattttttcgttaaattcaaaaaacaaaattttgaaaaacaccgaatgagcggccaaaagctaaaaagaataattcttaagttttatatttaaattttcacatttcttacatatttgttcacattcataactttgccattaaccattaatttgtcttctgcttgaaacttactaaaaatggattaaatttaaaagacattatattaatcattaattaattacatggttggctctttcttcttgtttttcacaatgatttccgctttgaatgtcattgcgtcctccttctcggcgtatacgcggtttattgggttgaacaaattcttaattttcacaattgaaaaaaatttataataaaaaaataatgcactttataatttctataacgttcatcccgattgagtccagtaaaccattccaaatttccttctcgcattagccattcatcactttttgtggcagaaataatgccaaattcgatagcagcttcaaaattccaatctgaaaaataaagtgaaatatagaagatttggagtttcagcaaattaaattttcaatttatcaacaaaatttataaattcatttgaccataaattccacaaggtgacacttgatagacaaaacggtcataagcgtcataagcatttcgttgaatcgaaatttgccatggcattccgtcgatggacactttttcactttttacaaactcatatctttcaggaaatgagctaaatttggtcactttaaacccaatttgaccttggtctctgttaatttcaacggcagacaaattaaaatctttggctaattgaagaacatttacaacacaatcttctaaataattgttggcatttaaaagttttttcaattttaccatgaacagcgaaattcggtgaatttatcacggaaattaattgttcaaaacatttctcgacattctcaatttcatgaatttcaatcttgggagtttcatctgcattctctccaaaaaataaagttttaaaaaaattcgattgagtcgccaaagaaaatttgtgcacaatgaaactcaataaaaaaacattgctatattatactttgaaaattgactaagctgctcttcaaaacttatgaacatgaaatcccgttttataaaagcataaaatattgagtcttcatcggactgtgttttcaaatgatatttagaatttgtattgacattgatccctaaagaattgttgtaagtccagcaattaacatggttttgaatagaacattccgaaactcaattttatgttattttaaaaaatttcaatttcaattatttttattacgtatttgttcaaaattatttgccattgagcaagaaagtatcatcagcagaaacatcgctaaagttaatgaacagaaactaattataaataattattaattgccgagttaggaaaggttttaccgctttcacttttgctttgaatgtcattgtgtgctctttctcattataaaaccaatgcttttgtccatcaattgctaaatttattaaatattacacggaaatcgattatatgcttatattgctaaattattttttttatttttcgataaaatttaacgattttacaccctcaaatttgaaattttttagcaactattttgaattttttagggtaggtcgggaccgggaccgaggcgggaattccctgtcctccgaggtaatcccaaaaatcagccttttttgttgaaaatctgtgaacaaactaaatttggtttgaaaaatttcattaattcaatttagctttaaattttggttttattaaataaaaaacaaaataaaaatttaatttagtattattttcacttgattttaattagaatttttaattttttaaatttttttttgaatttttaatattcccggttggtcccggtttccagtcccggtcccggacaaaaaccgaggtcccggtcccggtcctggcttctcggatcccggcaggtcccggtcccggttttacacccaaaattcccggtcccgtaccactctaatttttttagaatctaaaaaataattattttggcagtttagtaactcaaaaattatgtctccaaattttttaaaattattttcctgacaagaatttttgattttcaaaattctgtacagtatctaatactgatctggcttaattttgttggtttttagataaatttttatgactttacacgccaaaaattgagacttaattactctttactgtgaaaagtcccctcctcaaatttcaaatatttctgtcgaaaagtccggcgtccctgcagaattggtgaagtgaacggagttgccaaataaatgccaaactccccaagttgcaaatccccaaaagtcgcaccactctgtcagggacatgttcattggaaaaaaacggattttttttgacaatttttacaatttctaaaaaaagaaacaagaatcacaaatcaatgtgccacccaattggcagttgttcgggaaaatcgaatgtggacgccagggatgggccgaggtttcgcttttcgcctttcgcattattcgcattttttggcgtttcgcatttcgcatttcgctttttggcgcgaaatgcgacttttacacctctaagaattggattaaattcccataaaatttttcaaaattttacctataaattggctaattttcagtgaaaaactgtttataaatgatcaatttggcccatccctggtggacgcttatgtgatcggaccggattcattgtaaggcaatgtgaccaaaatttcaggaagaggaggaggaaatgatcgtgccaaagggccctgcaacagcaaaaatgccgacagtaagccatattaccgccgtggtaaggcatacatgtgcgaatatccgtcccagaaaactgacaaatgcaataaatgcggaaaagtcggacattgggcgacagtatttaggacatatggaggaaacaaaaattcggcaaatgcggaaaatcggccatggaaatgcagatacaccccaaacggttttggcgcgcaacgattatttaggaggcataaaagccgcaatttgagctgcaataccatcgaatggaccgtcgtcgtcgtttaaaacgccgcaaaaaactatttaagaggcataaaagcccaatactttggagtgtttcagcataatgaaaaagtaccaattcctttcgttttattactcgattcgtttttgagccgaaacgcgaaaatcgaggtcgagtcgacgaaatttcaaagattttttgacataccctacctagttttacacctgactctattttaaataaatagtagtcattatgcgatgccgttaaacccctagcataaataaggtgttgcacaaaatctaccaaaccccgggtactttaccgttttgggggggctacaactccggaaaaatccatatattttagcggcctaaattcataacaatgatatgctttaaagaactaacaattttttgtattaaaacggtttaagaccggaaaaaccggtactggccatttttgaccaaaccggttcaaaaaaaattttctcgtcaattttgaaagtcggccaaaatcttttaatgcaattttgtagagcacatttgaggctatatatcaaaatattagcaaaattcttcgatttgtaagaacagtaatttaaatgaaaatgtaaaaaacggacaggacttatttaccaacccaatataataatgtcaaaggggaatcccaaaataattaattggcaaaaccctaattgtctttaattgcagatgaagtaggggctggtttctttgaattcttccatttcattgggtctcccgatttatgctgacccatcttggccagggtttttttgtttcatcacttcctttactacagaacatg

SEQ ID NO: 339 - DNA, 1775 bp, Heterodera glycines
aaaaggcggttttaggggaaacggccaacttggtgtgataatgtaggctcggccaactttgcctcctttaaaaaatggcccttggcgcggcaaatttggcgccagataaaaatttaaccgaaacggtcacaatttaaatatgaatttggggcctttttagattaaatttttcatctttctggcacgtactttctttattttggtcatgaaaattgctaaatttatataaaattaaagatttccaaaacaagctaaaatgcggctttcatacttaactgaatttggcgctaagccgtgccaagctgtcctcgaccttttttagcagtgtatttttcctcccgattttagtgcgtatatatttgtcatacttaagatatttctatataatttcttcagatttttttaacttatgagcccagagcaaatcaaagtttgtcattaaccacttaattacccatttaattacccaattaaataattaattaaatttacaattaaatgaaattcaagataatcgttgcacaacaacgggcaaagacttggtgtggttcgtcggtttgctgctctaccgaatgttgtttaacaacaaacatcccatggacaattgggagccaaagcgccgtttggacatggaattcataacggattggcatggaacaggtggccaattaaaatgtcaaaacggtgtgattaattaatgaataatatttaggattatatcgtcaaattgagaagcattgtcagtgaatttccgttgaataaccaaaaaatgcaattcattactcaagatttgctggtgatgaagaaaataatgcgcctcagaaaaaattgttagatgatccgatgaataatgtgtcaaaagcattgcttcatactaatgaatttcataattcatattgataaatattttaattagaatgactcttccaaaaaacgtatttcccataaaatgttttaaatttcggatttgaatgctactaatttttattataataataagctttataatgtttgttttataaaaatataaaattaatcttttcggcaaaaactgtgttactgtatcccgaagctaccgtaccatttctgttgaaacgttttttcttcacttattcttcatggttaaatctaaaataatcaattaaaagcaattgatgaattcagggaatggcctttgcccgtacaaattgccgaaatccgacccaattcatcattaaattggaatgcatgggatgagcaaaaacatttgttgtcccaatacggtagcggtgcgtacagtaaacttatgataccggtgatcactcccggcttcacggaaagtaatagtacatatctattaaattggcacacagcaaaaatcatcaaaaatgcacttgacgacggtatttatttttttaattatttaaataatttctaaattttgtaaaagttttatttaattatctttaaataaaatactttaatttaattgtttatcatgtttatttacatatttaaaatattaaaataatttccaattctatgcttttcctatttttagcatttaaattgtttcattcttcaaaaacaaatagctaataatatcgaagttcttgttatttatggcattttgtgtcccggctttttaaagaatgctcaattttttgaatttttttgcgaaataattcaaaaaaaagtataggtaaacagtctgtccacactgctattaggtatttccataaaaatacttaataaatattataggaaaattgccagggtatccaaatcattatttt

SEQ ID NO: 340 - DNA, 3699 bp, Heterodera glycines
aaaataaataaataaaattaatttagagagtttttttcaggtttcaaactcagggagaaaagaaaattgggagagttaaaatttaattggcacagctgatttttttattttgttatttatattagcgatttatttaattttttcgacacagccgttagaaatttaaattttttttatttaataagcattatgtttcttatgcaaaattattaaaattgtctttttgaaaaaataatcctcaccctttgtctctaattaatcaaccactttcctttttctcttcctcttctctttcttccttattctcttcctcttctatttcttcctttttctcttcctcttctccttcttcctttttctcttcctcatttcctttcttttgaacatgtgcacgccttaatttttttaacaaatcaaatcaaaaacatttgatcttttgttaacatttaatctgttttaaaaattaaaatttaaaaaaatttgaccacattaaaatgtttgccaaaataacacgaaaaacttttttgaaaatttaaaaataaaaaaactcttcataaaaactaaaaattatttaaaatttctcaatttcttaagaaaaaaattctaaactcacttccaaaaatcgccaaaagtttctttgggccttaaatattaggagtgctttaaataattttttttaaacatgtgacttaccagccaccgtcaaatttgtcgtcgattgtcctataatattagaattaattattatatgacatatatatagaagatatattataatattatattatatatatttatattttataattatatacttatactgactaaccaagactctagggcaaatccgctataaagttgaaatataaatttatacacaattttattttttatatacccacccagaaaatggctcttctctgtcgttgaggtcttgtctataacattgggaataaataatatatgacatacacacataataaatatattctttatttattttttaaaatatttatctatttattctttatttataattaataattatatgtaatatgtatattactgacaggcaagggtttgtgccaaatccgctataaagtttgaatataatttatatacattttaattttttttatatacccacccattatcaaattgctcgggttcgctttaaatataaatcattaattattgcttaaatttatttaaagtaaatttactcaattcttgggtttttcacggtgggtgtttcagcgtctgaaaaagagcaagctcttttttttgaagcaatgtttgcctaaaatttgccaaaggtcacttttacaaaataaaatgacagaaaattgaccatttattatttaaagcactcctaatatttaaggcccaaagaaacttttggcgatttttggaagtgagtttagaatttttttcttaagaaattgagaaattttaaataatttttagtttttatgaagagtttttttatttttaaattttcaaaaaagtttttcgtgttattttggcaaacattttaatgtggtcaaatttttttaaattttaatttttaaaacagattaaatgttaacaaaagatcaaatgtttttgatttgatttgttaaaaaaattaaggcgtgcacatgttcaaaagaaaggaaatgaggaagagaaaaaggaagaaggagaagaggaagagaaaaaggaagaaatagaagaggaagagaataaggaagaaagagaagaggaagagaaaaaggaaagtggttgattaattagtgacaaagggtgaggattattttttcaaaaagacaattttaataattttgcataagaaacataatgcttattaaataaaaaaaatttaaatttctaacggctgtgtcgaaaaaattaaataaatcgctaatataaataacaaaataaaaaaatcagctgtgccaattaaattttaactctccaattttcttttcccctgagtttgaaacctgaaaaaaactctctaaattaattttatttatttattttttctcaaaatttgcacatttccatcaacagaagcactgagaacattgacgtccagcgaattgtcaagtgcaacaacttgattagttatgtgttgtgggattacaatccctcggaaggcagcagagcatatcttcatggtcagctgtttaccattccacctgctgatgcaagcactgacctccagcgaatttcgactgaacactccctcgatgtgaacaaaacttcttaaatcctatcatcatgaaaatatttagaataagctgatggaagcacttcaccgtatcctacgtgaacatcacaagcttgctgtcgtttacgagtctgccgctgaaacataccgccaactgccgattgaagaacgtgttcatttgcgcatgcttttggtggatacgaataaaataggtgttgagcgaacagttgaagatgacgcagcgcaagcacctgctaatttgcatgctgacgaccgtgcgaatgtcaaacagatacatcctgggcgacttggcacggagactgtggctggtagccgtcttgtggcacaagtacttacattgcgtatacaactattttctgttttaatagtggtgttgtcgatattgacgttcaaataatttcagttttaccttgacgatggctccaatgttataccgccaagcgagtacgacgtcattttcatgggccgggacgcgaccaaagtgaagcacatgaaatggtggaacaggaatatcgatcccgcactctacccgcttctgtttccctacggccaatatggatatggtgaaataatctaagtaaacacctgtattcgtgtttgtatagaatacggaatccaactgaaactggaaaaagacgaacgcttcgacacgacatacaggcagatcagagacaaagacaacaaccttctgagcacagccgatgaccttggcgaagaggaagaatttcttggcgcagaacaagagcagcagttccaccgccgcgatcatgtctcgagatcccaatggtatcgatacatggcgcacatcagggggctcaactacaattggcgcgatggacactggctttgggattggcggactcttgctcaacattacacaattagcttcaacaatagaatggaagctcaaaaatttcagttcatgaagcagcatcaaggacgcagacgcctcattttgccgagcgccatcatcaattggcttaaggcgctccgtgataataaaggcaaaaatgacttcgtcgcaaatgaaatgttttattatttaggatataagggtgatattggccgtgtgtacatgaccgatgagcattttcggggctcgcggcaatagagtatgccaattgcatgacaatatgcagagaagttagcaagccggaccttctggtgacattcacaatggaccctgagagccctgagctcgatctttttagcatcctttaatttttcgccttttagcatctcttcaaaaaattctttatttctcctccttttcggtgccaaataattctggaaaaatggtcaattttctgtcattttattttgtaaaagtgacctttggcaaattttaggcaaacattgcttcaaaaaaaagagcttgctctttttcagacgctgaaacacccaccgtgaaaaacccaagaaagaggaatttactttaaataaattaagcaataattaatgat

SEQ ID NO: 341 - DNA, 5067 bp, Heterodera glycines
  unsure (1)..(5067): unsure at all n locations
ttcatttgcgcatgctttggtggatacgaataaaataggtgttgagcgaacagttgaagatgacgcagcgcaagcacctgctaatttgcatgctgacgaccgtgcgaatgtcaaacagatacatcctgggcgacttggcacggagactgtggctggtagccgtcttgtggcacaagtacttacattgcgtatacaactattttctgttttaatagtggtgttgtcgatattgacgttcaaataatttcagttttaccttgacgatggctccaatgttataccgccaagcgagtacgacgtcattttcatgggccgggacgcgaccaaagtgaagcacatgaaatggtggaacaggaatatcgatcccgcactctacccgcttctgtttccctacggccaatatggatatggtgaaataatctaagtaaacacctgtattcgtgtttttaagaatacggaatccaactgaaactggaaaaagacgaacgcttcgacacgacatacaggcagatcagagacaaagacaacaaccttctgagcacagccgatgaccttggcgaagaggaagaatttcttggcgcagaacaagagcagcagttccaccgccgcgatcatgtctcgagatcccaatggtatcgatacatggcgcacatcagggggctcaactacaattggcgcgatggacactggctttgggattggcggactcttgctcaacattacacaattagcttcaacaatagaatggaagctcaaaaagttcagttcatgaagcagcatcaaggacgcagacgcctcattttgccgagcgccatcatcaattggcttaaggcgctccgtgataataaaggcaaaaatgacttcgtcgcaaatgaaatgttttattatttaggatataagggtgatattggccgtgtgtacatgaccgatgagcattttcggggctcgcggcaatattaccagaaagagtatgccaattgcatgacaatatgcagagaagttggcaagccggaccttctggtgacattcacaatggaccctgagagccctgagctcgatgaatgctgccagtggtgtcaaaggacaaaaggcaacagtggtttgatcggccagatgtggtttgcagacttttcctcgacaaactacgtgaattgcacaacgacctcacgtataaagaagtcatgggacctgttcgtgggtggttctactcattagaacaccaaaaaaggtgtaaacattttctataaatatttgcttaaagtgttaattcaagaggcctcccccatgttcattttgcgctcatcctcgactgggacaggatccgttgcagtggtgtaattacaacgcctgaggattacattgaccaatatatctccgctgaaatacctgagaacccctctgggcggtcgccagaagtggttttaagacgaaaattgtacaacattataacaacaaagaacatccatacctgttccgttcgtcgctgtttagtcgacgggaagtgttcaaagcatttcccagtaagcaattgaataaatttcgggttattaccttatagtaaattatagaagcctttctcatacgacaatgtgtactccgaaaacgcatatccgcggtacaagcgtcggccgccggcaacagacgaaaaagaagctgctaaaaatcctgacgattatggccgcttcttccagtacaaggacaaaagtgggaagctcattcgcgtcgacaacagacaagtcgtccccttcaacgcctttctttcatcaaaatataaatctcagttagctttagttagattttacaatggaccaattttataaattaagtatcaacactgagtttgtagcgggcgagagatgcacaaaatatttgtgcaaatatgtaatgaagggcgcagacatggccttcatcgaagtccagggtgggccggaaaagcagcaaacggtggactatgatgagttccaccaaatacgccttgcgcgatacatcacatcgatggaagcgttcctgtctctttggggaactcgccttgtccgtcgttctcaccaagtagcaataatgttatttaaaagtccattatgaatttataaaatgtcgatgaattggatgtgcatggaccaagtgggcaccgaattgctgtggaaatgggactgaaagatgatgaagaagatttgaatgcaatttgtgaagcggcccaagccgaagaagagcgaagagcaagaggcgaagagcgagttacgcagcttacagcgtatttcaccttcaacaaggacaatgctccactcggtctgacttatgccaaatgctacaaaaagttgtggtacgatattgcaaagaagcagtggaagccgtatgtgaacagagttgttccaaaattttgccgactcaagaccgtttcgccaaacaaccgcgaacttctggtgaatattatttaaccaattaacacattatggattataataggctattcggatgctcctattggttgtttgtgacccaactggatgggaagccctgaggacgcacaacaacattgtccacggctctttcattgaggctgctcaggcccggggtctgctcagtgacaataacctgtggatgaacaccgttatggaggcctttcaaacaaaaaagtccatccgccagagaatcagatggctcgctgtgttcttcgcgactacaaacctctcaagtccgacaacaatcttggacagcattttgaaggacgccgacaattggcttgtgaacaccagtgttgcaaaggcttcggctgaagatcagaagcaatatgtcctgcgtgctttggagtggttccttctggcaaatggaatcacgcctgactctgagcccagggaagatggcactttcgagtctgcctgagagcacatcggtttaccgcgccctttgggcttggttcttaccaaggagacttacatgaaggtgtatcaatgacaaattgtttattgccgttttcacaccaatgttttttctacagctcgctttcttccgggacgatatcgtgaatcaaaatcttcacgaaagagtaacaatgaggcaggattatttgcagaagtatctggccgggccgaagcctaacaacgaacaagaacaattgatcgactctgtcttcaaggcattagaagacgctcgcaacgttatcgaaggccgacaagcggagtttgaccctgcagttcagcggcttttcatggtcaccggcgaaggcggagctggcaaaacatttacatataatgtagataattttaatttttttggatgtgacgaatattcttttgccttctttctagaagataattgctcgcgcaaagtccgtcagcatgcactttcttgccatggcttctacgggcattgctgccgaactgttgtacgagggacaaacagtgcacaaacgcatctgcaggatgaagcacgtcgactcttccacgtcacccaacgttgactacgaaagcaacttcgcgcacatgctccgcaacattcatggcatgcttatcgatgagataagcatgcaaaacaaggatgttctggagtttgtggaccgtcttctccgctctgttgcccctgatgaactcaaggaaattccatttgccggaaaggtagtacagtatacagttgcatttattttttgtacctaaaatttaaaggtcgtagtcattggaggcgagtggaaacagttgacgcctgttattcccgggggcgccgaaacttgaggcttctgtcaagaattcgccattgttcgtccactttacaactgtgcgactccgtgcaaaccatagattgttataaaattggagaatccccagcagttgctcggttttcatcgaatttgtcgcgcacatcgctcttttgtgagacaatccgaaaggttgccgaacaaaggcagcccaaaattggagtcataacccaattaattaactaaggcaggcattcgagactgaaggcaaaaggaatatgcaattcgaaaattccctcaaatttcattaacattccattttttctacaatcgacactcgagttacgaaattttttttgtatgattttttaaaatattgatgaaaatgtaaatatgaagcttaaaaataccaggaatatgttagttatgaaagcagagtttgctagttttgcttatttaaaagatttgtgcttatttcagcattatgtgcctattgtgaattgaatatttaaaaaatggccacttttcagtgaaaatctctaaaaattgttaaaattcccaatttttcctacggcggcacttatcggcaccgatgggccacgaaacttattttttcataaaaaattagctcaaaatctcaaaaaatggtcatttttggtgaaaatctgttaacaaattgcattcaatttttcaaaatttttccggcggcgcctatctgtgcaccgctggaccccccccccccccccttccaaaaattttttggaaaaagcgcgccgcaaaaaatggttttgaataaaaaaaaaagtcgccgccggagaaatcttgcaccttcgtataaaaaatcgggagcagctcgttaccccccagccggagagggggttaaaaatacagcctaaaattgaatgaggaccaaaatgaagcatttttgacgaaataagagaataatttgagtaatatgggaaaatggaggaaaaattcggtatagatatgtttttttagcacgatcaatttcaattccgttgattttaaagtcatcgaaaaaaataaataaatgccacccctttttcaattttttataaaatgaataaaaacatttttgttaattgtaaaatattaaatagaaattattgacaaaaaaaataccacgaccgattaattcatattaattgttttttataattgttgaaagtgccaaatttctttttacattaaacaaaaaaggcgccactaaagtaagttcggcaaaaaaggccgaaataaaaaacagtcaatgacattggcaaattgcaattgtcgtaaaaagaacaccagcgagtgccaacatcggtttggcgcaggaagcaatcgacacgngattgaattaattaaccaaataaaac

SEQ ID NO: 342 - DNA, 2657 bp, Heterodera glycines
ttttggtggaagtctgttaacaaaattacattgaatttttcaaaatttttgggggggcggctaataggtgcaccgaaggacccccggaccccccttccaaaaatttttttggaaaaagcacgccgcaaaaaaatggttttgaataaaaaaaaaaaaaagtcgccgccgggaggaaatcttgacaccttcgtataaaaaatccgggagcagctcgttaccccagccggagaggggggttaaaaatacagcctaaaattgaatgaggaccaaaaataaagcatttttgacaaaataagagaataatttgagtaatatgggaaaatggaggaaaaattcggtatagatatgtttttttagcacgatcaatttcaattccgttcattttaaagtcatcgaaaaaaataaataaatgccacccctttttcaattttttataaaatgattgaaaaaaattggccaaaaaaaaataccacaaccgattaattcatattaattgttttttataattgttgaaagtgccaaatttctttttacattaaacaaaaatggcgccactaaagtaagttcggcaaaaaaggcgccgaaataaaaagcagtcaatggcattggcaaattgcaattgtcgtggaaagaacaccagcgagtgccaacatcggtttggagcagacacggattgaattaattaaccattaaaaacaattaagcataattagttgcccaatatttaattttaccctattgtttaaaacccataaataaaataaatgaccaaaatgaattaaaatatcaaataattcttttttacctgtgcatttggtcaaacgccagaatgcaagtaattcactgatgactcctcccaagtggtggccatctcgtcaaaaatggataatccgatcgcaagaagtagagttgagcggtaccggtaccggtactggccggtaaaatgtatgcagctataaatttacaacgaatacaaaatatattctacagataatataaaatgataagtatatagtaattttttattcgacaaaaatcaagcattcatgcttttttatattttgcatgtaaatgtatgcagctataaatttacaacgaatacaaaatatattctacagagaatataaaatgataagtatatattaattttttattcgacaaaaatcaagcattcatgtttttttatattttgcaggtaaatttatgcagctataaatttacaacgaatacaaaatatattctacagagaatataaaatgttaagtatatattaattttttattcgacaaaaatcaagcattcatgcttttttatattttgcaggtaaatgtatgcagctataaatttacaacgaatacaaaatatattctacagagaatataaaatgataagtatatagtaattttttattcgacaaaaatcaagcattcatgcttttttatattttgcatgtaaatgtatgcagctataaatttacaacgaatacaaaatatattctacagagaatataaaatgttaagtatatattcattttttattcgacaaaaatcaagcattcatgcttttttatattttgcaggtaaatgtatgcagctataaatttacaacgaatacaaaatatattctacagagaatataaaatgataagtgtcggaatttcaattccgatcgccaatcaatgatcggcgaattaagagggaggaggcccttcaccaatcccccgcccgccgcgcgacatgttttcgccgttccatccccctgcccccccttttccttcaaattgtcaattgtttttgtgtgttcctcccccactccgcgcacaaattaatgaccaatttgtcaaaccgcaacttttcgccgccgtccccaatttggcgaatcgactccaaagaacgatgaacccccaaatttcccgttttccgcccattttgttcatctgttcattttgtcccccgtttttcatttcgtgcccaaattttcggcccattttgttctgctcacatttgccactttttatttaaatttattgttatttaagcggccaaaaatgtcccccaatttcacaaccaaatttcatttggcaattttgccgtttctctccccgcccctccatttgcctttaactgtgatggccccccaattttgatcattctttgaaccccccgattgttgatctttgatccatggcccggtgccctccatttctgtttctcccggtcccattcattgatttctgtgatttcccatttgccccagtaccgaatgcttcctttctgaaaattttcctgtcccatcccggtccccaattcatttgtgattaatcccccggtgatggcattttatctgtgatcaattttgtgatattttgttcaccatttttaaatttttgtttaattacccaagtttgagtttgaggtcatttcccggaataaattttttattaattctgtgtctcgtccctgcctgcccctgaaccccgcaccgtggaattcatttggcccgaccccagagcaagtcgggacaaattggcgcacctgggtggattggctgtgaaccacggactgaaatcgacggaacccggtgacaaagggggaagggaaaagcaaattagagagcctagacaagaccctctgaggcttgtctagtgttcatagttt

SEQ ID NO: 343 - DNA, 3050 bp, Heterodera glycines
ccccccatttgcctttaactgtgataaccccattcgtgatcattctttgacccccggttattgatttttgttctgtggccccggtgccctccatttcctgtcccatcccggtgcccaattccatttgtgataattccccggtgatggaattttatctgtgatcaattttgtgatattttgttcaccattttttaaatttttgtttaattacccaagtttgaggtcatttcccggaataaattttttattaattccgtgtctcgtccctgcctgcccctgaaccccgcaccgtggaattcatttggcccgaccccagagcaagtcgggacaaattggcgctcctgggtggattgctgtgaaccacggactgaaatcgacggatcccggtgacaaagggggaagggaaaagcaaattagagagcctagacaagaccctctgaggcttgtctagtgttcatagtttcgtgtagttattgtcctccgaggcataacttcacgagggacgtagcggacttagtgtttaccctctgaggaagcacttcgtccgaacagagggttggaaggtgttgtgtagtggacgaagtacttgccctccgaggaagtacttcgtacaaaagggtgttcaagcgcgcacaaggccattgacaaataaggcaaaaggcaaactaacagtcctccgaggctttagtttagccataaggcaaaaggcaaactaacagtcctccgaggctttagtttagccataaggcaaaaggcaaactaacagtcctccgaggctttagtttagccataaggcaaaaggcaaactaacagtcctccgaggctttagtttagccataaggcaaaaggcaaacaccttgtcctccgaggcaggtgtttagtcacaaaaggtccaggaccaaggccagactgatctcggaaaaagacacaaaacaacaagtgcaccacaacacacacacgcacaaccaaactgcacgcaatgtctggaccaatacaaaaagggatcatcaatgcactcaaaactctggacaatgccaaaagcgccacctcactccttctacaccccgacccggacctgtcaaactgggaaaatgccatcaacttggaggctcaatttgatcgcgtcgtcaaggaaatccgtacaacggaaatgcagatggacagtctacgagacttatccaacgcttggattgaacttctcgcccgcctgaccggagacgacaaagacaacggcgaaaaagaatacatcaaattcgacaaaaatgagaaaatcgccgaacgatacgacgcagcatcaaccaaacttcgggatttgcgagatctcgaagcaacactcagtgccgcagccaaactgcacagaggcagagccgacagagaagcaaaggcggatcaattggccaatccgcagcaacaaccgcccatgccaccagcaatggcagcaccaatgacaatgccaacattcacagcaccgctctaccaattccagccaattcaactggataaatttttcggccaaaagcgaaaatggcctgaactctacgaatccttcaaatcggcaatcggcagtcaatcaatcagtaaagcgcagaagctgaacttactccgcaatctactgggcggagaagcgcgagaactcatagcgggcttccggctggaagacgcaaactacgagacggtccttcagctgttaaaggacacgtacggagctccggaggaacacatcagaagtcttcacttcgaactggccaatctcaagccgtgccgaagcctccgtgagaccaaagactttctgcttcaacttgagcggcttacaagggagctgaacaatgccggagaggacatcgaaggtcctcaagtgttcctcatgctggaaaagaagctgacgccagcattcctgcgaaacatcctcaacaagaaaggagaagatccgacaaattggacgacaaccaaatttcgggacgtgctaaacgaagccgtccgaaaagaagtccaaatccaagaagtgttgggcgagtacggacaccaccatcaatcactcgatcggccagcaaggccagcgactcaagcacaatcatcgcgaacacgcaatttcgcagcaaatttccggaaccgcaacgcaactcccgccaatcgggaacgcacttttatgtcctcaacaattgaggaggttcataagcgagtgaaccacaacaagccgcaacagcggaagtcccaaccgaagggactaaggccaactcaagcgccttcaactgtgccaatccggaatggcaccgcaaatcaagccgggtcgaggaagccaccctcaccgtgccttttctgtaatggaaatcactggaacgaagattgccagcgatacaacaccgtacagcaacggtcagcctttgttcgagacaaaggcttgtgcttcaagtgcttgaagtcaaaccatcgggccagcgagtgcccaaggccaatcaaatgctacaaatgcaaacagctgcacccggccgtactctgccaagaaggcaccaatgccgcaacgcaaacacaacaagcagcagccgtaatggaacggcacccaaagcaggatgaacagaaatacacaagtcaaacggcacaattaatgagcaatgccgttaaaagcagtgacacccgagctctgctgatgacaacaatggccacaattttcaacccgtcgaggccatgtcatagcatgatgcaaccatcttcattgacccgggaagccaccggtcattcatttcaaacacggcagccaagtaacttgaactgaccgtgctcagaacggaagaatgcttccttacgagctttggagaacgcgaaccaaagcgttacgtcagcgatcgagtcgcaatcggctttttgtgtcccaacggggaccgactcattttcaacttgaacgcactcaagtttctgctcaacaatttgcctgtcctacaactgaacacattggacaagcagcagcttcaacagaagaagctttttccgccgcatgagtcacgacaaccagacgtcatgcttggaatggatgtctggcatgacttgcacgttca

SEQ ID NO: 344 - DNA, 1969 bp, Heterodera glycines
gcccaaggccaatcaaatgctacaaatgcagacagctgcacccggccgtactctgccaagaaggcaccaatgccgcaacgcaaatacaacaaacagcagccgtaacggaacggcacccaaagcaggatgaacagaaatccacaagtcaaacggcacaattaatgagcaatgccgttaaaagcagtgacacccgagctctgctgatgacaacaatggccacaattttcaacccgtcgaggccatgccatagcatgatggcaaccatcttcattgatccgggaagccaccggtcattcaattcaaacacggcagccaaacaacttgaactgaccgtgctcagaacggaagaatgcttccttacgagctttggagaacgcgaaccaaagcgttacgtcagcgaccgagtcgcaatcggcttttcatgtcccaacggggaccgactcattttcaacttgaacgcactcaagtttctgctcaacaatttgcctgtcctacaatgaacacattggacaagcagcagcttcaacagaagaagctttttccgccgcatgagtcacgacaaccggacgtcatgctcggaatggacgtctggcatgacttgcacgttcagccaattgaacaattgcagagtggatttacgatttgtcagtcgaaaattggcaaaatcatcagcggcaatggacgaattgaactcagtcaaccgtcaaatgtgacattcgtcctcacggtcacagactaaaatgtcttcacaacggaagaagacttgaaggccaacgaaaaactcaacaagttctacggcctcaacatcattggcatggacgactcttcaacgctaatcgaccgtgatgaagtgatgaaaaatttcaaggaaaacttgtcgttcgtcaacaacaaatatcaaatcgcattaccatggaacgacagagtggcacaattgccaacgaattaccatcaagcaaaggcaaggctcataagcctcatcagaaagcttcggacaataaacttggtcgacgaataccaagcaattctggatgaacaacagcagaattccatcatcgaactggtcaattctgatcattcttgtggtccagtccactacctgccacacagggcagtcatccgaaccgataaatccacaaccaaaatccgcatcgtgatggatgcctctgcaaaacccaaatccactccgtcagcaccatcactcaacgaatgcctgcacacaggcccgctacttttgaaggacctgaccggcattctccttcggttcagacgcatggaaaaagtcatccttgccgacattgaaaaggcatttctgcaattgggcgtcagagaacaagatcgcgatgccactcgattcctttggcttgctaacccaaaggaagcaaatctcgaacagctgagacaagaagacttccgcatcttccgattttgccgagtcagtttcggattaaccgtgtcgccatttctgctcaatgccacgatcagggaacacctggcacttcacgacacggatgttgcacaacgcatcagtgacaatctttatgtggacaacatcatgatggaagtcaaaccaagtgaaagcatcaatcaactggtcacggaagcaaaaatcatttttaaatccgccggaatgcggatccgcgaatttttcggaagtcaaatcgacgaactcaaagagcttgactcatccgaattggccaaagacctcgaaaacacaagggtattaggcattgaatggaagccacgacatgaccagctgatcttcaaaatgccgctcttcagaagtccaaccacaaagcgaaacattctgtcacacatcgcaaaagtgtatgacccacttggccttatttctccagcactgttgcccgccaagcattttttgcaaatcgtccaaaatttgaatttcaaatgggacgatcctctgccggaaaaaatgtcacttgactggatcaaactaatgcacgcgtgg

SEQ ID NO: 345 - DNA, 11786 bp, Heterodera glycines
  unsure (1)..(11786): unsure at all n locations
ctggggccatctgagcgccgggacatttcagtcccagcgctcagccggccatttgagcgccagtgagcgccatgaaaacgcgtgttcccattggagcaccaatgactgtcccccgagttgtcgaccatttgtcctagaccatttgtcctattgtcgaccatttgtcccaaccatattatattgtcttttaattcatcagcgatctaggggatccgaactttgacaagtcatcccatcacactaaccattaggccatccagacaaacataatttattttattattttgtgctaaaattaattctagaaaaatcatcaatcaacaatgtgtgtgtgtgtgtgttcggtcacaaaaaattagggactgaatattttaaacaccccaataagttcttcacggcaaaaggggcaacgcccatcaattgaaacagtttcggcgcatcggttgcagagggcacgatgaccacatggaatgcatgcataatttctctaaaatatccaaaattagttttgcattaaacgctgacgacttttctggtatagcaaacggcgcaaagtgggtcgtcgtcattggaaccatccatatctcgtaattccaatatttcttctctcaaatctttcgtctcgttgaccaaagttgcctttgtctctctcaacacacttatttctcttattaattgttccttttgttgtagcaattcgatttttttgttatggatttgtgttttcctatttttaagatgataaacatctcgttgcagttggtccttgtcgatttctaacccaatgatcatcgcttcaagccgtacaatttcgaaattagcaaatggttggtgggacattgattatttttccgtgctaaaaaaaagaaaattatatgattaaatcggggagggataaaatgggtcaaatgtgtgcaacatctctatataaataaacaggaagttgcattaacatatgcataaaaatgtttattgcaccattcactctaattttgtctggagctactggtagtggcaaaacgcaatggttgatgaaattgttgagaaattacaaggaactaatagacccgccgcctgcaaaaattctgtattgctattcagagatgaatgagtcggttcttgatctgatgaagcggggaattgagacgcacaacggcttgccggatcaagcgttgatccagagccagccgaaaccactgctcctcgtgctggatgatttaatgctgaacgtgggaagcgattttctggatctgctgttcacacgcggttcacataactggaatgtcagcgttatttttgtcacccaaagcctgtacgggcgtaacattagaacagcgcgagctaacagccattatttggtgctgacaaggaacccgtctggtcaactccaggtcagaacggttgggtcacaacttttcccaaaacgactcaattactttatggaggcgtacaatgaagcgactagtcagccgttcagctacttggttataaacatgcacccaaatgctccggaaaatgagcggttgacaagcaaaatattccccggggagagccgtgaggtatatttacctgtagaataagcgtaatgaacgaaacaagtgcgctaaaaaactatttaaggaagggaaatttttttggttcgcaaaatgtacgagttcagtccatacattcgcgcaaattcggattttttcaaaaaattagcctcaacaaaatcggataaaaggaaaaacgatttgctgaaaggcgcatccgtagaacaaattctcggattggttgagatttgtgcaaatattttaaaatttaactttcgcctcaaccggcgacagaggagacgattggccgtgtacgcagactattaccgagcaattgcacgttcacgtagtgagcgcacagccagacagaggctacaacagggcagcggaatagctttaggagctattttggcgccaattttgagcgttttagctgaacagctggtccagaaaattgttgcaactccatcagcacaacaacaacaaaatgaagcacactaaaaagatgctacttgtaccggagagtgaatatttggcgcttatcaacctgctgaaagggggcgcaggtggaacggactcacttcaagccgaaaaagcagcgatcgatgccagcatccaaaaaaatctaaatgacaataaaacgggtgcggacgtgaaaatgaaacgtcactcgtggttgtacaaacagaggcatcagatcaaggacatgattgagaacaaaccacaaaaggtgattgtggaaaacgctacaggcacagcgccacaaaacattgccccgtatatgggcatacagaaaccaaacctcaacaagcttgaagaattgaacgggcaggatggcaaaaaaaaaataaaaaaataggacgaaaatcggtccaggcttccagaattcaaactcccaatggtgccagctttggtgaagaaacggatacgtctgcgcctgagaccgatttgcggctaaccaaaaagagacaacaaaaatttttggagcttaaaacaggcccagagcattatgataagctgcacgaaatgattgaacgaaaccccgaaaagtacggagtcgataagtcgtccggcgaaattctaacaaacttcaaaaagccggtgattaggtccaactacattgactcactgatgtacttgacaggacagagagcagatgtgccgaaaggtcatcgattttttgttcaaaaaattggcagcgacccgcaaatgatgaaatttttccattcccaacggggagagggtggtagtaagcggagcaagcgcaaaaaattcgttcttgttaaatcaagcgctataaaaacggtaggactcagccgaatggagcaaccaaataacacgcaacgtaaattctttaaaccgcttctatgggcaaagctgtagtacaaaaattactggaacaagtgtattacgatcttaggtcgccggcaagttacgctggtattcaaaaagtattgaaggaagcgaagaagcgaaatccgagcattactcttcgtgatgttgaccattttttgcataaacagcgcacctacacgttgtttaagccgcgcaaaaaccgcttccgcagactaaaaactgtgcctagcggactacacacggactggcaatgtgatttgtgcatcatggacgcgctgaaagagcataatgatggatttcgttacatccttgtgtgcatagatgtgctaagtcggaagattttcactgcagaggtagagtccaaaaaaagtgagcacatgattgcggcatttgagaagattttcaataaggcaggtgtgctgcccaataagctgtacagcgacgctgggcttgagtttcaggcaaagaaaatgatggactactggaaacaaaaggagatcatcaagcacgtgatgtacagcccacatttgcatgctggagttgtggaacgcgcaaaccgtacgcttaaggagcgactttacaagtattttagcgaaaagaacacaaagcggtgggttgatgtgctggacagcattgtgcgtaacctgaacagctctgcgaaccgaacaaccggagtaaggccaatggacgtcaactttaaaaatgccgctgctctacggaatcgcctatataagcaaggcgagtcgagtcctaaaacgccaaaatttaaggtgggagacatagtgcgaataagcaaagaaaagggtgatttttcgaaaggttattttccgaattttacggacgaactgtttcggatttctaaagtgaatccgaccgatccaccttcctacaggatccgtgatcaagacggggaagacattaaagggattttttacgagcaagagctggtaaaaaccgttgcagaaacagcgcatagagctgaagtgctgaagactcgacgcagaaacggcgtcaaagaacactttgtgaggtggattggctactctgacaaacacaatcgttggattcgagacgaggacattgtccaaaattaattgatacaaaaaatggacgaattttacattgtacttccgtccaacacaccaggctcaacgaatacgacatcaaattttacggttcggcttccacacacgttggagttggactcaaattggactgtcgctctagcatctataatctacccctattcatttccatcagtcggaattgatgaggatgatatcattagcattaaacttgttaacccgaactatagattcctagacgacaaaaaatttgtgcatatagaactaaaggttccaagcatgcaattttcgagtgtagaacatttacggctcaccctgaacagcctcatacgtgaggtgtatcagcagcagcaattttcttctggccatgatggagctagccggacgaaacggcaggtcacagacctattttttcatgaaaatcctgtggattattgggaaaagattggcgaattacgcaccaaacaagagcagtttgaaaaggaggtaaaacaggaggagagtgaactttcggcagacactacggatgtggagaggaaaaaactgctacaaagcgagcttccactcaaacggattcgtatgctgaggaaaaagtatgagctggaagagttggaacgcgctgctgaacgtcgtgatcaggaaagtccggagaatgagcaaagaaagattagcgattttttccaacatcatcccgaagattataacaaaaaattgaacgagtcaagacttatattcacccaacatctctcggggctgcaagaggtgatgagcaagtacattggtgaaaaagatataaataaaattcgtcagcttaacaccgaggttggcaaaatacgcacaaaaataaaacacatgcagcacaatttggccatctttgaaaatgctgcgcttcagcgtgaccaccaaaaatctttgtcggaatatgaggagctcagccaccagcagaatagtgcatttgttgaggaattttttcaaaaacatcccacaaattattggcaaattattcacaacaattataggggtcttacagaacattttcagaagatagaagaactgcaagcaaaggcagtagggttaaaggataatgcctctttcgaaaagcagattgagcgagcaaaacagctgattgagtacagacgaaagagattcgctgcgcttgaatttgaggcaaaaaagcgtgatgagcaacaacagtttgttgcagcagcagcaaatacaattactgcaccgactgcgtcgtcattgatcggaagggaggcgttaaaaaaacgtacaggcatctctgccagtacggatggtgaagtaggtgataaagcagatgtcggtccacaaacagctaccacaacaacaacacatggggaggcattaagagagaaaatattggagcaacaaaagcatatggatgtcggtccacaaactgctaccacaacaacaacacatggggagtcattaaaagagaaaatactggaccagcaaaaacacatggacaacgatgatacagcagatgccggtcaacaagcagctaccacaacgcatggggaggcagtacgtgagaaaatattggagcaacaaaagcgcacggacgatgatgatgataaagcagctgtcggtccgcaaacaatcccaacagcaacaaaaacacatggtgagacgttaaaagaaaaaatatcgcaagagcagaagcacctagttgacgataagtcaaattctgccgatgcaaaacaagatgatggtagcggtactgatgagaaaatcgcgcatggtcaaacgctaattgaccgacttaaacagagcgaggagcagaaaaaagaatggggggacccaccccaagataaatgatgatgggcgagcgccgaagcatggagaaatgctgtggaaactgttgcgatcaacggtgccgactaaccaacagcaaatgggcgatgtcatccaccaccaatttgctgatgctgaacaaacccgtggacaggtactgatggagctgttgaaaaacattttagaagaaaaaactgacactgcggatgcacagcaaaattatcaccatctacagaaatcagcccatctttcttcaacactgcgaagaggtgaagcgttgaaggaactgattaaaaaaacacaaaatgaacctttgcataaatcctctgcaaaaacgcgaggagaaattttaaagttgatgttggaacatatgaagttttccagggaggaggaggtaagttttgaaaaacttgtcgccaagcagcaaaaagagtcaaccgctgccgagtttgtgttcaacgatcttgcacaacgatttgttctgataaccggtgcgggcgttctgcatgtggatgtaagtaagcatcttgcatatgtgctcggctttgacaacactcgtctgtttcatggggaacaggcacgctatatgccagatctgtctggtggtgttaaacaattgtatgtttatgctccaaagcttattgaggagtgtatcataggtgaccgaatggcgcctctgcttagggtggtcaatgtttcggccgcacctgccagtgggggagggacggacgtgcctgaggttatatataccaatgaaatatttcattcacttcaaaacaaacgcatttccgaaattcgcatagaaattcagaacgcatttggacgatacgtcaaatttaattggggaacctgcattgtcactctgcattttagacggaaattattttaaaaaatatcagcaacaaaatgactcacgtcacatttaacccggatagcattaactggggacctcttcttgctttagaacaagtgggagggggagaaatgcaatattttgttggtacacggcatcagcgtggtgctggtctattgagaaatgttgcccgcttcctgatgccggtcgcttccaatatgctgaaggctgtgtcacgcgagggagtgactgccggaagccggattatggaggatctttcgcagggaaaggccctcaaggaatccattcaggcacatgcaaaacatgggatggaaaacctggctgaaaaattgaagcagtgtgggaagggagcccctacaaggaagaggaagagaccggtgaaaaaggtgaaggtgccattgccaatgcattcgttgagaggcaacaaaagacaggctatagaccaactcacatttgcgccttaaaatagacggtagcgcgcctgtcaaagggcacacacacacacacatgaaaatctataaataggcacgtaaatggatgttctgtctacttgacgttcacttaataaattcagtggcataaaactaacaataatgagcgtaataaagaaaattgacaaagacagtgttgaaggccttgagggtagcctttcactgttttctcttccgccaacgaatgtggcgataaataggaccaatgtccgcgaattgttgcccttgtcggcacttaatcagaccggcccgtatctgttccgtttgttctcggacagtcagtactgcgacttgagcaaaacatacatgtatttgctcagctctattgagcgcaagaatggggcgggtgaatgggttccaatcagtgatgcggagccggaggataagcgcgttggtgtaatccaaaactttggcagcagctttgtccgctcactgaaaatcaacatttccggtatagaagtgttcgacagctccatttattaccattaccgggactacataatgaaggaactgggctactcccatgaaattcgtaagactttccatgaggcagcgtgctattataccgatgaggatgatggacaagacagtgccagcaacgacggcttcatcgcccgtgcagcgcgattctctaacggaaagcaatgcgaaacgatggtgaggctgaactttgatcttgcacatcagagtgcattgatgttgaacaaccaggacgtgatattcaccattcatcgtaacagtgattctttcctcctgcttacgccccccggaaagaaagcagacggaacattgcaggaaaacagcaaggaataccgtattcgcgtgcacgatttgcgtctgtatgttcgcaccgtagacgttacgcctagccttaacctggcaatcagccgtcagttggagtcaacctcagccaaatacccgctgcgtaagattgagatgcgctccatttttctgggcaaaggcaggactgagttggctcacaacgtgttcacttcaaccttgccccgtcgtctgatttgctgctttgtctctacagacgcttattctggcgatcgaaagttatcgcccttcaaatttgaacacgctaatgttcgagcgataagtgcggaggccaacggtcaatcttttcccagcaccccatacctgctgtcgtttgacggtgcacagcaacgttttgtgcgcgcttttgtcgacatgtacgccggtcttggtctggatgattcagacacaaaaacggtgtccattgggatgcaacgcttcctcagcggatgggccttcttcgtaatcccgatgacctccacgctggatgatacgcccggctttgagttgatccgtcagggcacgtgtacgcttaaggtccaatttgaaaagcctataaaagaggacggttacgaaatgttgatccttggcgagttcgattctgtcctttccatcaacgctgaccgagtgttgagcacggacggaagtgtttaaacagtgggaaaaagagagagagagatatgaattcagcacaaatagatgtgctactaaggagaatgcgtgttacaagtgggaagttcatcggcgtttacgcatcaaacaaaataccaattgtacttgagagacagaaacgactgcggcgctacccccactgcatggtcgtaaacacagacagggagggaacacgcggagaacattgggtagcgtgctatgtgccctgtgcgaagcgaattgaatactttgacagcctaggtgcggcaccaaatccagatttgtctgcttatctcaaccattttcaacatgtgcaggtcaacacgcatcaaattcagttcccctcatctgatgcttgtggccacttttgtgtctatttcttggccagccgatgttccggcaccccgttttgcaatgtaattgaaacgctgcgcaaaacacgtgggatggcagactggttggtcaaatggtatgtacgtacactggcgcgccatgtataaaaggccgaccaaaagtggggagggtgccacattgtttctttcattgtgagaacagaaggatgtcattcttttatttcttgctgatcgccttcattttattccattttctccatctatctgccggagaatggattaatgttgagctgagtgtggacccaccaaattcttttgaccgttcattccgcaccatttccaagaattcacctgcgcaacattggttcggctataatcgggacacagcatgtcatgttgagctggagaggaatatcaatcggctgtacaccaacccggatacgtggaacattgccctgacagatgtggataatttaatgagcctgggacggacaacaattgagataccgtcaaccgccttaccatgggcatgttttgggcatggcggccatagttttgtaattttcaacctccaaaatgctgcgggtgaggtgaccgtactgcgtggacaccaacaaaaaatagcacggcaattgagcgcgtatggccgcattttgtttgatcatattgccgcccgattgtacattgtggacaagagcgaacgcagaatcaatgagttgctcattgccgatttggagcggtggtggactctgaataatacggacgatgcgttgaacaggacgtcggcacatgttctgagaagcaattttgttggctttttgccggagcaaaaaacggattatttcattgcagctgatcatgtgtacctgatttggcgaaggcgagtgtacaagttccgcattggacactatttcaacgatccttcgtcacagctccagtttctgaccaactcaagcgacatacgcttcaacttcctcttatttgaagcaggtgcagaaaggctgggtgaaggcggcgatcgtagaaatagcagatcagctgttgttgtaccagcggtgtcgtcgaacggaattgaacgtctcttgctcgcgttgacttacctattcgatcttgtcgtcatattgattgccatttgtgcattccgccagttccgccgattgggaggtggtgcagccgcacgaaatggggatgacgcgattgaactaaatgaatacgatcttttccattcactttcgttgcaaaacaacaacaatgggggcggagcctatgacgtatctgctgcatacaatccaacgaatacagcaccaaggaccgcccaccagctgagatcttgtgcaactatttaaacggctcactttttttttgaattttccaacacacacttgcataaatttactgttattttatgacagccaaaaaataattatattgggtatttgctgcggctatttcatgcaaagagcgataaaacattttcaagaatccttggcactagacaccgttgaacagctgtatgcgcattttaaagaggaaattttgagcgcacctggtgaatattatccaaatcctctttgtgggcttggttgtgtacacattgtcaacgacgatcatcctgatctgccggtgtgcgtcgaaggaacgcttgatttgatcgcgggacttgaactgtactccacatgttatccgaggacggaagcagggacaatcaactggtcagcaagcagagcaatcacaatcatagattataaaattttcaatttatgagcaaagtcctgtacgtggagctgaaggacatgatgatttgcccgggcgagtcgccttgctgtcgctgcgcacaacccatcaacaacaacctgtcacactaccagctgatcgtggacgagctggaccgttggtgggtggacaaccaccaacacaatcgggggcacgtcgtcgaacgagaagaagaggaaagcgtcgaccactcaacctggtgaaggcactgtgtcgtttcaacggaggctgcatgccatcagttttaccccagatgattcagaggagacgaatagaaaatttgtgctttcttcgtgatctcaggctgcgaacagtgcacctgaagaataacattatgatttccgccaactcattgtcatttcacagtgcaggcagtttgcttgcctaccgtggctatttgtccataacggtagagcagcacttgtacgttcgccatcgtgttcgtcttaggttccccttcctgccctgcgttgtgcaatatgggggaaatcaccatcactattattttccattagaactgcttgaaatatgttctcgtccaactgacgaatcctcctaatctacacaccttccgaatactgttttattgttgctgttgctattgtgaaaaataaatgtttgttaacacaagtgccgatttggggttattattttggggtgagcacttttcctctattccaactttcttccctcctgtgcgttattctggactatttagtttgccgccgcctcctcctcatcatcatcaccgctatcgtcatcagtgacttcggcttcagactcagttgaagaactctgggccccttctcgatgagagtcgatagctatttttttaattttgtaataatcatcatcatcatcatcatctgattaccattggaaaaatgcgcggcctcccaatcacgaaccttttcctcagaacgttcaaccctacaaaaaaaaaaaaaaaaaaaaattggttgatcgagtcaacgcagtttatttttgctaatacttttttagtatggtgtccaaangagtcttcccctaaaatcgac

SEQ ID NO: 346 - DNA, 10193 bp, Heterodera glycines
atgattttagaaaaattttcaggtacatcgatcattccgttatcgcttttcttcgttcaaatcaccaaaatttcgacaaaagaggcgccgacttatatttgtggattccatcatcacacatcatggatgtacagccaatttgggacatttttggtcgtgaaatttggcccattttttcgacaaacattcgccatttacgctttaacatggtgatcagttggacaattttcttcgtcgcactacgccgacaattatcactgatctcaatcagttgaattcaatcgattcatatggtctgttgcccgaggcaattgcgattggtgacgatttggcacacaccgagaaaagatggccaacccaagcgattgtgttgcacacttttgaacgacaagtgtacttcgattgggtcaacaatttcaagaaggtatggtcccatatttttttgcatattactgattttgactacttctatttttattttccaaattatttagcaatttctccgtgccaatgccatttcttccgtcagttaccaaattcattttactgttcatgcgccatcaattgtgacatttgaattggtgaacgaatggacaaaggaaaagctgataacaaattggagaagtaataaatgaacatctgctgattctgcagttgcttatattaacatatttatcggggtcaattaacataaattaaggcaaaatgatgacctaaaaaagaatgccccaattcagaattttaaaaccaagagtcaagaaatgccatccttatttaagagaaattaaattattttgtgaagtttctcgtattaatttttaagattcataggaattttttcgaaaaaacttgaaactgagtcacaaaatcgacgttttaataaacgaaattaatagcaaataaaatagtaattagtattataaagccaaaatgaaaattgaaaaaaagaatttaaaaaataaacataaataaagtaaaaatgacagcaattagatgaatttctccttcttccattctttttgctttcttcagagagtcgccaaattgaatttgaaatttggcccaaagttcgcctcgattttgtcgcccacccacaaagaaacgcacggaaacagagaattgagagaattggcgggagtttgaatgaaaaaagaggaataatcttaaaaataaaattttaattaatttgttttttcattttaattggcccacccattcgttggccattcttcgtcaagaagatcagtcgagtatccaagaaaatgccacatccgaccacgtcaccagtggaaaactccgatgatttgtatgccatttccacgtccgccgattgcattgccacgggggaaaatgacgaaccaaataatgacattggcattttgcacggccgattgatgccattacagccaaatgagccatcgcttcggtacccgtaactgttcaaaatttgaccaattgacccgtccaatggcacttccaatcgcagcaaaactgttaaaataaattcaaaattataaataaaacgctaagaaatcatcaaaatgaacaccttttcaatttgaacactttcatttcgaagtagaaaattccgggacgacaaaagttcgtaattggaaatttcgcaaaaacagagtgccatcctaattaagaaagtaattaattaattacattttttaatttttatattaaataccaaatctgttgcccttgcaattgatcgtcaattgcttttccccaatgatttcgatgtctttgtggcaaactttggcatcccaatcattttgttgctgcgaattaggcacttcctgaaattaaatggcatttgtgaaataattaaggtttccttcccacctttgcaactttcgctgagacaaccgccggcggcgaatggtcgcccgatgacgtcactaaagcaactaaattagcaataaatacatttaaaaaaaaaaattaattttttaacacctaaatatttataattagggctgtaaaaaatatgtacaaaaagtggtcatatatgtacataaatatgtaaaaaaaaatcccgaaatatgtaagaaatatgtataaaaacccaaaatatgtacgaaaatatgtaaataaaatttttttaaattgttattttttggaaaattttttttcataaagtgttaaataggcacaaaatgccataaaaatgaccaaaatgtttaaaatcaccttttaacatttgaaaaattatttttggaggggtacatttaaaaaaagattttttaattttttcacaagaaatttctaaaaattttcaaaaattctcagaatagctatgtaaaaaaatgaaaaatttgccgaaatttttggattttttttttgagaatttccaaaaatttccgtaaaaaatcctcaaatatgtaaaaaaatgaaaatatgtaagaaaaaagtccgaaatatgtaccaaatatgtataaaatcccgatataatacgagggttttgtcccctctcaaaaaatgcattttttttataacgccaatttttaattttaaataatttgccaattgtgcccacccaaaacattgtttttgtccaccacggcatattttccatccaatttctgttcggtgtttttgttctgttgaccaacactttccttctgctgcttttcctctgctaaaaaatgtatccaattgaataatagaaaatgaaaattaaaaataattggcattggtcagctaattaaatatgttcatttaaaatttgtaactgatcaaaattgtaaaagcttatggtccgttaaaattttttcgcctttttaaagtatgcaaaatttcggtccgttaattatttattttaaatttattatttaccctttctgccctcctctttgttctgccgattttccaattgtttgattcgctccaccaatgaattgaacacatcgacagaaactgaaataattttgaagcatacagtactgtccgagtacggtaataaaaattatttatttttttaaattgtctctaccgtattttttgtccaattgctgctgcttttcctggtccatcttatcaactttcgccttcaattcactgttttccgacatcagcttctgcttctccaactctgctttaagcgccttctgaattttcttacaaaatttgaaagtttctgttttatgcgcgttcgctctcagttatttcgtcattttttaaatttttttttaataattaatttttcttacattctctgcattcaattccccgtttttgcacagcaatttcgtttctctcaattcggcactggcaagtttttctcggcattccttaaataaaaaaagttttttcagtccactaaataatttccaatttccttcactcattaattgcatgatttttggcaaaatgtctcttgattgctctcggaattggtcggccctttgtccgtgactgatccgtccggcctctctccccctcccccccccccactgtgatcatttgtgctcccccctctgtgctcatttgtccgttctgaaatgtcccaccttcaacagctgctgatcactgaccaaaaattgtgctgccaattggtcgctcaaatctccgtgccaactgaacacttcatacttgtccacttcttctgctgctgctgctaatggtgataaatttttattttattttatttaaaaaagataaaataattttccttttttcgtaattctttttttaattatttctcttaccctgatcagctgttggacggaaaaagcaatttggcgaaccgataaaatttgaagacatttttcgaattaataaggtattaattggactggctacaaattaaaatttttaaataaaaaaaatatgaaaattggaaataaaattcatcttcgcatgtaaatgaatgaatgaacatttgatcttttgcgctgaatctcccctctatttatgggctggcatttgacggcaaaaaagtaatttgggcaaaattatgacccatcaattagaatactttttagaaatttataataatctcttcttttttttttggcttgggctgttgagcaaaatgatgacctaaaaaatgggagagggaaaatgcttttatgcaaaaattgaaaaaaagtaatatgattggagcttaaagtattaatcagcgaaagatgtgatggacaattaaatgtttctttttggtattaatatgtaaattgttcggcattattgtgatcagtgttgaaaaaacggtgatcaaaaatataatatttttatgttctaaaacattccatttcattgacatttttagtgacgaaataccgtaaatacaggggtaggtaccgtaaaaagttccaggggatgggaaatttttttttttaaattggctcaaaatcgtaaaattttgtcattttttgaacaaaatcgttaagaaatcgcattaaaaattacaaattttttccggcggcgcctagcggttccctcacacattctcaaaaagttttttgaaaaaagtgcaaaaaaaaaaaatcaaaaagttttttacgaaaatttcaagattaaatttttgaaaaaattttcagcgattttttctaaatgttttcgaaaaactattaattcctataaaaaattgaaaatccgtttcaaaattttttcaacttttttttttacaagtacatattaaaataatatttttttggtgtgattaaatctattatttaactgaccgatgttttttcaagttttcaaaaaatgcttaaatggttttaaaatacattcttattataaattagatatttttagacgttcccaagcaattaattgattttttcaagcatttgtttgttttttaaaacaaatttaaaaaaatccaggtccaggcctggatccaggtcccgaggagcctggatttttcctggacctggattttcctagatttttgtccaggaaatccaggtccaacatggaatccaggtccaggcttttttcaaaatgtcgatctctaaaaataattaatgattcctaattacgaacaatactattaaaatgagaatgtctgggctaaaaatgagtttttcgcgcatttctcagcgaaacaaagcagcaaaaatgttaaatattgtaactaaaatgcaatcccttctgtaagcatagctatttggccttataaattaattttcattgatattttcattcctcccatccttgagtcaaagattgtgccaccccaacattttgctttctttcccctctcttttctctcattttcgctcctttttttattatgtttgcaatttttgcatcgctaatttttaggtttctttctttgattttaaaatattttttcatcttttttaatttgtcctcatttgaatgtttaacttgtacttaaaaataaagataaactaattaaaaaacaaattctctcacttttatgatattttggcatcaattcttttttccatcttcgtaatgtttctttagaaatgcccaattccttcgcaaattctttttgtttgcctttatacaaccttttaaattcatcaaatcgttcaatgaattctttctttttctcttcataaaaaactatgtttcattattttgaatttaattttatttaaatttaattcatttttccatttgtatattttttcgcgatatatgcctaaaattcatccaattttcctctcaatttttgtttgtattttccattgaaattttcacttttcttcaatttttctttaattacttcaaattttcgaatgatttctcttttttgttgatcatttgggtctgtccccatttcttcacccatttgatcaactgatgctgattgtgagttatcatttcgctcatttcgttcagtttttatcaaaatttcttcacattcatttttgtcccattcttcgccgaatatttcattaaaatttgttcggattttgccggattcaattccaaaatcaaagaaaattgtaaaaaatatcattaaatgccacataatcttaggatatttattaatatatatataaaaaaatttatgaatttattccttcaaatgaatatatttaatgttaatattcattttaggtacttttccgttttggggccaaaattattttatttatttatttatttttttaatcaacagagggcgcggagaattgctaaagctactcaccaaattatttctgaggcataaatgccataatttgagttaatatctcttcgaatggatctgcaattctattagcttgctgttgatttaaaaaaaaataatcagctttggccccaaaacggaaaagtatctcattttatttatctttacaaatattaatctgccacgtaaaccgaacaattaaatcaattcttcaaaatattttatatttttttaaattaaaatttgttattaaatgttatatcttttaattttaagagatttgctgaagtaattttcgttcaagttataggtgctaaaagaaaaccagggaagttaaattaacaccctcgagaattactctccaaaacttaagaaaatttctttttccaaattcttagcgttccatagccaatttgcaatttattatcaattatttttgtcgctaattttcggatttctttcttggattttgaaatatttctttatctttcttaatttgtcttcaacgaattaaacggatgaatatataaaataaagaatctttgttttgaggtaatttaattcggtgctaggtcgtttcttaaaaaccgccacattgggcgtttcttaaaaccgccagggcgtttcttaaaaccgccagggcgtttcttaaaaccgccaggtgggcgtttcttaaaaccgccactttgggcgtttcttaaaaccgccagggcgtttcttaaaaccgccaactcatatgattatgtatgtatatccgttaaattaaatattcaataatatctattaatttttatttgttgtgcaagtaagtgtcagccggaaatattattagtctagcagtgacagactaaaaatctttattaaattaatttacaattatttacttaatttttatttggttgtaccaattacgaattagcaattttatattcgaaaattttgcagttgataattgttgctataaccacgatgtgtgctacataaataaatatcagaaacgttacgattgtgatattaaattttgcaattgccttaatgaatatcctaattgctttctaacaaaagtctgttctccaactcatatcttaaatattttattttttagaatatattatgctggtcagttcatattgttggagaacgttttaaagaaggataaaaataattattttattttaccgtcaatagatatgcatatgtattttaaattttttattgttatgtaaacttctaatatatatatatttatatacataatcatatgagttggcggttttaagaaacgccctggcggttttaagaaacgcccacctggcggttttaagaaacgcccaaagtggcggttttaagaaacgcccacctggcggttttaagaaacgccctggcggttttaagaaacgccctggcggttttaagaaacgcccaatgtggcggtttttaagaaacgtcccagcaccttaaatttttattatttagtgaatttttaaataatatctattataattaaatttcaattaatgtattattttattagtttgatacatgcacttttttcgtatttcgcccaccacgcttgcactttcgtactaccttcatcttaacaagtatataaccattatttatctatcaatcctaattaagcggttgattttttcaatcggataaatttgctgtacggcattctcgctgattcttgcactcccgacgcttgcccaacaatgagtggtgggccacgctatgaatatttgtggcaggacggagcccagtacaaaaagccaacaaggcttccagcaaaagtgaaagccttaaaaaaaattatgacaacaattttctaagcactgttgcaccagtcggattatgtcattttttggataattttttgggagcttttgacttaacattcaatccctggtttaccgaaaaaaaaatttgtattaattaaaaggaattttgattttgaaagctggtttttataaaagggacaactttttcagaatttattgaaaaataattctgttattatctccctgtaaacactgatttttcactacaaatcatagagaaaaagctactttaaactcatttcttgtccttaattttttaaaggattatatgcacttactgatggattggattgaggagcgtattaatgacgagaaaattttccctaccgcgacaggtgggctaatttttattttatctataaatatctaaaaaaaaaattttttaatttttatacagatgtgccattcccaaatgattttcgtcaaacgtgcaagaaaatcttgtcacgccttttcagaatatttgtccatgtttacatccatcattttgatcggcttgttcaaattggagctgttcgtttttgaataaattttaattttcaaataatttcatttttgtatatttttatttaaatttgattttcaggaaccacatgccaacatgttgtacaaacatttctactatttcgtaactgaacataacatggtgtcccaaagagaactggacgccttggtaagcgcacttggctttggcttaattgatttatttagggtagaaaaccatcatttgaaaatgttgagaaaaagctaatttttaaaaacagttttacgagttgcatttgttcgagttgccattgacccgcgttatattcgcataattaaataaattatttatataaattattaattatatttaaattaatttttcacttttttttagaaggatttgactgctcgattgataacatcacaacacaaccaacagcatactgctatcgatgccaaaaatggttctaccgcaaaacaaatctcaccagccaaaacaaattgaaatttaataaatgataattaattgttgttaccgtatttcctctaatagggtctcggggctctatttttcaaatcgccggccgaaaggtcgccggaagatttttaggacccaaattttttcaccgttaaccaatttaagcattcttggaattgttcggtagttctatgtatttattattattctgccaaatctcaaaaaaaaattcaaataaggtatgctagaggaactcaaaaaacctagtttttcaaaaaaaattttgcccttttttgtacatgaaaaatttaaatttttcaaattaatagagggttatgaattaacgaacaattccaagaatgtttaatttagtttataaagaacaaagttattgtccaaaaattcgtacgccttttgtcctgctccgataaaattgaggaaatacggtattattattaattatgtgatttgaatattgtcctcatttgcatttctatttttaataattggccaaaaaagtaaaaattggtaaatgtggccatagcattttgcccactcccaaaaatgtttggaaaatgtcaagaaaacacccctcccgataattcgtcatcctcgtcgcatttttcatcgtcaacatttgctgctttaagctgcaaaaattcactaatagggcatatgtgtagggcaattatttaaaaataaacacaataaataattgctttttaaaattcggcttttttgcgatgaaaacaataaaataattatgatgcttattgtagcaaaataaacaaaataaaatgttggcgctttatattcaaatataatccatcaaattttctatcaattaatcaaaatttgagactccaaaagcaaatttggaacaacgattgaaccttgatattctgtcattaactcaattcccattgattgtgtgcaaaacgggcattttcctttgattgagaccaaaattttttgacacataatcatcgtcattaaaacatgatatagatgaagggattaagaaggaggtggcatgttttgcactcatttatgcaatacccccccccccccccgctcccctaaatttaattgaatttaagttatgtgtgcatcatcagccagcctctccgacgacgacgacgccatgaactcctctgatgctggtgatggacggtcggtctgtcggcgggtcgtcgtcgtcggagtggacgagaaatgagatggcgatgaggcgataaggtaacctcatttgagtgagttcccc

SEQ ID NO: 347 - DNA, 1619 bp, Heterodera glycines
cccccccccccccctccccgtgccgccgccctccccatcgtctgctggtgctgtgcgtcgtccacccctacctgtatatgagggacgggggaggggaggtgggtgccccgtgctggtgccatcagatcaaaattctttcaaacaaacacaccaccgccaccttcttcatcaccaaattgaaacggaggaggaggaggaggatgactggctggctgactctaactaaccaaccaattaaaactgattgaattaatgagtgagtgaccggcggagacgagaatgagttaaaacgggggattggggggggggagcgagggatcatcgactggctgctgctgatcgtccaccatcacacatcagcatcagcgcaaaggtggagcagtagaagtagttgaggtagtcgtatgtcgggtcgttgggggtcgggatcgcgctggggcggacaacacaaacgttaaacgatgcaaattgtgaaatttatatgtggatgagtgagtgagtgatgctgatgatggagcgaaatggcattctccgccaaccggcgcggttggcttttagcaatgatggacaagtgttggtgaactgcattcggcgagtaaaaggcgcttttggcgccgccttttccgacaaaattgacgcgtcattcgaagaccaatgcccggacggcagtaaataaatttttattgacatccattttgccgattttcaaatcgcaggtgtccaatcacggcatttcgcctaccatttacaatgtctgaatggatgggctccaaatgaattgctcagatgtgaaatatgtccaaaggtagcaaaacccaattaaacaaaaggcattttaccgacagggacattttgccaccaacggcacttgtgccaaatgccctacggggacatttgccaaacaagcgggacagacgaagtgcacaccgtgcccgggggggacgaccaccgccgaggccggcagtgtggcggagtggcaatgtttgggtgggtattttcaactgttagttttttattatgggatgggcattctcgggtccgcggtcgcgtccgttggtctcgttccgttggtccgtctgtcggttcgtccatttgttgatcaatcggttcatcgtcgttttggtcaaggctcgtcagtcatcggtttcttgcgttgttccggcatccgctcctcgtttgcttgaatcccatcgccttatccgtcttcgctttccatctttctttctttttgtctttttctttcacgcattttcaaattctgtcagttattacaatttttcaaccattttcgtccgcttttgatcagaccaccataattccaggctttgatcgcctctggcgatgttttgaatctctgaatctaaatgatcagttctgtttattcaatgtcctcataacaaacgcacacacacacacactgcaatttctaagtaaattttcacaaacaaatttgttaagaatccactgaatttcatcatgctttcttatatatttttttcccttttcggtatttttccttgcttaatttaagaacgactgacctatgaattcgctgaagctttttataatcacgtaaaaaagctaacattatcactcaattttttagcttccattattat

SEQ ID NO: 348 - DNA, 5014 bp, Heterodera glycines
  unsure (1)..(5014): unsure at all n locations
attgtgcacttgacatggatgtgtggagggagtgtggtgatgatgcatttatttgtctgtgagtgacagacacaaaaaaaaagtgccgtcagaaaagtgaattcattttttttgccattgtgaatctgtctccatcattctctctctcaccctctctctaattgtccctaatgtgtattaattagatatatatgctccaagcattatctaacctattcagtgataatgcaacaacaaaaaatgaaatttgtagatgatatgaggctgatgtgtaattgacctcatcatttaaaaaatgttctcatcccttccttcctttcattcgcattaaatatatgcttttaattatgaaactcatattccctttaagaattaaaattgttttatgtgtattagacaatatgtttattaattagtcaattacctaattacattacttcaatcttattcaatttttcaattatatctagcagtgttaattacagacattcaacaatattttagcaaatgaccagcagtcaaaattcaattatggatggcgcaaatctgttgggcaatttggagtttttgaacagccttaatgaaggccgtaatttgcttcatacacaactggcacaaaaacagcaacaacagcatcatgtaaaaatcgatgatttttgtaaattttaaatgctaatctttaaaatacagtcctcaacattttgccaatcgccgtttccactaaaacaaccgaagatggaacataaattggacatttttgctcaacttcaacaattggtgtcctccagcagcagcagcagcactaatggctgctccaactccacagatcaccagcacctagcatcatcattcccgaagcagcacattgcttcaatgcacaacaaaatgcttagtgagaatttggagaaaattttggctaattaaaatgattacggtcaattacagtacatgcttacagtttcgtgctagcacatttaagaatcattaatttttataatttgtttgaaaattgctcttcatgggcactataataggtattagtctttggaaaaatagacctatcagattaagtataaaaatgatttcaattcagtaaaatactgactttttcgagttttcaagtaggaattgttggcactgaactgtgagtgccaaaatttaaaatgcagtaattgatttaatacggaaaattattaaatttaatatacctttccattttttaggtcgggaaaaaaagaaatttagctctgatgtgtcagattttttggtgcttgaagtgttgaaacggaaagagctgttggttgagaacaacacgagccgagtatgtaaatagataataagcagaagaaattcagcaatttttgatcaaaattccctaattttcaaaaataaaacaaattataaaaatgatttttcacacaaaatttaaaatacaattcaaatttttcagaaaaatttcttttattttacaggatttgtctttttcggagtgcaaaagaaatgcttggaatgatgtcagagagttgctggtgtccagattccccggctttgatctgaacattgaagcgatcaagtcacattggcgctacagaaagcgcaaagtgaccgacgcgttcagtgaaatgtgcaaagggtgcgggaatttttaaattgcataacatttaaaaaatttaaaataatttttaattaattaattaaatttttgttcagcagtgaagccgaacaaaagttgaagctacgacttgcggctgtcgatttcgaaatttatagccagttgaaggattcaaatttgttagaaaggacaaggcttgagaaggacgcatcaccggtgtgaaaacaataattaatttatttacgtatcattattattttttaaataattaattaacaggatcagtgtgatgatgggcattttgaaagtatttcgtcgtcaaattctcccgcaacaagagcaatcaatgctgaatcatctgctgctgcttctacaatgtcacttgcgccaactctgccaatgatttcacaggtgtggttgtttttttttttttgaaaaaaatcgtttttatccgagttcttccaaaatttgtccatttttaatagcccgatttttaatacgaattccccattttccataggctcccttctttctgggccaacttggcccacaacaacagcaacacattggcaccacaaacccgacaatgttgctcgaacgcttaacagccagcttattggagcagcaactgaagcaacagcagcagcagcaacactttaccaaaaaggacgtcgaagaggaggagaatgatcaacagcagcaggagcagagaggacgggaaacagttcagcacagaattaatgattaaaatgaagctaatatggggggggggggtgtgtacaatgagtaaattgaaccctaaatcgtacacgccaaaacgtcgtcgccgccgtaacatcaccggaacgtggaattgtcgcttcaaaaaattagaaaaatttaaaaaaaaattaaaaaaactatctcttaaaattatttttcttaataggctaggtaacaaaattttgattttttttttcttatgttttttctaactatttttctaatattttgctgcgacgatgcgcccaggtgacgttttgtcccgctttgtcacaaaacataaccttgttgaaaaaactagcaattcccatcctgctgctggtcccatttacataatcaaaaataaattctaataataaatttatcatttaattttgttttcttttccctaactgaaaggatcaaattgtggacgaacacgacggaattgtaagcagcggagaacgacgaagccaatcggcgtccaccacaatgtccaacctgagcagcacgataatgccaactgcagcagagtaccaccatgttggcaatgcagcaaaggagaacggtggtggcactggcgctggaccggaaccgccggcaccgaagcggcttcgtcttggcagcgcggagaacgaagaagagcgcgagatggcattgctcaaacgagaggcgtacatggtgccgtatttaaaaaaaaagttatggccaaaaataaccgaaaaaattctggccataacttatttgagttaagaaaaattttttgaaattttgccggctcaagagaataattagcgctttcgaatgatatcaaaaattaaatatctgggtcaaaggacgaagctcctatgattataaatcagatttttggattaaatattttggaatttcaatgaataaaagagaaaataaaaactcagaaaaaatgcaattttgttgagtttccaattcctttttaataagcatattaattgaggttgatacatatttgaaattgaaatttatttttaggcgcaagcatcagcatttgatgagatacgatcgctggtgacagaagtgcgttcaactcttttaccgcagatgttaacagctcttcaaaattataattcgcaatttaattcataaaatttgatatttttcaaattaattttttcgactatttcattttgtgagaatgaatattttgataaatttttgtaatttaatttaattttaatataatttttaatggtaatattacctattgtaccccgccccctttttttcaaaaagcaaatttttctaaaaaaaattttaaaatagttgttttataagttttcaggatcggagaatagtagagttatccccctcccatgcataaactatccacaagggtaaatgtgcacattgaattgattttgggtaatacttgaatttttggaaaaaaagaattttaatttttgattattttttcgcaagaatggggagacaaaaaattcaaaatattttaatttctgtagagggattgaaacaggggaaagaagaagggaaaagtcaaagagactagccactagaccatttgcacaatttgtattgtttctttgaaagaatatatttatgattatttcttaattttttccttttaactccaattttcatcactaatttttcactcagaccccattcttaccagcgcttgtttttcccggttcccggttgccctaccgggaccgggacctgagcttttcaaaatccgggaccgggaaccgggacctcggatgaccgggaattcccggcccggtcccgctctactctatccaaaattcaaattctaatctagatttatttatattacgccaaggcgaaaaattcaaaactaaaggtgaggattattggctaactcagctgaattttggtgtctcaaacctcaacaaaaaatttatgctgcctaaattttaaaaaaacggaaatctgctgagaatttttcattttatttttgcagcatataagtgcaaatgagtgccagttttgatgacgaacttcagctcgaaatgcaatcaattgaggccatttttccaaatgaaatccatattgaatcggctcgacaaatttctgtccaatgtgcgtcgaatgtacaactaaatttgaacatcccggcagactatccgaggtcatatgatgctgtgtttttgggggggggggggtaaaatgtgaccgaaatataattatgtatattttaaaaatttaaacttcaggattttttttaaacctcaaaacaactgtaagaatttaaatttggtaaatctgcatattattcatatttccgggacggcctaccttggctattgccttttgaccaagggcgtagccagacccttggctttgggggggggctgaaatcaaaaagtcgatttttaggggtgtattttaggttttttgaaatcccgaattaggggggtgtattttacaattttagccgttttcgcaaaaaaaaaattactattttttgccattttggtttctattattcaaaaatatggtaaaatggccagtggtgccgataggcgccgccgggaaaatttttgaatattttaatacaattttgttaagaaaattacttaaaatttcaaaaaaatttactgaaaattttttactttttagngtttcgggggggggggggtc

SEQ ID NO: 349 - DNA, 13340 bp, Heterodera glycines
catggcatgaaggatgggggcttcctgtccgaagtaacagagatcaactacttcaggacgggaaatagtcaatgtggatttcgcccctacgagggctgaaaccaccacactcctgtaccaaagggaccaaggggtgaatgtttatcccccgtctcccgtaatgtcgaaaaaccgacattccggggtaaattaaggtccgctcagctccaccgcgagttaacccatcaatggttagttcgcgattggtggagaggtgattggtccgaagaaaggctccacttctaagaaagtctcttagaagtgcttctgccgatctcctccctctttggtaccaatggtttcccaagattcgtggaaaccacgaactcaatcgctcgcgatttccttgtggccagattgatctgggtggagtccacgaccaatctgaatcggccgaaattggggaaacctctctttcaagagaagaatcggaaccgggagggtcagagccaagctctgacacttgttcccaattccatggatgttccagaggaatttcttcctctgtggtaagaggatccacctcttcagtgaagagaaaatcctccgggtcgatattttctcgacccgagggagcgagacgacgaggttctcccccgtgttcattccttgaggagcgatttgtgatatcgctaaaaggggtcctctcaaaaggcatggatattttggtcgtgggtgaaagtttaaattgtgggatgaatggtaagtgaaatgagagttggtctatatttatagaaattttttgagggataggcagtgagtcattaggccgtgagtcacctccacatacgaaggatcctcccccggccaagtacagtattgccaatactgtagacacgttaccgtatctttttctcattaaagaccaggaaataaatttccaaagtctatagaaaggagaaattttaatgaaaattgttaggcaaacaatgcctacacaaataatcattatgaaggcaagtgatgattggaggccaatcaaagaccaaagggtcgccttccaatcaaaattccagttatgccaactggattggctatccatcacttttcccgagtgatttgggctgtaatcttctatttgttcaggctggacatagtgtaatgtcccgcttagaacaaaagaagtgcttccagccaaacactttgtttggcactttgtgtcaattctggctttatcaaaagccaaaattgtttggtaaattgatgcattggaatcacattttgtcgaaaaatgtgttccatcggcgcaattaatttcggcaagagaattgccaaaatttgtcgagcacacataacggaattgtgctcccgttgaacatctgtaacacccagatatgttcaacggcaaaattgtgcaaaggctttggtgaagttccaaagccatttggagaccttcgatttgaaggtttaattggacaggactaaatcctgtcaaagcaattacctttctcccagtatttctgagttggtaattttttatgtttaatggaagtctcctctctggactttccattaatttttcaaggttatgtgaacgacaattgcagttcactaaacctgatgaatggtcaggtatgcaatcagtgcatgcctgaacaccaagactgcaattgaaatcaattgcttcttgccgacttttacagttaaagtcaattgttaatggctctctggttagagccatgttgttcccgtcgaaaacaaaatctgagtttaagacgggagcgggcggaaaagttactccgatcggagtaaggctgatgttgttccatttcagtgttcttcctggatagaggaacacttgagttgacttgggtttttcacccaaggtttccaggcgaattattgcataaacaataaattcccaagaattgcagcccatgatttcatagactgtcttggacttttcctgagcataccaacgataaaaaaggcatgcactgccgcctaagaggcatttattgccccaaaaggctgtgctgtccaggcaaaatgaattgcctggaaattcgttggcatcttttagctcaggaatggaagtattgtggcgaacttctccacaatactttccttcgcaggagcccattttagggcaccttttgccggccaaaacattaattgcatatgaacgttgccaggctttagtaaagctttggcactccaaagctaaagccttaagcacaacgtttattgaaccaaggagaacaccttcttctgttttcagaagaagagtgtttgtttggccaactggtagcaacgtcaaagttgctgaactttcgacaatgcatttcatgcttgtcgcatttttaatgcatttttccgatttggccatgactgctatggtctctgctccagtcaaattctggagagagttagccataaggacaacaaacgccattgttctgtaaacacggcgtgatgtccaattttgagaagctgttgcccttggcctcctatctttcggaggccgatttgggccagctaaataaattattggcctgataaattgaattatcagccaaatgaccatataaagtcctgaaaacaggacttttaatatggaaaaagccacaaagcttatgcttatgaatgataagcaaagtccccctgctagcattgatgaaatcaatggataacaggttggattcgctaactgttcaatgcaaaaatagcattcgatgagttcacactcatcaactgctggacataaaatgtcttttttgaacatgtgtttcgaatccatccagaaatgaccttcgcatttgaagtcatttaggaggatctccttgggcagctcgtaagtgagcttctttacattctcatgaatgtaacagttctctgcacagcagagctcaactttattgatttcttttggaatctttgctttaacgcctttgttaaagcaaagaagtttgcattcattgcaatgattggttggataagctccaaccaacgcaaacatagcaaaaaggatggaaagacagttcaaaactgtccccatctttgctttgctgcgagtgatcatgccatgccggttttggtcaattggttgatcaaccaattgaagagtttcagtctccttttcatccattggagcttccaaatgagatatttctttctcatttgttatttgaggagttccatttgaactttcttcaaatttttcttcattttctgtatgattatctaatcctacttccaatgggaaaatcttattcaccggacgggtgataatgattttccgaggcatggttccatacctctttgattttatcccatgaattgggagttccaactgaacgcttctaatggcccctggtcggccattaagctcaatgatctttcccaaagaccattggtttcggggagtgaactcctcatgaatgaggacgatcattccctcctttggttctgttttgtcctgaagacggggactcttgtggtcccatttacctctctcccgcagaaggaggaggtattctttttgccacatttcccagaaaaattcatgggattctttagttgcctgaaaaagggcaactaatttttggtgggatgaaagatttcgatccgatggatcgaattcttcaccattcgtgtcccagtgaatttggacttccggttgaaggaagtccactggacgaaggggcaggatttcatccatcccttctgacacagaagtaatagggcgatggtttaatgtggcttcaacttcagccacaaaagttatgagttgatcataactgaggacttttctccccaaagtccttttgaagcaatttttgcacaattggacaaggcgttcataaacgccacctgcccaagggctgatttgtggaatgaatcgccacttaattttattaagtgcgaaaaattcctgcgtgttttgatccactcctggagtggtcaaatgctcaatggttttttgagccaatttaaatgaagtggcattgtcactccaaattaaatcgggcttccctctccgacttatgaaacgtcggagaacattgaggaatgactcggcagttgtgtcaagcatggcctccaaatgaactgctcgtgttacgaggcaagtcataagaagtatccatgccttgactttctctccggccaaccgtgtttcggttggaccgagaaagtcaatgccgattgctttgaaaggagcctgacggcatactcgctcgtcaggtaaaggaggcatttttggcaatgcaaactggtatgcctgcatccttttgcaccgaaggcatcctttcagtgcttttttcactttagttcttgctcgaggtgtccaatactcgagtaagaactcagtgagggtgccttccaccccaaaatgatgccttttctggtggcattttaagatgatcaagtctcggatggaggattgtcctccgagaatgattggatggctaaaaccaaaaggttggtcacaccgtcccaacctggttttaagcctcaaaatcccctcgctatccttaagagaaggatagctgagggaatcttcagcctttttcatctgatccatgcggatcagaaggttctctgctaggagaacatcttctgctgaaaatggtcctttttcggacactttggcgatttcttttcgatgactctcgaaaagttgatgaggatttcccctctgaattaatttcagacggagaaatcttaacacaaaaagagtcacttggacaatctttgtccaagagctgaatcttttggggtcaatcagaggactatcaatcagttcctctgttctggtattaacgaagaaaactttctcttcgttatccagagacccttcctccagattttctggaggatcttttatttgaaattccatttctttaggccattggtcatggtcttccttaagccaggaaggaccattccaccagagagacttatccttaagttctcctggttttgcgcctctggttgcaatgtccgccggattttcggctgttcggacaaagtgaaaggcgcattcattgagagtacgaatttccttaactcgtctctcaatgaattttggctgtgcttcctttgaagcaatccaacttagagcgatttgtgaatcgccccaaagatggagttcagaaatgggtcgccgaatttgatcggcgacaaatttaagaccgcgaatccctattagaatggccatgagttccattctagggattgttaatgcttttgaagcatttttaggcttgagcctatttttggagaagataagccaaactgatatttggttatcttttactgctcttagataaatagcagctgcaaatgtgtgtatggaagcatccacaaaagcatgcaattcaagggatggattcccttgtagcattgctctgcgtgggattttgagggtctgatccttccaattttcttggaaggaggcccattgaatttgttctttctcagaaagaacatcatcccagcctttcttttcttcccaaagagtttggaagaaaagctttaagggctgaatgcacggccccattagaccaagagggtcaaataatgaggcgaggaagcttagaacaagacggcgtgttgccagcttttctaagccatgagttgggaactcaaagacaatttcgtctttgtctgtgtcccaaatgagccctaggacttttaccttgggcttgttcaggcgatcctcctcaggaatcgccttcattacctctggggaatttgtaacaaattccctcaaattgaaaagtccttctttaaggatggctttagactctgcatatttatgcaaagcctcttctgcggattcacactcaagaagagtgttatccacatacaatgattgggccaattcgttggccactggagaatggtatcccttcaaatggtgctgcaaagtcgcagccaaaatgaagggagaactgatcactccgaatgccactcggcaaaatcggtaagtgatcagatttgctggtgtcagtggtttactgacatccttcacccagaggaatttggtgacttccctatcctccggttccaaagcaatttgcaaaaatgctgcttgtatgtcggagaggagagggaatcttggacatcggaatcgcataagcattccgatgagatccggcagtattaccgggcctctatacaaacaggcattgagactgtttgttcctctggtgtgagcactggcgtcgtaaacgacgcgcaatttcttgcctttggcaaggactccctgatgagggatataatgctcaagagtgccaggggctttcctggcctcttcgattatccctttttccaattggtctctaatggtagcatcgtattgctccattaagtctggagaattacgaagcttaccaaaagtagacattagccttgaaaaggccatgcggtaattggaagggaggtcaggcacctcctccttccatggccacttaacagagtaccttccgtctttttctcgacggatggacttgttaaacaggctcattgctgtttggtcgtcattttcatttggatcgtctttgatccccaatgactccaaattaaagaaatattcaatttctttaactgttggcatttgcccttgattggactcatcaatggccatcattgatagtcctgggttcggaagttccggcccaaagtcggactctccgttaaccaaagggcccaaggttgtttgaattacaaacaaccctggagaaacttcttccttcccttggaagaattgccagaaatgtctagcacctatgagtatttcgggctcttcccgagaaaaactcatagcgtcggccatgtccattcctttgagtgggaattcctcagaattccattctgccattttgaatggcgtggaaattctctccgtcctatttaggaggatttcttcccactttccatccgttcttctgatttggatggaatacacgggagaatggaacctcattggtccattcctttctcctccaaagccatagacttccatttcttcggaagtcactttcggtggcttgagcctctcgatgagagggtcggaggcgtaggaagtttgacttcctgggtcgaagaggaatggaacttccatccaaactcttcgattatttttggatctgaccagtatttttctggtcattagaaatgcgtgaggctttttcgccatcacgcttgtcatcacatttgtagtgatgggtgagcattccgaactgggcacgcttttatgagcatgcttgctcatagtcagatgactttgagaggattttctcgcttctcttttcatctgattatttggttggccccgagaggttccctctcgagacttttctccaaaacacaccataaagtggtgtctttcaccacaatgactgcacctgcggggtgaggtgcagttcttggtgttatgccccatcatcaggcaattaatacacctgtcttgatccgtaaggcgcttccttcgcgcccccggagtggtgtattttgtgcacctgctcggtgcatgcccctttgtttcacaaagggaacataagcgttttgaccccctatctgagataggggtctgtggtttgttgatggccgagaaggaacgattcggttgaggagacatcctcctcaccggttcgtttcgttccattggcctccactgccgttcttgtctgaacggctgggagaaacggaacggtgttcctctcccttggttggctcttcccccatttggatgagggggaaaattgcgaggtttttcctctccacggaaaacctgagtacatctctgtacttcctctttcacttcaacgattgaggtgatagctcttcggagctctgtgcagttgaaggctcctcctgccctcatttccttctccaccacttgggtgagaaggtgatagggcagtttggacttaattgtggaggccatgaacttgttttgttcattttctccatagtccaataactgatggcaaatccgttcaatggactctgagaattgtctcagagactgaacggattcagctggtttggcaaggtggagcaactccgcttggagggactccaccattgtcttttcatccccaaaccgctttttcagaatctcaactacccttgggtagttttcatctgacggtgggtataagtcaattgctctcctagcaactgacttctctgggaggcatcccagcaaataaatgtgcttcttgaagtcttcaatttgaagactttcaacggaagtctcaaagagcttccaaaacaaaggccattctcggggttcccccgagaatttgggcaatgttatcggcggaagcgtcacatcatgacgctgatgcaccactggtgcctgctgcacaacttgtgctggctgatttggctggggaattgcatcccccagctccgagaggcctaaagccccttcaatggtgtcgacaagccctcgggcttggtcgacccaatgcatgaaggccttgccttctggtttgaagtctctgtaattttgctcttcatcttgaagagcttgtcccttcactctcaggaaaatggcttcccattttccattgtatttctccaaaagagaaattgttttgcagagattttgtctctctgcgatcagatctgcacggacactttggtccgccagctctttgcccaagttttcttgggctgtctcaatatacatcttgagacgcaccaccattggtgcaatggagatgcgcaagagctcactcattgctcttacgcttgatgaaaacgcaataaacccctttgggttgtgcgtttgatccaagcgctaaggccgcgctttggattggtttggttggagggtaggcttacgactggaagccgacccctacggggctccaattttgtgggcaaaaggccacaaaaatttgcacttcccggcagaaggggaagcagactctcccggcagaaggggggagtcttttaagcaaagcgaatttctgtccaaaagacagaaattcactgaatgtccaaagggacaaattaaaggaggaaattcctctcctttactgaagggacaatttgaaaggaggaaaatgcttctcctttccttttgtaagccttttctttgacccaacgggggtcaatggcttaatgatctgtatgaaagggctcctgagcgtcccttttacagatagagaaaagactaagactctttcttaatctttattcaatttacacaattacaatttaatgcaaattgcttggacagaaaactgtccgggtgacttaatcaaaaattgatcagagtgaagaaaatggagaatgggccgggcttttataccctcacaatcgatgggggcggggccaggcacgtgaagaaatgcacacaagcaaagggaaaaaattccctcaaaaatgatgactcatagcgaaaatatggagaaaagaaaagatgagtcataattaaaggagcgagcgaagggagaaaattgatcgacgaaaaggatctaaaggaaatttcaaagaaatttgtgtcgcttcggcgacaattcccatgattttcattaaatttttgaatgggtttttcttgcccggaaggattgaaatatcggggactccaggcggtacgcgtatgagcctctctagcggtactttgattggctcgtactctaatttatcgattggtacgacaaatgctgaggaatttgaaatttcggtgattttgtacgggccaaaatgattccaagctaattttctgatgcgcgccttttgtttctctgacggaaacgcaaccataactctatcaccaactacgaatttgccaattttcacatttttccgtgaattgaactcaattcggtccttctctcgacttatttccgcattttttcgagcttctcctaggatttcactcagattttcgcgaaaagcctgcaaatacgtatcctcgtccattgagtgccatggatcaacatcgaattcgacgttttggtcagtgggaaaattgacaactctaccaaacattagggcatacggagaaaaccctgttgctgcggacggcgtcacatttaaggcaaaaattacataaggcaatttcaagtcccaatcccattctgagattgttgtgcgtttaagcattcttatgattgtttgatttgttcgttcggcaagtccatttgcctgagggtcatatccacatgtagtggaaacttccatttttaatattttcgaaatggcttcaagtgtcgaatttacgaattcttttcctctgtccgagtgaattcgacgtggagctccaaaaactaagacaaaattttcaacaaagatttgagccacagtttccgccgatttatcgggaatcgattcggcaaccgtccattttgtgaaatggtcgacacagaccaaaatataacgattttttgcccgactgcggccaatgtcgagaatgtctaaacagacgagttcaagtggctcagaagtctccaccatctgaacacctggctgatttgcccttggctgacgggtgtgggcacaaattctgcaattcaccgctgctcggttacattctccacgcatatttggccagaaatacttttctgacagttgaagaaataattttctcgtactgaaatggccaccacacaagccggaatgacgctcattcacaatcgaatttcgaaactcttcagggacgaaaagacgaagttttcccgtttctttatcgcaatggtacaacaatccattaatcagagtgtaaaaaggagtaaaagacataactctttggatttcccgaggatcgtttggcaaaattcgatctttaaggaattctaccagtgattttaattcactttccgccgttttttgctgccatttacgcaggttttctcgtgaaacatctggagtttcttgggttgttcccacggcatttatgtttgccatatccattttttcggatttctcaaggccaagattttcggcatttggaaaatttctcgacaaaacgtccgcgacaatattacttttccctggtcgatattccactttcaaaatgaaacgcgaacgcatctgcattatccatttatccactcgccaatttccagtttctccattcgttttgaacatcgggattagcgctttatggtcggtcaacacacatgttgggatcatcgaaataaattgggcgaattttttcacgccaaaacaaattgcgagcgcttcgagttcggttggtgcataacgactttcggcttggttgcattgtctcgatgcaaaataaattggccgaagattatgcgcttcatcaggttggcacaaaactgctgcgactccgattttgcttgcatctgtcatcattaaaaacatccgatccggatcattctgtgctgcattgaagtccggaaaatgtaaaacaacattttcagaaattttgctttttaaaatttcgatcgctgtcagctcatcgtcgtccaatgcaaaaggaacttctttttttaattttctaaacaatggtgccgcaattttaccgaaattgtagataaatttccgataataggtcattaatccgaggaacgactgaagttctttttttgtttttggaataggccagttcaaaattggctgaattttttccgaatctttcttgattccttctcgggttagtcgatgtaaatgaagacaaaatcgttaagaattccatcaaacagccgagtcatgaatcgctggaacgtggctactgcattcgacataccaaatggcatgaccaaatattcgtaaagcccaaactctgtggtgaacgcggatttgctgactgagtcagggtgcatttttatttgccaatatccactcatgaaatccatcgtactgaatacttttttattgcccaacatcatcaaagtgttgtcaatatttggcaaaggaaatgcgtcttttactgtaattgcgtttaggcctcggtaatcgacgcagaaacggattgttccgtcttttttcgggactaaaacgatagggcttgcgtaaggtgaccaggaaggccgtatgaggcctctgtccaaatagtcttgtagcatcgttgccactttttctcggaatgcataaaggacgggccttacacgcattctcaaaggaggagctgtcccagtttcgacgtgatgcattacgaggtcagtttgtgtcaattcctggtcctcaaatgcaaatatttcctcaaaatcacaaatcagttgacaaactggccgttgttctacttttgccattttaccgagaaaattaggcagaaaattttgcaatttttcagtccgttccataccgctcatagtggcttgaactttgtaaatttttggaatgctttcatgcattctaaagctaagaccattttccgcctcgattatttcttcaggttcctccgcaactcccatgatttcgtccttcaaaagttcaatggcacatgcaccataattcgaaactggcgcagaaaattttctattgttcgtgcaaacgatgctcggttcgacccgaaaaagagtctccaattcgtccattggtgtcacaacaaaatcatttttaatgtctttgttgatttcgagcggcactaatgtgatcgatctcggagcgagtacagttgtacatgcgactaggatttcattcttctcagtcttttctttctcggatatgcattcgaattctattatcgaatcggtcttctcgtcgtacaattttaaacccaaaagaccgagtgcattcgtcccgattaacaaatcgaatccgaaagatgcagatgtgatgaaaaactcgatttcaaccggttctaatttatctcgatttactgaaagagtgacaacaccgaaggtgttaatcttttttccattaaagtcgtatgccgttttaagggttctattatagttccctttatgtagatgaatagtcccttcacggacgagcttataaagcgaattggcagaaataaggcaaagttgcgcgccgccgtctaacattgccgaagtctttgcaccattgatgaacagctccaacacgaccagcttcccaagtttttgcgcccccttctcttccttattcagcaaaatcagctcttccagccagttttgaacatcctctttcgttccaattgttccgatggtaaatttattctccgccggaatttcctcaatttgaatgcaatttgctgcatttgtaccaccaaattgattcggtgaacgtttgaaagtttgttgcattaatggctgttggtttccacccgttctcggtggaaaattctgacggttttgccaactgtcacggttttcatttgctgtccttgaatttgtctgcattcctgcattaaaagggtctcgattacgcgcatcgcgtgaaaa

SEQ ID NO: 350 - DNA, 1132 bp, Heterodera glycines
tattcttctctccttcaatttcattcaaatttatttattatatgttttttaaattcctcgaataataattaggcacttccttctcggccccgctgttctcttttgctgaagagggttggctgttctcggcactttacctcggcactctgttgggcaccattccaattggccatttgtgcgctttggtcggctttcgtcgcacattcactgcctacggtattctgaacggattgggtacggtggcggtgccattggcggccgaatttctcacaaagccattcacttttatggccatatttggtgcccgattcttccaagtaaaaattcattaatttaatttgatttaattcctgaatttgttttttagggattttacctttcgatgtcattggtggcaatgggtgaataattttgattgctaattaattgaatgtgaaattagcggaattatagtgatgctggagagtttcggtctcgagaaaagtctcgggtttttagttggtctcggtctcgggaggtcttgagcatcactagtaattaatggggacacatttcgcaattgcttaagcaataaaaaagtgtcccttttcttttgtttatttaaaaattttcatttaagaaacaattagcaaaaattggagcacactgaaggagatgactttgttcatgagcattctctccattaattttcaggtctctttaatatatttttttaattaaaatgccaaaattttcatttttggggtaaataaaatttgaatttaatttcactaattttaaaaaatgcttacaattagttggccttttagcttggccgtatcatcacaatgcctttgtccggctttttgtgcgactcttcgtttggttggccctccgtttattatttccttggcattccgacacttttcgcattttcacttttctgtttgttttatcgggaaacgccgtcacagcacaggtgcgacacaaccatcagaagcggcattaattaattaatttggctcgagactctcgaaccaattgtcttaaattcgaaatcacatgaaatgggaaatattcgcttttttatgccaaaaggcatttaaagtgaattcagattggcttgtgccgccgaaatcgatcgccattcaat

SEQ ID NO: 351 - DNA, 4717 bp, Heterodera glycines
ttggcctgtcctcgtaaaatccgaatcaacatatgggaattcggaagtgtctgaataaatttgctaatccggctttatccattggtatctgctggtcttggtatttttaaaaaacaacccattaattgcctacataattatttcttaattacctaattgatttcgcagtcaattagcattgacatgcatcagacggggcttgtggtggcactccatttgtcatctccacctttttggccattgtcgtgggccgagtgtgcgaccgtctcatcacaaaagcggcgttggttctgctcacatgcgtgtcacaggcaagaatcactgattgaactgttcatggcatttttgcggtcgctgatcacgaatcaccgacatttatttcgactaattccgagcccatgattcaaaatccgaacaaaaatgttgaattttttaattttgtctttttgctcaaatttgggttcgggattcagaattcggtaatcaaaattggttttgcctcgtgttgtcaccgacgccgaaaatatgttttcaacgaatagaaatcgtattaaaaatgttttcaaatcagggtcccctatggttttaataattttcaaatttaattattttatttcttgcgccgatataaagtgacaacatgcctcattaattatcaatttaatgtttaacctaattattcaccatatttgtacaatttaattcctccaatagaacaccccgctctctcaattagtgataaagaaagcttgcaaaattaattcggctttttaaaaatatttgaatttggcaccttttcagtacggcatggcaattggctacacacttttagcattcataacgccctccaacccgttgctaattcaaagtatgtacgtcctcatcatgtctttggttggcttgtgcaccattggccttgtaaagcaagcgcgatgggtgagtaattattactaattaattaattagctaattaaggattaattcaattcaaattaaaattcaattgtctatttttttaaattcaggtagacgctgagaatgctcaagcaatcaactcaacaaacacagcaattatttatatcatagtgatgtaagttcaaaaaataatttgtataacaaaaaatttattaaaaaataaagtaattattatttaataaacgaaaaaataaaaataataaaggaaattatggacttataatattatttcaaaaaacattttaattttattgaatattaataaaaatgttacaaatgaaatataaaaaacttgatgattggtcaaattttacaaaaataccgattttcgcaaaaattttattaatatttacagctagaatcaagttaattttttaagcatgatgctccatattcaaaatatacgtgccataagttcatatacctatgaacaatggtcttaatatttcaaaattttaatctattttaatgttcatttaaattaattaatttttaaatatcaaagtgtttttaaaaatctgattaaggttgatccctgaattcgtcactttgattattccgaaccctgatgatcaaaacgggagaggggtaaatttaaatttaatttaattaatattatttaattattaaacattttaagtggatattgttttcctttttattgctgttttgcaaacattgagcgcagcaatttcgcacatttcgattatgaggaagaaataaaaaaagaccaaaaacgataaatatgtttgtctaattcaccgcaattatgtacataattaattaatttaaatatttaataaattataaatgattataaatagggatgatatttttaggcaaatgcctattttttcctgagctccccgtggcctgaaacgcacgaaaaaatatgtttttttgggctgttgttaagctacttttcgagttattaacgcctattttctagtcttttatcccctatactaatttggtgctgtatgtacgtaagtttttaaaattgttaacaccaaagttcaaaaaccaataatactaatggtatatgattaactttaaaagtgccggatcgatggcagttgtgccaactctcaaaaattagattggtttaaaaatgcccgtcattgtgccaaaatggttgtcgtgtgtcgagagtggaatcagttcgggattcagaacagatttacgggaattagcagcaatccttgtgagctgcttgtgagttggcacacaccaaaatgccaatttggcactttctcgaggggataatcaattcatcccttacaagtggtaaaagaatgtcttaataatggcaccagtgagaccaggacgggaaaattttttaattcaaattaccaattttctttggaaaatccacgcttattctttggcctcgttgaacttttttttagtcttttgcagcttttcctttttgttgcttttcatttcaaaatttatgttttgtgttttcaattttctgttgctgatgcaattttcttggaccaaaggccacaaaatgaaagtgcccatttttgtttttgcattttgcaaccaaagattatgaaatattatgtgattttattgttgttatcctcggctgttcttatgtttctttatctttgaaaattggtggtgctttgttttgtacccccgggggtcaaatcgacggacgaacgaacgacggaccgaactgaacacatgacagatcaacgaccttcccgttcctgctgctaatgatgcaaccaactgaacaaattgcatttttccgtgatcagaaaatggatcagtgaatcagaacttcttgtaaaatgcgacatacggtagttttgaggatttgaattcatatgccagcagatatggaaacaaatttaacttttttagggatttgggtaaaaattttaaaatttaattaatcttttaacctttaaaaaagtgaattgtaaaaaaattcagaaaaaaaggatttaaattcgatttaatttgcaattttgccatttttcttcagtttttcattggtttttcttccctatttttggccacatttaatttcaatcatcaatatgacaagacatcatttaagttgccagcttaagaaattctctatcatttatgctttccatcaatttttggatgctttcgtttgcatattctttccttttcgcaaattatttttatttttcttggtttcttttttttctccttttttttgtttctgatttcagaaagttgcctaaataatctttaaaagattttttttaattgttgctaaagccattgctagtagtaaaaaaaattcggtaacagtatgaatggtaccccctctcttttaaaaaaattttaactttcgtaaagttgttttattggttttcgggccggatacggttctgacatccattttgacctaatttgaaccctgaacccggacttgaacaaaattttcaaaaatctccaaataggcacttaaaaaggcagaacaaaatcgcaaaacaggcattaaaaggcacaaaaacaagcaaatcaaattttttgttcactctttttaggtagcaaaacacataaaacttattatgttaataaatttaaatattataaattatatttttcgtaaggataatttttaaatttttatcaagaaaataaaaataaatttggtgcatcaatttttgggatttttttttcaatgcttagggaggggtgtattttccaaattataatttcttaggggtgtattttccaaattataatttcttaggggtgtattttccaaattataatttcttaggggtgtattttccaaattataatttcttaggggtgtattttccaaattataatttcttaggggtgtattttccaaattataatttcttaggggtgtatttttcgtttttattgtatttttgttaaggatttttccgaaaatccaaaaataggggccaagaataggataaaagtcattgtagacaccccaaacaaagcggaaaaggcgtttttcagctgatagttacgagaatttacaaaaattataaaaaatgataaataagcaaaggaattcaggggtttactaaaagcaatgagttctgagtaggattttccatgttgccatatttacactatattttaatcacctgtgaaattttaacatttgatttatttttattcatttttattacggtattcattttgtattttttatttgatcatttttatttgtttgtttatggcaccatataagagcactaatgtgcctttggtttgctcgataaaattaaattaaattaaaaatatttatgaatcttagttaagaataaactataaatttttttaacaattttctttcgggtgtcatgacaatttgtacacagacaactcgtgcaatggcttaggagctttaggctaggcctaggcttaggcttgcttgggccggagagacttagaatttgaatctcgaattgactccgacatgtgattgagaagaaaaaataaatttattacaaaacaaggctcggttgaaatttaaaactattaagaatgaatgagagtatttttaaaatctcgtaaatggtaaaagccgaggctgatgctcgagagtctcggtcttaactcgagaaaagtctcggttttttggtctaggtctctctctcggacttttcagtctcggtctcgattttcagaccaaaaccgagattttttacatccctaatgattatcttttgataaacttaattcttcacatttttggtat

SEQ ID NO: 352 - DNA, 7215 bp, Heterodera glycines
tccaatccagcaatttcctgtagaaaagatgtggtttttcccatctaaattcaaaaatcgagaggaaattgacaaaaaacccacgggttcttgaacatcctcttgaggtccaccttttctttgcctgaaaatggcaaggatataaaattaagttcatatatgtaaatttgccataaaaatctgtcttattattaagttaaaagcctatcgttaacattggaaaaaaacgtggagaatttgatttgttccaacactcacagtaagggcatgtctgcaatttgcccaccacacaccatccgcggatgaatgtgccaaatcacgtccaagcacaccgtaataaaggcaataaaacaacaaatgcacgccaaaatccaagctcagattactgctaattccttaaaaagccttttttgaatttttagaaaatttaattttaccgaacaccgaatttattccaatgacagtaaagacgagtgaaaagtaaccgacaataccaaaaatgtaactgagtttatgcatgaacaaaaagtatttgtagacgagcctaaaagggaaatggacgaatttcccttttttgcgtaaaacccactgacaacctgggagttgatccggaaattgccggctgattgaccctccgccaaacgtaaaatattgaagaagtgaacacagtccaggaaagaatgaatcaccaccagccatttttaagtgacaccataaaagggattagccaaagaccgaccaaagtggcgaactgaaccaaaatcatatttattgttagacaaagccctttcagcgaaaccaccacccgttttttacccggtatgagcgaaaatgtcttctcttccacaacatcaagattatttgtgccacaaccattgagacaatgaaaatgatgaacatttccgcatgcaatcgcatcgtggcctcagaatggtgataagacagaaaagtgaatgacgcaacataaaattaattaaaagtacaatgtcaaactagttttaagttatttgatagcttatattttacaattaaggtttacaaaaaaaaagagagaattttcgaggacaataaaacaaatgattttatgaattgaatctaaaaagaacaaaatcccatcttgaccacccctacacacaaagtcagcacatttatttattctcacacgcatacacacctgaatggttacgagttgcatttgcatagaaatctgacaagcttccccgtcgtcgatgaacaattcaaggtcacggtgctttaaattttttcaggggtattttgtgaaatctcttccattttcttaatgacacttgttggcggcgcctcttgattttggtgacattgtccgtgacgacgtccgtttcgtcgacgatttccgcttgtaaaatctcctcgacgatgtcctcaagcgtcacaagcccgaccagttcgtatttgctttctttgtcctccgtcgaaggggcaacgacacggtccaccagcgccatgtgataatctggaaattaaagacaagcgaatatttatcgtttttatcagtaagagttaatacttaccgccttttttaaactcctcgagcattgttcgtagcggggtattttccggtacatgacgcactggatgctggtagtactcacacacagtcttaacctgaattatttttttagataaaaatggaaaatcaagatattagcccacaaataaattggcgtcgggatccaacagaatcaagtccttgacaaaaagcagagagaccacattgccgcgcgagccgtcgaatatcggtatgcgtgtgtagcccgagcgcacaatttcggcgatgttttttgcgttgagaattgtatcctgcggctgcatgaagacgtcctaaaaacaaataaagtacacaaaagttacaacaaaattctcacctttattcccgtcatgacgtccttcacaattttgtcgttcatctcgaaggcgccaatcgcaatcttcagctcctccgcttgcgccgcattcttcatgttcagtttgatgagctcgatgaggcgcttgcgatcatatgactcgacttgttcacccaacagcttgtccaaaatgaggctgatcgggtaggatacctgagagggcgtgaacaaggaaattgcttacaaacagtataccaaaaaaaacatactataaaagtgagcatcatgaagaaccgagtgacccatatggtacaggcacccacagccaagcccttcttcacacacagcgcctgcgggaagatttcgccgaaaacaacaatgccggtcgatgaaacgatcaatgcaacggtgccactggtcaaatcgtcgaagagaattgagatggcagagttgacgcaaacatttccgatgagcaacgagcacagcaaccggttgccggacttgcgcactggcaggatggtctgagcatacttccgctcttttcgtgaacctaaacagaaaggaacatcatttctcgaaaaaaaacaacgaccaagaactatcaacaagcagataaacaataaatccatggtattccacaaaaattttctcaccaacccgaatttttgatgagagtcaactcttgtggagtaagtgacatcagcccaaggttgagacccgagaagagaccagaaaggacgagcagcactgcaatgatgacaatttgaagaggcattgagaagtagtatttgcgaggcggtatattcgtagacacccaacagtgagcttcatccgtctgcaagcaaaaggagcgatatgatagttatttaaaaaccaaccaaccaaatgaatgggaagctcgtgtgaatagtcaggatggggcttttgtcgcacgcacaatttgtataatgaattgcttaaagttttatgggtttaacaaattcaatcatggcgtcacaaaaccttgcaaagtgatagatgaccacgacacgtctttccgattggataacaaattcatttcgatcgatgagcaccgccgcgtcggagcaattgtcggtggatgtgaagccgacaaggtcaatttcgtccaggtggatgccaaacagcacaacgcgcacatccatgtccggctcaacgatgctgacgcccttatccctgcgaaactttttgttagatcttacatcgacattaatgacatacgcatatccgacgaatccgcccgcgccctgctcaggttcaatgcgaatgttggacacctgcgcttttttgtccgttgttatgaatgaagaggtctgaattggagaaaatgaagttacagattgctgaacatccgccaaatttgctaaaccttggccggttgaaacagaaagaccataattacgccaatactaaatagcccattttgaattcgcatggagtgtattaaaagctgaaaaagcatttatttcacagtggtttaaacaatgtgtacaaatggaataagatggtgatcaaaaaaatgttcaaaaacaagtttcctcgagttttcatgctcgctgatcatgaatctgacacccatctcgactaatttcgaaacgcgaccccgacaaaaattcttaatattcaaatttaaggacttagcacttatttctcgaaaacggctttacatgaaaaaacagaaaaccatcatccctgcaacaaattgtaattttgttctagtttgggtccggggttgggatttggtcgaaatgaatgttggattcgtggtcagcgactttgaaaatccaggaaacatgtctttatgaaaatggggtgggaagttggaaaaaaatgtggattgtggctagacaatgcagaaatggcacattatatagaccaatttgagtggtggtggaaaaggcggacaaaccgacggaaatgcaaaaataacaaccgcacagccacatacatataaaacccacccattttcttctcacatacttatttgaaaatttagtcccagagacgtatgtacaagaaataagggtcgggatcactttggcgcgggccattttggcgccgcgaactttaaagtgttataacttttttcttatccaaccaaataaaataattttgataccattaaataggcctaagtgttctttattagcctgcaaaatattagaaaaaataaattctgtttgacaaaagatatagcgtgcggcgccaaaatggccagaaaaagtcatttttttgaggttttttggccataacttttttgtgtttcaattaaattttttgaaattttgcaggctattagggactatcaagcgctttaaaatgatatcaagcttatttaatttgaatgagaaataaaaatgttatagcgtttgccaaagttgccggttcccagaaataaataattttgatgattgccatcttttttcgaaaaataaaatttttattcgaggaaagattattttaaggattttttgggtcggaaaatcgaatctgacattaggtaattccaacctgtcgaaccccgaacctggattcaagcaaaaagttcaatattcaaatttctcattgttcgtatgaaaatggtttaaattggattcctactcgagaatgtgtgcctttgcggcaaattgtggccgtaaacaatttttaagatggaagtcggactttttcttgcccaaaagtatgtccaccctcgtcacccaggaaacatgtctttatgactttttaatttggattccaacaaatgtaattcagtggtgacgcaaagttgtccccctccaaaaaatgggtgcagatccatcgacaaagtaccggaataaaatgtgatggtgtgtggcaatcaaatgcaatggagataagaattaactaacacaaatgcataattgatagtgaataaacaacaacaacaacaaaaaatgggtgtgggcggaggacagaatggagtgtgagtggaaggaatgtctgatgatgacggcgtaaaagaaaaatggaacagaaccaaacagcagcagagcaatattttccaaaggtttcaggggaaaaaaacaaagttgaaaattgaaggttagggttaggagagttggttttttgaaatccgatagagaatcatattgcggcaagttgtgtgtccgtaaacaattttgaagatggaagtcggactttttcttgccaaaagtatgtccagccccgtccctcatcaaagtcatcttcaacagcaaaggaagggacagcagctccagcagagacagttatattttgtcgtcgtactttcgggacacgatcgataacactttttcccaccccagaaacacttccgtcgcccaccatcccctgaggggccttttggccaggcaaagtcaattggtgagggccatcccccgaagcaaatgatagaccggcgggggagaaagcaagcagataaacggagcagtcgtcccaaaaactcagagaaagcaattgagaaatgaacggctctccacaagtaaattcagctggggcaaatttggaacaatcccatgacgtcataaagcaacagttcgaccgaattttcgagtcggaaaggctaatccggaaagtatggccacttcgtttagaaaattgttccttaatgatttttttttattttgaaaattccgacaattgagaatcagccgaaggcaaaggtgtagaattgtggtcccgatgggaaaaaatagtaaaattttaaaaagcattttttctggggtagaaaaatacgctgatcacgaatctgaactcagaatttgaaaagtcattgattttgtcaatgactttttatcaagtacttgattttttccaaaaattttaagaaaattaatgggcaataaaaactcatacacagatgttgtagagcttaataagagctttcggttgagctattgaatttatagagaagtcaagtatttaattttctatgattttttaaaatttagttattaatccctaggggtcatatgagttggggtgtgcgttcgagcccgcttggctgcagtttatttttttatgcttattggtgaaaaatcatagacaaaattaaggttcttgcaaaatcagagctcagattcgtgatctgcatatttttacccccaaattcattgggaaaaaattttttacagagattaaaaattaaaaaaatcaagtaatgtacttgataaaaagtctagggttgccaccccgaaccccgacattttaggccatttttcggggttaaccccgaccccgacgcttccaaccccgacgaaccccgactcggggtcggggctaaatatacacccctaagaatggcattttcgtgagagaaaaggcaaaaaaattacaaaaatttgaattttttttaaccattttgccaaatttttataacctaaaaatattgctcaaaatcgaattataatttttgggcaaaatctgttacatatctatccaaattttcaaaaaaaaaaatttcccggcggcgcctatcggcaccgccggacccctttctcctaaaagtctttagaaaaagtgtgttgcgaaaaaaagatgttgaacactaaaaatttatcgggaacaagggtccggcggtgtgaaaattaaagaattaaaatgcaattttttaactgattttcaccaaaaataaccaaatttttcgactttgaggcaaattttttttaagaaaaaataagttttgggggcccggcgccggaggaaaaatttgataaaattattattatgaataataaaagatttttaagaaaaaataataaagttttttgactatatagcataaggcaaaaatcgaaaaaccccgaccccgaccccgatttggtcaaccccgaccccgaccccgaccttgctgaccccgacaaccccgaaccccgacttttccaaccccgacggtcggggttgcaaccctagaaaaaacaatggttgtttatattagagttggtcgggaccggggcgggaattcacagtcttccgaggtcccggtcccggttttggcaaaaattcccggtccctaccaactctagtttatatgttcattgatttcggttaattttttatcgcgggtaaaaccaaggttctcatctgtccttatttgtaagatttgtccttatttggagggagtgacccaattttgttcttatttgttgcttctccgaaaaatctgtaaaaatttctttataaatttgtattggcgtactgtttaagaaaatatttttcgattttggcgtttaattccttgctgtaattttggctaataattttttgtatttattgttttatcgttttctcttttgtttttagatgtagcacctgc

SEQ ID NO: 353 - DNA, 9002 bp, Heterodera glycines
  unsure (1)..(9002): unsure at all n locations
tgtacaagttgtcacgacacccgaaagaaactgttaaattaaaaaaaatttaatagtttattttgaaccaagataaatattttagtttatttgtttcattatttttcaatttttatagttttcgtaaattctcgtaaagctgagttgtcctcagctgactgatcctgtcgcgtccatattaaccggtccatttgaaaccaaaaaacaacgattggcgtatttgaaaataattggagtttaacttttgcttatatgaaatgagaaaccaattttaaatttttaaaaatattttttaacttttgttttgaattttttgtttccttgtaatgtccggttcccggtcccgaatgaaaatccaggtcccggcttttcgactcccggcaattccccacccgattctgctcagaattccgggtctcgtgcaattaattctagttaaataatgaatttgtaaagaaaaagagtaacaattcataattgactgtcaaaaattcataaatttatcatattaaatgataagaatcaactcactctctgaaatcagaaacaaaagtgacgaaatataaaatgaaatgcaaaaaaaattcgagaaaattaaaaataaatttgcaaaaattttcggaaagaaaaaacgaatgcatctctaaattgatgaaatcacatgataattaataacttcttaatctggtgatttaaactgatgtcttgtcatattagtaattgaaattaaatgtggccaaaaatagggaagaaaacccaatgaaaaaataaagaaaagtggcaaaattgcaaattaaatcgaatttaaaaccttttacttgttgccaataatgtttaatttggttcactcttaaaaagttatgacgattttttgtatgagttgggcgttgtccgtttttttataaaaaaaaatcttttttctgattttttttcaattcacttttttaaaggttaaaaaattaattaaattttaacaaattaaccaaatccttaaaaaatatactgtaaatggattattgtcaaatttattccatattgcaggcatatgaattcaaatcctcaaaactaccgtatgtcgcattttacaagaagttctgattcactgatccattttctgatcacggaaaaatgcaatttgttcagttggttgcatcattagcagcaggaacgggaaggtcgttgatctgtcatgtgttcagttcggtccgtcgttcgttcgtccgtcgatttgacccccggggggtacaaaacaaagcaccaccaattttcaaagataaagaaacataagaacagccgaggataacaacaataaaatcacataatatttcataatctttggttgcaaaatgcaaaaacaaaaatgggcactttcattttgtggcctttggtccaagaaaattgcatcagcaacagaaaattgaaaacacaaaacataaattttgaaatgaaaagcaacaaaaaggaaaagctgcaaaagacaaaaaacagtgaggacatggaaaatggcgactttcccaaaaagttaataaatgaatttcaaagatttcccgtcccggcctgctgaacgccactggcgccattgttgttaaacattattttgccaattcttcggtaaagaattgatcaccaccccaccctcgagaaaatgccaatctggcactcactcttggcatatatatgccaactcacaatcggctcgcaaggattgctgctgctaatttacgtaaatccgtactgagtgccaacccgactttactctcggcacatgacaaccctttctggcacaattacgggcattattaaattaagccaattttaaaagttggcataatcgctatccatctggcactttaaaattttatcatatgccattggtattgcttttttggtgcttttgcaaattaattaatggtggagtgatttcttggggacgcccccccctcccagcgccccaattttcgggggtttcccccacgaaattgcatcagcgacaaaaaagtgcttaacactccgtcgttttgccaaaagtcattgggttttgtgtgttctgctggtggtgctgttgtaccagcagaagaggctcaccaatttaatcagcagataggaaatcggtatttaaattaatttgttcgttttaattttacagtttgtgctaattgatgggagagacgtttaattaccccaattcatacattaattagttaatcagtccaaaaagagagaatatcatgtgaattatgtttcagggcatattaatgaaaatgaaaaattaagaataaattataaagccttctctaataccagcgaatttttaaatagcgcggcaaataattgaaaattttttattttcaaatttcttttgccaaaatttgccagaacaaaaatgactgctgcaattattggcattaattgccgccgcaatttccgtggcttacgctttgtgattttggccctgagcacattgtgcttaaccttcggcatgtgcggcagtgttgtgcttcatatgaccgtgatttgcatgagagaagagacaacgataaatggtgccaaaaataaaaaaaaataataattattagtgtattaattaattggctttcgccgcgtccacaaatttctctcattagcaaagagagggcttctgaaatcagaaattttttgaattttacataaaatatttgtttttcggagcaaatatttatacaaattttattttttaatttattgaattaaaatgcctcagtaaaaatttaaaataatcatatattttacaaaaaatataaaaccaaaaattgaatcatcagtaatgaaaatttagaaatactaaaaaaaaggacaaaatgaataccataaatataaaaattttgtaaataaatttttattcttctctccttcaatttcattcaaatttatttattaaatgtttttttttattccttgaataataattaggcacttccttctcggccccgctgttctcttttgctgaagagggttggctgttctcggcactttacctcggcactctgttgggcaccattccaattggccatttgtgcgctttggtcggctttcgtcgcacattcactgcctacggtattctgaacggattgggtacggtggcggtgccattggcggccgaatttctcacaaagccattcacttttatggccatatttggtgcccgattcttccaagtaaaaattcattaatttaatttgatttaattcctgaatttgttttttagggattttacctttcgatgtcattggtggcaatgggtgaataattttgattgctaattaattgaatgtgaaattagcggaattatagtgatgctggagagtctcggtctcgagaaaagtctcgggtttttcgttggtctcgtgtcttgggttttcggtctcagggtcaaatcttggtctcggtatcgggaaattttcggtctcgagcatcactagtaattaatggggacacatttcgcaattgcttaagcaataaaaaagtgtcccttttcttttgtttatttaaaaattttcatttaagaaacaattagcaaaaattggagcacactgaaggagatgactttgttcatgagcattctctccattaattttcaggtctttttaatatatttttttaataaaaatgccaaaattttcatttttggggtaaataaaatttgaatttaattttactaattttaaaaaatgcttacaattagttggccttttagcttggccgtatcatcacaatgcctttgtccggctttttgtgcgactcttcgtttggttggccctccgtttattatttccttggcattccgacacttttcgcattttcacttttctgtttgttttatcgggaaacgccgtcacagcacaggtgcgacacaaccatcagaagcggcattaattaattaatttggctcgagactctcgaaccaattgtcttaaattcgaaatcacatgaaatgggaaatattcgcttttttatgccaaaaggcatttaaaatgaattcagattggcttgtgccgccgaaatcgatcgcattcaatcgggcaaaattgaaacaacccgagggcacagaaaaggattcaaatttgtaatttattacatttaatttttattaaatttaatatttccgtttttcaaagctcgcaaattggcacgtgctctctttgtttggcgttggcattggcattgcgtttggtgcccataccttttcactgtacggaccaatttatttgcacaatgtaagtgtttagcatacattgattactattgtaaaattgaattattttaataatatttttatacgttttttaattcctacctataaaattttggcctgtcctcgtaaaatcccgaatcaacattgggaattcggaagtgtctggataaatttgctaatccggctttatccattggtatctgctggtcttggtatttttaaaaaacaacccattaattgcctacataattatttcttaattacctaattgatttcgcagtcaattggccttgacatgcatcagacggggcttgtggtggcactgccatttgtcatctccacctttttggtcattgccgtgggccgagtgtgcgaccgtctcatcggcacaaaagcggcgttggttctgctcacatgcgtgtcacaggcaagaatcactgattgaactgttcatggcatttttggggtcgctgatcacgaatcaccgacatttatttcgactaattccgagcccatgattcaaaatccgaacaaaaatgttgaattttttaattttgtctttttgctcaaatttgggttcgggattcagaattcggtaatcaaaattggttttgcctcgtgttgtcaccgacgccgaaaatatgttttcaacgaatagaaatcgtattaaaaatgttttcaaatcagggtcccctatggttttaataattttcaaatttaattattttatttcttgcgccgatacaaagtgacaacatgcctcattaattatcaatttaatgtttaacctaattattcaccatatttgtacaatttaattcctccaatagaacaccccgctctctcaattagtgataaagaaagcttgcaaaattaattcggctttttaaaaatatttgaatttggcatcttttcagtacggcatggcaattggctacacacttttagcattcataacgccctccaacccgttgctaattcaaagtatgtacgtcctcatcatgtctttggttggcttgtgcaccattggccttgtaaagcaagcgcgatgggtgagtaattattactaattaattaattagctaattaaggattaattcaattaaaattaaaattcaattgtctatttttttaaaattcaggtagacgctgagaatgctcaagcaatcaactcaacaaacacagcaattatttatatcatagtgatgtaagttaaaaaaataatttgtataacaaaaaatttattaaaaaataaagtaattattatttaataaacgaaaaaataaaaataataaaggaaattatggacttaatattatttcaaaaaacattttaattttattgaatattaataaaaatgttacaaatgaaataaataaattaaaataatgataaaaaatttatgccgattggtcagagttctcaagtgtacgaacttttcaatttctcctgaattggggatagtcaatctaagaaaacaaaaataccctgaattttcaatttttaaaaaccttgatgattggtcaaatttttcaaaaataccgattttcgcaaaaattttattaagatttacagctagaatcaagttaattttttaagcatgatgctccatattcaaaatatacgtgccataagttcatatacctatgaacaatggtcttaatatttcaaaattttaatctattttaatgttcatttaaattaattaatttttaaatatcaaagtgtttttaaaaatctgattaaggttgatccctgaattcgtcactttgattattccgaaccctgatgatcaaaacgggagaggggtaaatttaaatttaatttaattaatattatttaattattaaacattttaagtggatattgttttcctttttattgctgttttgcaaacattgagcgcagcaatttcgcacatttcgattatgaggaagaaataaaaaaagaccaaaaacgataaatatgtttgtctaattcaccgcaattatgtacataattaattaatttaaataaatttttaataaattataaatgattataaatagggatgatatttttaggcaaatgcctattttttcctgagctccccgtggcctgaaacgcacgaaaaaatatgtttttttgggctgttgttaagctacttttcgagttattaacgcctatttctagtcttttatcccctatactaatttggtgctgtatgtacgtaagtttttaaaattgttaacaccaaagttcaaaaaccaataatactaatggtatatgattaactttaaaagtgccggatcgatggcagttgtgccaactctcaanaaattagattggtttaaaaatgcccgtcattgtgccaaaatggttgtcgtgtgtcgagagtggaatcagttcgggattcagaacagatttacgggaattagcagcaatccttgtgagctgcttgtgagttggcacacaccaaaatgccaatttggcactttctcgaggggataatcaattcatcccttacaagtggtaaaagaatgtcttaataatggcaccagtgagaccaggacgggaaaattttttaattcaaattaccaatttttttatgttttgtgttttcaattttctgttgctgatgcaattttcttggaccaaaggccacaaaatgaaagtgcccgtttttgtttttgcattttgcaaccaaagattatgaaatattatgtgattttattgttgttatcctcggctgttcttatgtttctttatctttgaaaattggtggtgctttgttttgtacccccccgggggtcaaatcgacggatgaacacatgacagatcaacgaccttcccgttcctgctgttaatgatgcaaccaactgaacaaattgcattttccgtgatcggaaaattgatcagtgaatcagaacttattgtaaaatgcgacatacggtagttttgaggatttgaattcatatgccagcagatatggaaacaaatttaacttttttagggatttgggtaaaaattttaaaatttaattaattttttaacctttaaaaaagtgaattgtaaaaaaattcagaaaaaaaggatttaaattcgatttaatttgcaattttgccatttttcttcagtttttcattggtttttcttccctatttttggccacatttaatttcaatcatcaatatgacaagacatcaattaagttgccagcttaagaaattctctatcatttatgctttccatcaatttttggatgctttcgtttgcatattctttccttttcgcaaattatttttatttttcttggtttcttttttttctccttttttttgtttctgatttcagaaagttgcctaaataatctttaaaagattttttttaattgttgctaaagccattgctagtagtaaaaaaaattcggtaacagtatgaatggtaccccctctctttttaaaaaattttaactttcgtaaagttgttttattggttttcgggccggatacggttctgacatccattttgacctaatttgaaccctgaacccggacttgaacaaaattttcaaaaatctccaaataggcacttaaaaaggcagaacaaaatcgcaaaacaggcattaaaaggcacaaaaacaagcaaatcaaattttttgttcactctttttaggtagcaaaacacataaaacttattatgttaataaatttaaatattataaattatatttttcgtaaggataatttttaaatttttatcaagaaaataaaaataaatttggtgcatcaatttttgggattttttttttcaatgcttagggaggggtgtattttccaaattataatttcttaggggtgtattttccaaattataatttcttaggggtgtattttccaaattataatttcttaggggtgtattttccaaattataatttcttaggggtgtattttccaaattataatttcttaggggtgtattttccaaattataatttcttaggggtgtattttccaaattataatttcttaggggtgtattttccaaattataatttcttaggggtgtatttttcgtttttattgtatttttgttaaggatttttccgaaaatccaaaaataggggccaagaataggataaaagtcattgtagacaccccaaacaaagcggaaaaggcgtttttcagctgatagttacgagaatttacaaaaattataaaaaatgataaataaacaaattaaataaactaaaaatatttatgaatcttagttaagaataaactataaattttctttcgggtgtcatgacaatttgtacacagacacactttttcactaaaaagggacccaattttggccgttttacggaaaatttgagtgctatttgttacgaaaattgtctataaaatttttacattttcgtttggggggggggggggggggaattcgaaaaaattttccattatttgctggaaaatttttaaaaattttcttttgatttcgggggggaagataaaaaaaaatttaattcataaattttttttttatcatactttaagaaaggcgggggcaggggataaacgagctgatccaagctacgagtgataagaaacagagaataaaccaaaggtatgaaacatttttttttcagggaccataattatttattaaattagctgaaaacaaaatttactttcttccgaatttattttttcccgcgtttacgagagaaaattgtaagaacgggtaatgtaaaaaagcatatggcaaaataaaaatcattacaggg

SEQ ID NO: 354 - DNA, 4668 bp, Heterodera glycines
  unsure (1)..(4668): unsure at all n locations
ctttttaataaatttatggaaaaaccaggggaacaattccttaaattcatgaaccaaataaataatttaaaattattttttagaaaaattacccttgtgttgggtactaaaatttgtattccgaaatagaggctttttaaataaatatatggaaaacccagaggaacaattccataaattcatgaaccaaataaataatttaaaattattctttagaaaaattacccttgtgttgggtacttaaatttgtattccgaaatagaggctttttaaataaatatatggaaaaaccaggggaacaattccataaattcatgaaccaaataaataatttaaaattattttttagaaaaattacccttgtgttgggtactaaaatttgtattccgaaatagaggctttttaaataaatttatggaaaaaccaggggaacaattccataaattcatgaaccaaataaataatttaaaattatttttttagaaaaattacccttgtgttgggtactaaaatttgtattccgaaatagaggctttttaaataaatatatggaaaacccagaggaacaattccataaattcatgaaccaaataaataatttaaaattattttttagaaaaattacccttgtgttgggtactaaaatttgtattccgaaatagaggctttttaaataaatatatggaaaaaccaggggaacaattccataaattcatgaaccaaataaataatttaaaattattttttagaaaaattacccttgtgttgggtactaaaatttgtattccgaaatagaggctttttaaataaatatatggaaaaaccaggggaacaattccataaattcatgaaccaaataaataatttaaaattattttttagaaaaattacccttgtgttgggtactaaaatttgtattccgaaatagaggctttttaaataaatatatggaaaaaccaggggaacaattccataaattcatgaaccaaataaataatttaaaattattttttagaaaaattacccttgtgtttgtcgcgactcacgtcacgagaaataaaatggaaatgataaattttataagcatgatgcaatttcattaaaaatggggaaaaccttaatttaattggaaatgttccccctcttcgtcgttctattcaaaaaatatttgtttgtttacattcaattcttattcatttctcacacaaaaatgtattaatcagcgaatgacaccctatttaagtcgtggaattgttattgaaatgggttcagtcggaataaaacatcattcccctgcttgtctactgtttgtcccaatttctattttgccaaaatttttgccgggccgaatttgcctctgtttggtcccgacaagtggtgcaacggccgggaacctctgcactgatgaatgcttgtgatcagcgggtggcagacgctggtacaagggcgacaggacggagatgagtcagtctggtcaactgatcgctgtccaccgccgcggagcggatcttcacaagcaacaagggatcagcctggtcaactgatcacctcacagattttacgattaaccaaaatcaaccgcccgcctttctcagcacagacaacccggaatgaggcataagaaataaaacaacaacatacaggcagacttgcagcaactgaaccccccgacaactttgctgtggggagtgtcgcgactcacgtcacgagaaataaaatggaaatgataaattttataagcatgatgcaatttcattaaaaatggggaaaaccttaatttaattggaaatgttccccctcttcgtcgttctattcaaaaaatatttgtttgtttacattcaattcttattcatttctcacacaaaaatgtattaatcagcgaatgacaccctatttaagtcgtggaattgttattgaaatgggttcagtcggaataaaacatcattcccctgcttgtctactgtttgtcccaatttctattttgccaaaatttttgccgggccgaatttgcctctgtttggtcccgacagtgttgggtactaaaatttgtattccgaaatagaggctttttaaataaatatatggaaaaaccaggggaacaattccataaattcatgaaccaaataaataatttaaaattattttttagaaaaattacccttgtgttgggtactaaaatttgtattccgaaatagaggctttttaaataaatatatggaaaaaccaggggaacaattccataaattcatgaaccaaataaataatttaaaattattttttagaaaaattacccttgtgttgggtactaaaatttgtattccgaaatagaggctttttaaataaatatatggaaaaaccaggggaacaattccataaattcatgaaccaaataaataatttaaaattattttttagaaaaattacccttgtgttgggtactaaaatttgtattccgaaatagaggctttttaaataaatatatggaaaaaccaggggaacaattccataaattcatgaaccaaataaataatttaaaattattttttagaaaaattacccttgtgttgggtactaaaatttgtattccgaaatagaggctttttaaataaatatatggaaaaaccaggggaacaattccataaattcatgaaccaaataaataatttaaaattattttttagaaaaattacccttgtgttgggtactaaaatttgtattccgaaatagaggctttttaaataaatatatggaaaaaccaggggaacaattccataaattcatgaaccaaataaataatttaaaattattttttagaaaaattacccttgtgttgggtactaaaatttgtattccgaaatagaggctttttaaataaatatatggaaaaaccaggggaacaattccataaattcatgaaccaaataaataatttaaaattattttttagaaaaattacccttgtgttgggtactaaaatttgtattccgaaatagaggctttttaaataaatatatggaactagcgggtgtgtgcttacatgtttcttgggtgcttaaagcgcttcgcgctttgggagcttcgctacctaggccttgtgttagggtctttgcgtcagccgacatgcacttggtttcaccttgacacactgcatttttcaatgcaatggaaaccggaagtgccctaactcgcacgtcattggcccacctgcctccttcagtccagctggcagcacttttttgaatatgtgtccgttttaagtgattagaagaggtacaacagtgattagaagaggtacaacagtgatagaagaggtgcaaaagtgattagaagaggtgcaaaagtgattaaaagaggtacaaacagtgattagaagaggtacaaaagtgattagaagaggtacaacagtgattagatgagtccaacagtgatcagaagaggtacaacagtgattagatgagtccaacagtgatcagaagaggtacaacagtgaaaaagcgatacaaaagtgattagaagaggtccaacaatgattagaagaggtacaactgataagaagatgttcaacagtgattagaagaggtccaacagtgattagatgagtccaacagtgatcagaagaggtacaacatggtttaaaattaaataaataatgaaaagtttttataaaaatcgaatgcattttaatttaaaattttttttataataaaatactctttttattcattaaatataattttgaaaattaataattgaatatttattttgaaatgaaattcatttttataaattcaaaaaataaataatgaaattaaataaattcaaacaaaaaattaattttaaaaaatttttcacaaaaaaataatttaatttaaattaaaaaattaattaaaaaaaacaaacactcttttaaatgaattaaaaacattaaaaataacacaaaaataaatagaaaaataatttacaccgtccggatccgaacctgcccccccccctcaaaatgatgcctcagaatccccaatcacacagggattctgaggtctgaacgatgtcaaaagtaaaatatgatcacgtattcgtgatcagcgtcataaaatagccctaatgacatgtttttgaaagatttttggtgaaaaaaattttccactcaaaaatcatggtcacacccctttggtcccgaatcccaaaatcacttttatttttataacatctctcaaaaaagtgataaaaatgccaaataaaatttatattatagagaaaaaaattgcggatttttgtagtattttacttttacagaatgacttttcagaagggagttctgaatttttttctgaaaaatctaaaatttccagaatttctggaataacttttttatttttgaagacagaaaatccaaataaataacataaaattctcctgatttttctctatttttaaggctttattcctgtaaaattgatcaacccttcgatttgttatgaattttcaaatattaggccaaaatcccgagggccaaaaaattgccaaaaaataatgaatttttaaaaaattccaaaaattatgaaacttaaaatagacatcatattcgtactcagcaccttattttaccccangaaaaatatttttcacaacgcattttcgtccgaaaaaaaatttccgaaaatttctagg

SEQ ID NO: 355 - DNA, 1316 bp, Heterodera glycines
tctcggcaccaacctggggcaaaaaaaaagttaaaaatcccccggggggggggggggtcacaggaattctatcatccgtctttgaatttcttccaaaatttcaaaagtaatttttttaacaggaagattttgttttcattttattgttaggaaactgttttttccgactttccgtgttcataaaatgctttttgaaaaaggaaatatgaattttttccaaatttttccggggtgaaaaaaagtgtacaaagccccgaaaaccgtggccgaccgacctggaaatgtccaccagccaggccatcagttgcggttcgtacgcctcatgggagagcggaagttcgcgttggaggagtaactgaacacaaaaatttgacaaaaaaatggggttgaatggccaaattttaaagtttggtggcgttttttcggtcatattctcttaaatggaagaaatttttgcattagaggaaggatttttaaaaatacaataaatttcatcctaaaaatgcaattgagacacgaacagagagcggcgacttttgttaacgaaatctgaaaaaggcggcacagcaacagaaattgggcaatcggctcgaaccggttcagcaaaatgaggaacactttttgccccaagcgtctcgtatgttcgcccgtcgcatgggccgaccagcggagcaaagtgccgaaaaccgcattaaaaagtaagggggtgaatgcaaaaatggaatttaatttatgcgggtgtaaaacaaattgcgtgtaatttccatgttgccgagattttatggcgccgccgtacgataaagttcccattttttcaacaacaaaaaaagaagaattgctttcttttgacgaggctttgcttaccattgatccacaggggcaaattttaaacggcaaaaaaattgtgggccgaagaccaagaaagaagtcgccggattccctcctccgaaagctctttttgttggttattggtcggtaaggtttaacaacggtaaagttccgacttattgtgtggcattttgatgccacaaatcacaaccccaaaaaaaattacaatgaacagtcccatttcggtcctgcgctgtgtccgcatcgaaattcgggtggtcaacgcgagcaaatggcgcagcacccgtcgcacatgacactccccgtcgtcgtccgtattccgtcgttgttggaggcatgagtttccttcctcttcccgctggtgttgggacaggagcaaaagtttgtcaagctgttcgcccagggcgggcacacattggacaaaccattcgtcgtgggagaagaccatgggtactttaaaatttttt

SEQ ID NO: 356 - DNA, 6505 bp, Heterodera glycines
atataagaaacaaaaaaaaagaaatttttaactgtgcttttgcaaaaatcaaaaactgacaaaacaaatatgtaagaacgaaaaccaaacatttctttttttcaaattcattttttaacgcaaaataataacaaaacgccacgccaattcaaagcatggcggatacagacactcaactttattaaataggattattcagctcagtccttttgattacacatataaattttacaaattaaaccaacccaaaaaatttcaaaatgaatgtttcttctgcgtgaaagaacaggtttcaaaaatttggctgcatttcgcaaaatgaaacgcggaatttaattaatttatttcatcaaaactacgacgacaattggccaaatccgccgcctaaatgcgtggtcggtcgtaagcagacatcagcagcagcagcgaagcgcgtggtgcattcgattgggacaaaaacggcggagaattattgagaaatgagaaaaataaaggaaaagagctgccgaagcagttaaaggggggggggggacattttaatatgagtgggctgccggcgggggagcccttcggaatcgacgacgacctatggccctttttccgctccctcgtcggccccgaccctttgcaccattcattttagtcaaaaagactgtcagattcttgatcagcgacccagaaagccctttaaatatgttttcacgacttgttagaacaaaaaaatttcttccaaaaaaattatgggggttaaactgcataagagccaaattttcctattttattttctaattcgtaatttttaaaaggacaggtggtataactatgagtaaaacctcaaacccagtgtcattgttagacaaaatgattcataatgccaaatagcgatattttcggggcgctaaatcaaaaaatatgctgatcagcagggaacggatttttaagtgctaaaaatcgcgaaataggtacatatacctaaatagttgctaaaaactgaaaaacgccaaaatagttgctaaaaaagttgataaaaattggaaaacatgtcaataaatatgtgaattttccaaaatttcctcatctttatccttttcggttgcacaattgtaaatcaaacacatttgaagattttcaagcgtaaaaagtttttggtcgtccgccaaatcatggccaggatttttgatttttgaaaaaccgatttttaggggtgcattttttgaaaaaaggggtgtatttttaaaaaaattaacctcgattctagaggtgcattttttttttaaatttcacaagccaaaatagttgttaaaaagtttcataagcgaaaatagttgaaatcaaaattttccgggacgggagacccgatcgggaatcccgtaaaaatcccgcgggattcccgatttcgccgggctctactaaatactaacactttcaaaaatttcatattaattttaaaaaattcttaacagtatcgaatttctcaatgtcgaaatggcccagtgtcgaaaatacaggaaaacatgagtttttgaaatagttcagtgtcgaaatttcaatgtgtcgaaaatgtagtatcgaaattacttagtgtcgaaaatactcagtgtcgaatttacccagtgtctaaataacattgcgcccgcgaaaacgtaccccacgcgaaaacggccacgcgaaaatggccacgcgaaaacggcctgacccgatattttcttggagattcacgcttttttagacgttggacggttcagtcccaaagcatttggccaattcagtcccaggtccgtaactctccagggaattgtttcaaccaaaaaattctttcggcttcgttagttagagaccaagaggaatcgaatgttatattattcaacaagaaaaccggagttgtcttcagtttttccttttcgacttttggttgaattcaggttaggggttcgaagtggggtacttagtcgggtttgggtcccccgtttgggtcgaaatttttttcaatttttttcgtttaaaaattcctgaaaagaaatacccaggagttttcaaggttactgatcgcgaatataacaattattccctattccgaattccgaacccaaactcgaacaaaaaatcgaaattttgaatttttaaaaacatgcttttgtgttagaatttgaacaaaaaaaatagaaaaaaatttcaaaccaaaagggggacacaaacccgacacactatgggtacgccccagtgtccgacaaaatagctcataacgccaaatagcgtaattttttacgtgttaattcaaaagatacactgatcagcctttttgaaggccaattaacattgataaactttattcaaaaattttgatcaaaaatttgggtatttacttccattctcttggttgtttctacatctcgatcgtgaagtgcatttagcagtgtttcgtgtttcaccaacttaacaaccttctctagagtgccgagatgagcaaaacgaccaacttggatttataattttaatgagaaaaattattcattaaaccaaattgttgcacattttgtgcatatgctcaattccctgctcactgatcaacccccaccaaagatgagaacgcgcaaaagggacgacatgagcggcaagacgatgaagttttgggcggctggataacgggcagcgtcaattgttcgaagttgctgccagtggcagtagaactttttggtccaatgttcaagtgaattgaggtccccgggatgaagaattttggcccgggacaggcggtaaatgttgcgcaggtcattcatcgagtcgacaagcaaaaatttcaacggtccaacaggaattagtgccgtgaaagcagcaaaatttgcgtggtcgaagattttgtagaggtccaaattttgtccgacaattggtcactccgagctgcgcaaagcggacaagtgaatgtcgccgtcgatccttggtgcctcatcagtgccggagtgaatttgaggtaggcacagagttgatggtgtcgccataagctcacagcgtgccgtggatgctgacggcacgggttcggcttgttggtcagcgtcggcaggtgttgaagggaatggcacatcggtgtccaccatctccaccgacggcacgtccaattcctgcggcgtcatgggtgtaggtgttgttggcagttgttcggaggtgtcctctaccgattctactgatgtcgacggcccttctttggtttgttgcggcatttctgcatcggggtcgggctggggagaaggtaaaaattggaaaaattagagattttatgaaacaaatggaaaaactcactttccttgacccatcgggcttgcatcgccttggccggccgtttgcgctcgcctttcctctctcttttcccaccgtatttgcaccggtttgctgatgttaaaattcttttttttttgcccattaaattccctaaaatatttatcgcctttaatcaaaaacaattgtacagtttgctttatttttgcaaataaattctaattgatgcgaaaagtaaaatgttgttttttacataattaaaatgaagagatagtacgccaaagtgagagaaattacaaagaaaaaaagaaaggaagagatagtaccactatgggttaactccggtgcgctgtcaaaatcccgctgcgtcgaaatcccgccacagccaaaatgagtcgaaatcccgccaaataaaattagcgaaaagtcgaaaaaaaagtttttcaagactttaagttatcaaaatttatcggaatcgtgtaatcaaataccaaataataaaaatttcaggaaaaaacaagcataacaaaaagagttaaaaaaacatggaaatgaacaattttaagggatatgcacgatcgaatcttcggtgttttcgtagtccttcaattttcctgcgtatccttcgacctgtagaccaagagccgtcattacatcatgaatttcggcatcattgttgtatgtggcgtccgttaaaattcacatgatgactgcgtcttgcagaacgtagcgtttgtgcacgaagttcgagccgatctagcagcgtcaacttgtttgtcgatgcttctgttgacttcagaaataaagtcggaaagggccgggtgatgacaaagacctttctaaaattgtttttttgggggggggggttataagtaaaaaatacagagaaatgaaggtgtgttgcttcgaggccattgttggtcctcgcgagggtaaagccgcatgtgagtgcacgttcaatgaacattttttctccatcctttgccccttcattaattaattaatgctatcgatcggtttcactgatcaatcagagtttatctcctcccattaatttgtgtgtgcgcttttgtttttataatatgaactgactgcaacaataagcccataactttcagagcagagcaaaaagagtgagtcagtcctcttcaccctttcatttttattatattttgtttctttttttctgattaccatacgttttgatctgctgctgctgtgtgagaagatagagtcaggtgaagaagtgacgagagagtgtggggagggaggaaagcggaaaaggccgagatcggatgacgagaatcggagagaatgagcccggagcaggaccggatcctgcgcaggattttgcaggatcccagtccgcaatcctgcatttttggaaaatgcaggatttatcgatttgagtaattttttttgttcgaaataagcattttgtgagattctgagcatgaaaaatcgaagttgattttttttgcaacgcttcttccaaaaaacttggggaattgaggggccggcggtgccgataggcgccaccgtgaaaatttttgtaatttttaatgtgatttgttaacagatttgtccacaaaatggccaaattttgcaattttgagtaaaattgaaaaaaaaataaaaaggatttttagggtccggcggttccgataggcaccgccagaggggggaaaattgagaattttgaccatatttttagcagattttcatttaaaaaattcataattttgtggattttcgaaaaaaattgtaattttctggctaaatttgagtgagatttccgtttgatactctattaaaaaccaaaattcaaattaaataattgccaaacattatgccaatttatcaaaatttaaaagattctgaggattttccccaaaagcctcaaaatttctcaaaaagccacaaaaatcctcattttccaaaaaaatcctcattgacctatcaaaaagccacaaaatgaggataaatcctcagatatggcaaccctgagtactaagcttttctctgcacagagtggcgtacccatagtgccgacaagtacccgaaaagcgacgaaacggatgtcagattcgaattgggttgggttttataattcgtatatgagtgaataaaacatacataatacgggatcaatcacaatgaacaataaatacataatacggatcaatcataaatgatcaacaataacataatacgggatcaattataacttatcacaacaaataacataaatacaggatcattttccaagaaagtttatggttgactcatatactctgatttgtctttgattggcttcttggtgctgccgccttcagaagatggtccttctccttgggcaggcgcgttcgctgtgacctggaaatttgttgggttattgatgctctgccgccttttgaagttgcttcatctacctgggcattcggcgcgttcttggtactgctgccgccttcagatgctggtccttcttcttgtgcgttcgacttgtccgttttgctgccgcctttggaagtcgttcctcctcctttggcaatactcggcgcgttcgttgagacctgggaatttgttaggttattgatgctctgccgccttttgaagttgcttcatctaccatggcattcggcgcgttattggtggtgctgctgccgccttttgatgttgcttctttcttgtcctttggcttgtccgttttgctgtcgcctttggaagtcgttcctcctcctttggcaatactcggcgcgttcgttgagacctgggaatttgttaggttattgatgctctgccgcatttttgaagttgcttcatctaccatggcattcggcgcgttattggtggtgctgctgccgccttttgatgttgcttctttcttgtcctttggcttgtccgttttgctgtcgcctttggaagtcgttcctcctcctttggcaatactcggcgcgttcgttgagacctgggaatttgttaggttattgatgctctgccgccttttgaagttgcttcatctaccatggcattcggcgcgttattggtggtgctgctgccgccttttgatgttgcttctttcttgtcctttggcttgtccgttttgctgtcgcctttggaagtcgttcctcctcctttggcaatactcggcgagttcgttgagacctgggaatttgttaggttattgatctggggtgggcatttttgaagttgcttcatctaccatggcattcgg

SEQ ID NO: 357 - DNA, 4530 bp, Heterodera glycines
gcccataactttcagagcagagcaaaaagagtgtgtctgtcctcttcaccctttcatttttattatattttgtttctgctgctgctgtgtgagaagatagagtcaggtgaagaagtgacgagagagtgtggggagggaggaaagcggaaaaggccgagatcggatgacgagaatcggagagaatgagcccggagcaggaccggatcctgcgcaggattttgcaggatcccagtccgcaatcctgcatttttggaaaatgcaggatttatcgatttgagtaattttttttgttcgaaataagcattttgtgagattctgagcatgaaaaatcgaagttgattttttttgcaacgcttcttccaaaaaacttggggaattgaggggccggcggtgccgataggcgccgccgtgaaaatttttgtaatttttaatgtgatttgttaacagatttgtccacaaaatggccaaattttgcaattttgagtaaaattgaaaaaaaaataaaaaggatttttagggtccggcggttccgataggcaccgccggaggggggaaaattgagaattttgaccatatttttagcagattttcatttaaaaaattcataattttgtggattttcgaaaaaaattgtaattttctggctaaatttgagtgaaattccgtttgatactctattaaaaaccaaaattcaaattaaataattaccaaacattatgccaatttatcaaaatttaaaagattctgaggattttccccaaaagcctcaaaatttctcaaaaagccacaaaaatctcaatcacaatgaacaataaatacataatacggatcaatcataaatgatcaacaataacataatacgggatcaattataacttatcacaacaaataacataaatacaggatcattttccaagaaagtttatggttgcctcatataatctgatttgtctgtgattggcttcttggtgctgccgccttcagaagatggtccttctccttgggcaggcgcgttcgctgtgacctggaaatttgttgggttattgatgctctgccgccttttgaagttgctgcatctacctgggcattcggcgcgttcttggtactgctgccgccttcagatgctggtccttcttcttgtgcgttcgacttgtccgttttgctgccgcctttggaagtcattgctcctctttgagcaggcgcgttcgttgagacctgggaatttgttaggttattgatgctctgccgcatttttgaagttgcttcatctaccatcgcattcggcgcgttattggtggtgctgctgccgccttttgatgttgcttctttcttgtcctttggcttgtccgttttgctgtcgcctttggaagtcgttcctcctcctttggcaatactcggcgcgttcgttgagacctgggaatttgttaggttattgatgctctgccgccttttgaagttgcttcatctaccatggcattcggcgcgttcttggtgctgctgctgccgccttttgaagttccttcttcctgggctttcagcttgtccatttgagcgtttggcgcgttcttggtgttgatgctgccgccttttgaagttccttcttcctgggcctttggcttgtccgttttgctgtcgcctttctgcaaaaagggaaaagggatttttaaattgataaaacgaaagttcttttctgaacacacctttttcacacaaccgccgcagcactggctgaccaaaacaatggccacgagcaaaagcaaaataaggggcaaagggaataagaataacattatctgttgttgttgaatgaggaatggaatggtcgaaactgagaaaatgcattccttttataatgatgacgaccaaaaaagaaacaaaaaatttagcaaaaaaaggagtatgattttcttcttctctatcctccattatataaaagaagcacttttccggttatttgatcatcacacatttactatttatgcaataaaaaagggaatttctacgttaaatttttttgatttggtggaggttttttatgcttataaacgcatattgtagggattttcgagaataaatgcatatttaccatttttgcttttttagagatatgtatttcgggcattttttgtaatttttacaagaaaagcgcttcacaaaaaacccaaaatttttgtaattctctaaaaaactctctttagccattgtttttatgttttgaaagtcaattaagaattttacataattttctgtattttttgagggttcaaagccatttttggtagtttttgaagcatattttcgtccatatttgggcatttttcgggtttttaggcatatctgaggtattttgagtgcatatttggcatttttagtgcatactaatttcatactactcattattttaggtatattcatttttaactgctttgactattgcacggataggacttggcaaacctatttttgcttttgtcagtctcagtcgtgtggtgttcaattaaaccttttttcgtctcgcggtttacaaccatccactttttgcctatacaaatccgatttctttcatttcatttcctttacaatttatattcggttaagtattcagggaatgggtcttttcagttcggagttaggcgccagctcgagttttttggaatgagacattttttcattgtcaacaaaatcctagaatattggcatcattataaaactctacataaactctatcagccttaaaatccacaaagattttcggtaataggcagtttagatggtcacacctttttgttggtttaaaatattgattaaatatattataatttaattaaccgttaacttttgagttaataaaaaaccaaacaaaaaaaataataattatttaatatttcacttgaaataaattaaaatttgaatttttttgaatttttaaagtttgccggttggtcccggtcccggcttctcaggtccggttttggcaaaattcttggagtattattcgccttaatatcatcacaatccacatagaatatgatcttgttgactctgtttggattttttagcgtatttgaattgcttttcatttcaacaatactaaacgccattattttcaatttccgactgctgccatcaaaattattttgctaatccaattttgagacattacgaataaaggcgtgttgggcgttggatggatgtgagggacggtgcgggggacggaggatttatgtaggccttaattctgttgaccacatccacgtggccactcgttgtgaatacctgagtcattttaattttatgtgtcgattattcagctcagtccttttgattacacatataaattttacaaattaaaccaacccaaaaaatttcaaaatgaatgtttcttcttcgtgaaagaacaggtttcaaaaatttggctgcatttcgcaaaatgaaacgcggtacaccaaagaatggttattctatacagctacgaacatagaagtgatttgaaaattttgaattttcgactttttgttcgggtccgggattcgaaattagtcaaaaagactgtcagattcttgatcagcgacccagaaagccctttaaatatgttttcacgacttgttagaacaaaaaaatttcttccaaaaaaattatgggggttaaactgcataagagccaaattttcctattttattttctaattcgtaatttttaaaaggacaggtggtataactatgagtaaaacctcaaacccagtgtcattgttagacaaaatgattcataatgccaaatagcgatatttttggggcgctaaatcaaaaaatatgctgatcagcagggaacagatttttaagtgctgaaaatcgcgaaataggtacatatacctaaatagttgctaaaaactgaaaaaatgtcgacggcccttctttggtttgttgcggcatttctgcatcggggtcgggctggggagaaggtaaaaattggaaaaattagagattttatgaaacaaatggaaaaactcactttccttgacccatcgggcttgcatcgccttggccggccgtttgcgctcgcctttcctctctcttttcccaccgtatttgcaccggtttgctgatgttaaaattctttttttttgcccattaaattccctaaaatatttatcacctttaatcaaaaacaattgtacagtttgctttatttttgcaaataaattctaattgatgcgaaaagtaaaatgttgttttttacataattaaaatgaagagatagtacgccaaagtgagagaaattacaaagaaaaaaagaaaggaagagatagtaccactatgggttaactccggcgcgctgtcaaaatcccgctgcgtcgaaatcccgccacagccaaaatgagtcgaaatcccgccaaataaaaattagcgaaaagtcgaaaaaaaagtttttcaagactttaagttatcaaaatttatcggaatcgtgtaatcaaataccaaataataaaaatttcaggaaaaaacaagcataacaaaaagagttaaaaaaaca

SEQ ID NO: 358 - DNA, 10487 bp, Heterodera glycines
attgtcaaaattatggaaaaaatcagtgaaatggaaaagtagcaaaaacagcagcagaacgataacacgagcaaaggcgaggaattaagggtaaaacaaaactatttttattgattttatatttaagcaattttattttaatacaatttaatgttttattttaaggcacttttaaatttccaacagaatcattgggatgccaattattgtcatgagaaactcgaaatcattggcgacaaaaaactcattgtccattataagcaaaatgatattggtatttttccatattttacttatttatgtatttatctttaaaagattggtgttccgtctttgctaaatatccgattttgctgaataataattggtccgacactttttactacgaaatttcagtcaaaaatatgaaaaggtaagataaataatatttttaattttatataccaaatttaacagagaaatattaaaagtgaatgattattaataaaattgttatattcctttatttatactttttcagtttaattaccttcggattcgctgttaaacagcagaacaaattcgatggaataattcttagccacaagggcacttattcatattataatcgtggcgatatttggattaacggaaaaggaaagggaagaaatggcaaatattcctacggtgttggcgataccgtaggaattggtgtcaatacggccactcgacagatctttttcactaaaaatggacttcgtttgggttggtaaataaataattaatttaagaattttaaatataatttttatttaattaatttttgtatttaaattatcaaaatcccataactttttcacagattcctctgaatttttcgttgctcaatcttttgctgatgattcatttcatccatttgtttctatttggcattatggtggccaagatcaaattgaggcaaattttgggcccaatttcaaattcgatttggcaactctctgaggaagaaatattcaccaaagctgatcaatctgttctttttactgatcaatttgttcgtttaatcttttttttaagagtattcttggaatcagggaatataaatatcggtatgtacatgtgtatgaggtagagaattgatgactttgaaatagggttcggtccggtgggaaaaatattggaaatttcaattgaatagtaaataagttagaatcaaaaattttactcattttaaaaaaaatttcatttcgacgcgtcgtggttattaataaagcctccaaatttcaaattgcggataccgctgcgggattgtaactcacaatttttgcgggaaaggaccacgcgggattattctgttaacaaatttcactcaaaatttcaaattgaccacgcccccatccacaatattccaaaaaagtttttgaaaaaacagcgccacaaaaagagcgattaaaaacaaaaaatttaagagatttcaatttattaaaacaatagaaaaattctcacagaaatttttatttttgtccattaattaaaaaaataagacacttcgaagaaaagttatcaagcgtcaaattgcaccgcactaaaactccccctagtctctgcctcccccgccccattctcatttcaaaatcttttttcaatggaaagtcgtacatgctgtacaaagcaactgttatttcgcaaaataaagcttaacaagcctatgcccaaaaaagcttaagccaaggcctagcctaaagcttaggcctaagcataaatcctaagcctaacctaagcaattgtacgagttgccttatgtacgatttgtcatgaaacgaatattccattcacccacttggaatgctcgagattcgtgaattgaccccgtgaaccgtgaacgtgatccaaaacgtgctgtcgatccaaaaaaaactcagtgattgataaaattaaataaataaatttaattattgtattcacaaaagcatggtgccgtctgattaaccctaatgtgcggcgggacgcaagtcattttcaaatttttcaatttttcacatcacttctcgccaatttgctccatttgtattacacacagtcggagatgcctaaaaattattttttaaattttatattgcccactgtcggattgtccagtcacgtttatttcgagcgaattaaaaaaattaatgtgttttgtcgtactcttctggtgcgaaagtgcttttcggtgcggcaatgtcaatggaaagcaattagggataattcgactccttttgaaaacaattcactgttggttcgactttccaaaattccaaactcagtcaattggtggccaaaaaatagaatccaaaattatatttagcacaaaagaataaaattaatgagaagatgagaagacaaccataaacataaaaacataatggtccaaaactgagaaaagaaaataactaaattaaaagagacaaaatgccacacaatatagcactaatttaaataattatccaaatatcacatcccccccctttaaaatatcaacgtccctgttgagaatgaaaagtcaagagatcaaaataaatcaaaaataggcaattcggcagagtcaaaaaggctttgggtggcggatgagcagagatcactgttgtccacgtcgagagctacgaaactgatcagaaccacgacgtcgccaagacgccgaagcccattccgagcggtcgcgtccacgccattcctgctggtgtccttcacgattagacgtttgaagagatggacgagaaaagctgtgccgacggtggtcgacaagaccaaacccgcggctaatgttgggacggcggcgctcttcagaagtactagcaccaggtcgcacaacttcagaacgcggtcgcgggcggcccaattccttctcaccaggaaatttcccaacttcgtaaatccatgccatcattgtcttcgctccatgttcagtcaagagtcccgactggttcactcgatttcccgcgtttgttcctccatagcgaaacacttccatgaggcttcttccttcttccgtcacagctccgaaccgaatgtgagtgtcgtcgcagagtttggccaagcgtcgaacgagttcgagaaattgagcttttcgtgagtgaatgtacggcggcacggcccagtagatgaaaacgtgaccatagcgctcacaaatggccctcaatcgctcaaagcattcgcaaatcgtttccatcgtctcgttggccagcagtgcatcgcgtccacatacaattagcaatgcttttactttgctggagagaacggcattgtcaaagttgcgcacgagcccagccaagccttcttcttcacttatcagcatttcgacggccgtcatctcggtgaaattcaccaattgcttggcggttgaatcgcccatcacaactcttggcttctcgatcaaacgtcggcgatggatgagttgggctcgaatgacttcaaatgcccacggcgctttcgcaaagaattcttgccatgccaattgttcagtttggctttcttctccgaatggcagttttggcggcgcgatttggagaagctgatagctgctttcctccagagttcgccacaatttccgacacgtgcgaacgcgcatttcgatcacttccatcaaattttctgcggacgggagcatgtccgaaggcaccatgtcgccacgggcaccaataaacagcacaaattcctggccggccgtgccatccatgatcgtttccaccaaacgacgagatgccgttgtcgaaccaaattttttgagcagaaatgcacagaacagtgcttgaagcggcgttgtcacctctttagcgccaattccgattttgcgatttaggacggcatcaaaatcggcaacgaccaactgcgtgcagtgctcatggccttccccagagcaaattgtggtccaaaaacaagttccgtcgccaagacagtactcgtcgcaattggccgcttcttttccgtccgcccctgaaaaattcattgtccctaatgaataaaccacttccttatcagtctcattttcaaaattaatctcgccatttttgatttcttccgagacacaaattaagccaattaaattcttaaatttggcttttccttttggcaaaattgaattatttgggatcccagggggaacacgaatcattctttcgattggcacagaaattggatcagcttttaatttatcagcagggaccactttagctgaacttccggtcatttcaatgatttggtaaggcccaaaatggttccaagctaattttcggtgtgaggcttgtgctttcgttgaatggacgacaatcataactctgtcccccggcttaaatttttcgcgcgtcacgtttgggcgggaattaaattccaatttgcttttttcgcgtgcaatttcagcgtttttgcgtgcatgtcccatgatttccatcagattttcattaaaagcttggagataagtttcctggtccacagtataacgtgggtcctcttcaaatttgatgttctcatccgtcggaaaattcacaactcttccaaacattaaagagtagggagaaaaacccgttgttactgatggtgtaacatttattgcaaaaatgacgaatgggagtttcaaatcccaatcccaagatgacggagtcgtccttttaagcaatttcaaaatagtctgattcattctttcaacaaggccattggattgagggtcgtagcctgaggttgtgctggtccctgttttcagaattttggcgattccctccaatgtcgaattaacgaactctttccctctgtcagaatgaattctttttggtgccccataaataagaatgaaattttcaacaaatgcccgtgctattgtttcagccgatttatccgggattggctctgccactgtccattttgaaaaatggtcaacgcaaactaatatatatcgattttttgcgcgacttcgaccgatattaagcacatccaaacacactaattctaatggttcatttgttctaaccatttggattcccggttgattggcgcgtggttctcgtgtgtaggcgcaaatacgacagtccagagctacttttgagcaatctgctcgcatgtttggccaaaagaaatgttcagacatttgtaaaaataattttttggcgctgaaatggcctgcacacattccagcgtgtctttgatcaatcaacttttttcgaaattcctctggcacgaataaacgtaactttccagttttttcgtcgcagtaaaaaagcttattttttatgaaggtgaaaaatgaagcttgggccaaaatttgttgtactttcctcgggtcttcggggagaattcggtgttccaaaaattcaattaattggccaaattcgctttccataattttctctttccactccatttcgtcggcacaaatttcattatttccattttctgtctcattttcgattactgtaactaatgctgattttagtaaagcaacattttctaattcctcttctattgataaactttcgtttctcgggaaatttcttgacaaaacatcagcgaccacgttactttttcctggattgtactccacttgaagaatgaatcgagaacgaagttccattatccatttgtcgacgcgactgttccccgtttccttatttgttttaaacatgggaataagcgctttatggtcagttaacacttttgttggaatcatggtaataaattgtgcgaatttattaactccaaaacgaactgctaatgcttctaattcagttggagaataccgactctcagccgaattgcattggcgtgacgcaaaataaatcggacgaattctttggttttcatccggctgactcaaaatcgccgaaattcccactttactcgcatccgtcatgatgataaacattctttccggaattttttgcgccgcgttaaaatccgggaaatacaaaacgacattttctgtaatcttctctttcaaaattttaaatgcttccaactctttttctccaaaacagaacttggtgtcttttttcagcagacgaaacaaaggtgcggccagctttccaaacgaatgtatgaactttcgataatatgtcataaaaccgaggaaggaatgcaattccttttgcgtttttggtaccgcatattcaaaaatcggccggatcttgtccatatcttttttaatgccttgccgagttaaaatgtgtcccagaaactgaatttcttccgcaacaaagtgacactttgtgatttttaatttcaaaccagctttttgtattctttcgaaaacaattttaaggtgttccaaatgttgttcgaagttttcacttgccaccaaaatgtcgtcgacgtaaacaaagacaaaatcgttcaaaacaccttcaaaaagtcgattcatgaacctttgaaaggttgccactgcatttgtcattccgaatggcataaccaaatactcaaataatccaaattcagtcgtaaacgccgatttttcgatggaatccgggtgcatccgaatctgccaatagccactcataaagtccatggtgctaaagacttttttgttgcccaacatcattaaagtgttgtcaatgttcggaagtggaaatgaatctttaacggtgaccgcatttagtgcgcgataatcggtgcaaaatctgattgttccatcctttttaggaactaaaacgattggacttgcatacggtgaccaagaaggacgaatgattccacgggataaatagtcttgcaacattattgagactttttcccgaaatgcatatggaattgaacgcatgcgcattttcaccggtgagctgtctttagtgtccacataatgtgtaactaaatcagtctgagtcaaatctttgtcatcaatagcaaaaatttgagagtggtcgatgatgagttttcctaactgatcagtttcgttcgcacagttggtgtttgcttgctcacgccaaacagattcaatttgtttaacatgatttgcttcaagctcattcaaaaactgaatggagctaatggtgactgaatgattcaaacaatcccaatttaaggaattttccgcggtgacttgcttctccactataactcctgttccaattttatcattctcgccaagaacgattggaagtgatgaaaaatttatgaccggtatggtcgcttttccaaatttaggcattactaatgtcggttcaattttcagctccgacacttctgatgccccttcaatcaatacatcttgttcgtcaatctcgtcgtttactgccacttcaattatcgtcgatgaacgcggttgaattttcacattgtacactactctaactgcagtttcctttttggtttcagtatctgctgtttcaaatgtcaccaatttttgatgcacttcatcaaaaagctttatccccaactgattcaaagcattggtcccgatgatcaaatcaaaaccaaaatcagacgcagcaacttgaagtgttatcagaacaggacgcattccatctcgcattattggaagtacaatctctccaaccacatcgattgtttttccattaaagtcccttactttcaaatttgaatgaccaaaacaattttcggaaattttgagggactcgtctttgaataggctatgcaaaaattgagccgaaattaacgagacttgagcaccgccatccaccattccttgtgccttctttttacaaacttcaaattccatgaccacaagtttgccaactgctggtggtgaagacaattcttttttacgcccttcactcacactcaaaattttcaatttttccaattcctgattcacattcacacaggccacaaggttgttaacaaccggtgcattctcaagctgtatgcaattagccgattttgtgacttctttttgcgtttgagcattgttgaaaaagtttctctgactattgccaaaatttggttgtgctgggaaccggggggtattgtagtttcggttcggcatttgagagtctccgttggtttctcgaacaaatttattggacggattgttaaaagtttggttgttgcgtctcggttctcgacactcacgtgaaacatgaccaattcggttgcaattatagcaggtaaggacttgtcgctgttgaggataatttgattgtggttcgtgtacttgtccagaaaatgttggaaaagttcggatgttctgtcctctgttacagcttctcaccgcttttcgcgtcgcctcagcacgcgcagccattgtaacgaattgatcgaagtccattccttgactacgagtcaattctaatgacattgcaatatcggggtcgtctagggcccgcagaaaatgtttgatagcataatcattgattagctgttcgtctaggcctgggtaggcacgccttacaacgcttgatactctgtctgcaaactgatcgatcggttctactggctttcgcttaagccccgaaaacaattggtcaaatgccgtaatttctttggcgtcaagctcttccaaaattcttatcatttccgcccgtattttttggtattttggttcccgaagaaccaagcgcgcacttatcttttctgatgcaagcgctgagttaaaggctctctctgcctttccctcaatttttgattgcaaagcacgcaggcgctgttggtcagtccattcatcggtactgatatcaaatttccgaaaaaatgctcgaattttatcagcaccttcccttcccgtgaggtccggaattctgtccaaaatgagtgccatttccagtctgctaacaaccggtaccgcttggtaatgcatagggttaagcgcgttttgattgaacgggttttgagtcccgtactgaatttcgcgaccaaaattttgctgcgggggttgttgcctgggaatgtatgcgtgaggcataggcaatttgtgtctcggttcgttttgttgaatattttctctcaattcatttagccgaatataacctcttgggtgaatggcggacacttggtgttccaacattgaatcagtccggccacggccatccaacggaagtccaagcagttcgttctcgttgtgctggtccaactccacctcctctcccgctaatgaaagagtgtcgttgtctaaacggcgagggagcatgttttggagaacaaaattctgagccggtggtgcaacggggtcccggttctgattattgggacttgaagttcgaattgggacccgaagtgagctaaaagctatttcgcgctgatgattttccagaaaaacggcggccggttgaaaattccgcgacgcttcgaagttctccgccgcataatccgtccaattcgtccgcaatccttgctgatgtgcgacgtttatctcgttgtcctcaatttcgactgcaactccattgtctaacagacgacgcaactcctgtcgtgtcatataccgacgactgttttccattgtgaagagaagagaagaatttgcaagtttctacaagaatgcttgctgctgctttttcttgtacacttctacaagaaagtgcacaaatgttgggcgagacgatggcgattttgtagtttttttgatggtttgttactcttctacaagaatgagtaacaggcgcgtcaattgatgactcctttatttctctgtcgaatttgtggtgtggacaattgctaatagtccccgaattgttgttgcaccaccaaatcaatagaaattaatcgaacaaactctgctcacccttgtccaggagcgccatgtcgtactactctggtgcaaaaatgcttttcggtgcggcaatgtcaatggaaagcaattagggataattcgactccttttgaaaacaattcactgttggttcgactttccaaaattccaaactcagtcaattggtggccaaaaatagaatccaaaattatattttttgcacaaaagaataaaattaatgagaagatgagaagacaaccataaacataaaaacataatggtccaaaactgagaaaagaaaataactaaattaaaagagacaaaatgccacacaatatagcactaatttaaataattatccaaatatcacactatagatggtacccccccttttgacgaaatttttttttattctgaaaagacatgttggcccgtcaacagaaacaaacaaattatgtgttaaaagaatttttattaaagaaatttataacactttgggtgtaaaataagttctaccggtcttccttttggttaaaccataatttttcattatagtaaaaaattataaaagaaaatattttattaaaaaatatttaattatttaaatattcttcaaagaataaagacaattaaattaacttaatgcaaaaatgaaaaaagtcaatcacaattattaataaagaaacaaaaaatttatctatacggaccaactattcgaacgaaagacgagttatttgatcatgagaataaaaaagaaaagaatagaatgttcataataagctaaaaaataacacataaataataacataaattattttggatatttaaatgtttgatattttaa

SEQ ID NO: 359 - DNA, 3930 bp, Heterodera glycines
  unsure (1)..(3930): unsure at all n locations
gggtccgancctaaactaagcataaatcttttttaccaaaacatttcgcaaattttttctgttttttataatttaatttttcaaaaaaatttttgatgggaaaaaattttgcgataaaaagggaaaaatttgctcggacatccattgaaatttgaccttcactcctttcatttttgcaccttgttcagttcaccatcaaacaatttgggcccacttattacaatttggactccaaattggccgccccaacactgatcagcacagcaaatgaaatggcattgtccactacatcaacacacttttggcccaaggcaacgaactgttgctggttgtccgccccgaaaatgaggccaattgtttgctggccaatgaccaagaagaacatggaggaggaggagaatgattaaatgattataaatgcctcaacaaatgtgtcttatttatttatattactttccatattttaagttttatataattatattacttaccatatttcaaatatttgttgtttttggttctattgcagtgtacacgactataattgtatatttaatagctctgttttctattagcctataaaatcacaaaaagtttttttagtttatggaagaattatgaccaaaaaatagttggcagattattttttgctggtcgagaaaactgcaatagaacctcaggtaatactatagatggtacccccccccccccttttgacgaaaattttttttgttctgaaaagtcttggaaacatgtttatgggggttttcagggtcgctgatcacgaatatgaccttcattggaccaatttcgaatcccggacccgaattcgaacaaaaagtctaaaactccaaaattctcactttagttcctaaattgattaaaacatgctaaatttggtcacaaaccattggaatatcaaagaatggtcattctgtacagctacgaacataagtgaattttcaaaattttgagttttcgactttttttcgaattcgggtccgggatcccgaattggttgaaattgatgccatattcgtaatcagcgacctcgaaaaccccccataaacatgtttccaagacttttcagaacaaaaaaaaaatttcttcaaaaagggggggggggggtaccatctatagtattaccgcgaattgcggtcgcgctccagccctgatacaaaacccaccgcacggaggaagtccttttgtgctgctgatttctgttgtcccaaaggacccaggaaacctaaaagattttcatcgttcagtaaaaaagtgttaatgaactgtcagcgcactgaagaaaattgacccagccaaaaagtgagttcctcgcatcgtttgcttattatttatttaactatttcttgatttagaatagtaaaggtatttatatgaacataaattcattgtgggtataaagaagatacctacatatgtgatacgaatacccgaaagaaaatttattttcgaaaaaaataattctaaaagagttaaatatcggaaattacgtcatttagtcatccgtttgctttttgtgttcattgatgcagtcactattctgattgtgaggcgaatcggctaaaaaatatttttttattggaaaattttaaaaaattgtgtggtcgcaagcaaatgccaaaagtatcactttgcgctgcgacaaattcggccgggtaattgctggccaatgtttgtttgaaggaggcgatccgtcggaagattgagtccaagtcggatttagctcggcaaatcttttcccttccaatggcaaagtcttttctcgcccgatccaatcgcttttctgccagcgaagaacacgtcgccagcatttcgttggtcttctcaaaacgttccaacctaaaaactttttctttataaaatatgttatgtatcaatttttagtgacccaaatttggtcaattccaaacccagaaataaatctttccttacgcttttttctggctttgaatgatttcctcgatgttttctccgtccacctgcgatttcaatgaatgtacgaagttttcctctctaagcggtgacccatccgcggaagaagccattgaaatgctttgacttgaagacggaggaagaacagtggaggcagccgcttccttaacgtcattcgttgacatttgctgatttgatgaaaattttgggtttcaatttacttctataatttaaaaaaaattaaaccaaacaaaagaaatgcaataattgcgcaatagaaatgagaacgaatttatgcatatttaaaatctgaattttcgtagtataaaaattgggaggtcacattatcgcggtcaactctctgcggcaacggccacacaatgggtcccagcactatgggtcaagcccagtgttagacaaaattactcataacgccaaatagcgtatttggcgtaaatttttgcgcgttaattcaaaatttacactggtaaatgccttttttgtattgtttattttaatcagacgtaactcacttcattcccaactaaactgaacaaatttggtacctaaaaaaagtttttgaagaggagaatctttttctaagcgaaaactaagcaatttgattttttagaaaaaagttgtgggagtttcaaatcttaattacgttataactcaagtcttaaactgctgatttcaaccaaaatgcggaaagtaatcatttttctattgattctaaatgtccaacagattttgtaccgtatcaacaaaaattaatataatttgcgaatttcatgatttttaatgtgttagagacatgaaaatagtacgccaaaaagagagaaaaaaaatgcaaaacttttattattccataacttttcaatttgacctattttaatattaacttgacctattaaccgatgcagaatttttttctctatcgctatgcaaaatttggtgtggatttaacaagtaggaaaaaagttaaacaggatgaagtgaatgttgctttttacataattaaaatgaagagatagtacgccaaagagagagaaattacaaagaaaaagagaaacgacgagatagtactaggcttttctctgcacagtggagttgacccatagtgtcccagcagtgttagacaaacaaatcatttcgccaaataatataattggcgtaattttttgcccactaattcaaaaaatacactgatcattgcctttttgcattgtttattttgatcagtcataactcgattcatcccaacaaagccgaacaaattgatatctaaaaaaaagtttttgaaaagaatctttttcgaagcaaatttacgaatctccgtttcctgggttccccactttagtcatcctcggtctgatcaaggatcatgcccgggcacaatcctaataaaaatattagagctcggtattttgaaaaaagcctggacctggacctggacctggattccatgttgaacctggacctggatttcctggacaaaaatccaggaaaatccaggtccaggaaaaatccaggctcttcgagacctggatccaggcctggacctggattttttgaaactcatcttaaaaatcaaaaaaaggtttgaaaaaattaattaattgcctagaaacatctaaaaatatctacttaataataataatgtatttttaaattaatttaatctttttttgaaaattaaaaaaaaacatcggtcacttgaaataataaattctaaaattttgtccaggaaaatccaggtttttcgtgttttgcctggacctggacctggatttttttcacattggacctggaacctggatttcctggacaaaaatccaggaaaatccaggttgccgaaaaatgacctgggactgggacctggatccaggaaaaaatcaggccctggatccaggtccaggncgagctctaanaaatatatatgtccttattttttcagttttgttggttgaatttaaa

SEQ ID NO: 360 - DNA, 1383 bp, Heterodera glycines
ccattagtctaccagtctccaattatgtacccttttctgagaaggttgaaaaataatataccatggcacataaaaaagagcaaatacggtatgcgaagattcactttctcgacattggacccagtatctttaattgaaaaaataatataaaataaaatgcccaaatatgcactaaaatgtgccttaaaactgccaaaaaaaggtttttaaccctcaaaaatgccaaaattgtgtaaaaattcagaattgattttaaaaacagcaaaacaatggctaatggccgttttttagacaattgcaaaaaagtttgactttcaaaatttatttcgatttatttaattaccttttataacaaatcatttcatatgtccaattttcaaactttaatacctttccggtaataaactcgtattgcataaacagtgacagtgaaagacattttaaattttcccttggaatattgtagttttctgaatcattgataaaatttattaaaaagttttttaatatatcattttaattaaacttaggagaatgtgcgaaaatttaatatatttttttagatttattttaaaattcctcaaaatttacattttttgtcgaatgaaaatttttgtgttcaaatgaataaaggcaatttgagagaaaactcttgagttaaatattgtctgttaataagtgactgacactataaaatataattgactattgtttgtgttaatggcaactgcgtcatcgccaaaacaatcttttaacaaattttgaaaaatattttcatgacgaaagagaattttttggtatgaaaatttaaaggagggactcttggaaagatctgctgtctggctgtggtaataattaggaatgtctgctacaaaattagccatttatgtttcataataattaattaagacaccaaacattgcccgcgtaatatttcacatattaattttcaaatcataaagcgtaaaacttgtttgcctacatgaattttccgagaaaatttaatgtttttatttcgaaacactaccgtagaaatgcgtagaattagaaataatagtcatcaaaatggataaattaattttgggtttttggcaagggctgcatacaattagagcagggctcccattcgtccttggatgccaaggaggtccttggaaatgagcagctggaaaagttttaaaaaattcaaagaaatttgagaaatctgtaattttcaacaatattttgattaaaattatggcattatgtcaataaaaaatgaaattttttcggaatcgctcaagtaggcgcttacgtttgggcgcgcacggttgggcgccagcaagtttttccacaaaagcttttttatttgtcttccaaatcccatcaatcttggtatcattc

SEQ ID NO: 361 - DNA, 4185 bp, Heterodera glycines
  unsure (1)..(4185): unsure at all n locations
acttttacaaaaatgtttatgcaattcaaattgcgcttcactatagctgttgtatccgccataccaatccatcaatcttggtattctacttccgccattaccatggtccattagactgacagatcatcaaaaaaaaagactgtctatttgatcaattttattatataataacttgaatagttcgactttttctcaatactcatcacaattctttcaaatttgactactttgacataatgtttgacgatcctttcaattcaattttttttgatgaatatagcatcaaagactatatctctcccatacttttcatgaaaaccatttcataaaccatttttccgaaaattcacaaaattaggaattttttttaatgaaaatctgctaaaaatcggtcaaaatcttaatttttccccaggcagagtctatcggcatcgccggaccctaaaaatcctttattttcttaaaaatttgctcaaaatcgcaaaatttggccatttttgtggacaaatctgttaacaaatcgcattaaaaattacaaaaattttccccggcggcgcctatcggcaccgcctgactccccccaccaccctattccccaaaagttttttttgaaaaacgtcgcaaaaaaaaaatcattttcaatttttcatgctcagaatttcacaaaatgctaatttctaaccaaaaaattgctcaaatttatcatggacaataaaaaatataacatttgaacattttaaacgtgttttgaataaatttgtaaaaatgaggctttttgacccaaagtgaggtttttttgcatgccaaatgaagcttttgaaaattttcaaggaaattgttttatcattttaaaattgtgagttgttgtacttagaacatgtgcagttaaatgttgttccaaaaggccataggcatggcacacaaaaagctctaattaattaatgaattattttataattatttttcaaaattaccaaacaaagcgccaaaaactatgtaagaagcgccgaccaaaaaatgtttatgttgttccaacaggatttggtcaatttcatagctggtacaattgtacaaataagtgatttggctattctttttactcaaatgactttcaataaaacttttataaatttaatatttcaatacctaaatttcatcaaatcttttcatctcaacacataccattttccatctttatattatttcaatttagaacagggctcggatcgcaacctccctttccaaggacgggtataccaatttccaaggacataagaggaaagttccattaaattcaaggacatttaaaatttttatcatatgcaattgccggaatttatttttaccaatattttttgtttctgttggtaatatttcttatttcaccgcatatgcacttttttgatgcgcactttttccagaaaacttttgggaaagaagtgggtccggcagtgccgataggcgccgccggggaagaatttgaaaattttagggtaacttgttaacagattttcactaaaaaaaggcggatttagcgatttgagattatgccgatgaccatatttttcacttttcacaacaattcttgcgggcgctttttccgaaaggctttttgggaatgggcgggggggggtgagaaatttgttaataggtttttccaaaattgacaatttttaacgctttttgggtgtctttttgaatcaaattaaaaaaaaaatgggaatttttgtgcaatttattaccagattttaaaccagtaatgcaataagttaataaaaattggtataaaagtcaaaaattaaaatttttgaattgtttctttatatgctcattttcaaggacatcttgaattcaaggatattttcaaattttcaagtgagagggcccaatttccaggacgtccttgccattcaaggacgaatccgagctctgatttagaaaattgcctgagtattcattttcaataaatttaatgggcattaaccagcagtctaattcgttttaggtgttgcccataggggagaagtaatttgtatagttttaaagcagaataaattcaatttgaaaaggtctagttatcagtcaggcttatgtctcaaggcgtcagataattaaagagaagaccgagaggcttcgggtaaatcatttgtcgaatttggtgaggtttatatataaaaaataacaaattattaaacttacatgtataaattttttcaatcatttcaaaagttcattaataagcatattaaaaatgaattgctcaaaaatgaaaattaatttcataggctgtgctaataaaaaaaatagaaaaacgcattcaaaatgttggagatttacgtctctgagctgtcaaaatcactcaccgtaagctgaacaaacaaaatttagccaaaaaatttgaaaagtaaaatattgaacagaaaagcgcataagctttttggatgaacgggatatgatcattagtgcatgcgcaagctgaacaatcaaaatgtttggcgaattcatcaaaattttaaattgtcaaattttttccgtttcgtcgccctataaatactctttccaaaatcagttttggcaatccaataaaatttctcttaataaaaaaatactcttcaaataaataatcattcctagctgcttttggtttgatcacaaatgttcgtccaactcgtcctccttgccatcgttggcattacttttgtcgatgctgccgcaccgccgttcggccaattgtccgtcaaaggcaccaatttggtcggctcaaacggcaaaccggtgcagctgatcggcaattcgttgttctggcaccagtggtacccacaattttggaatgcccaaacagtgaaggttggaaaattaaaatttcattttgagcggtttggattgacacagattttggttaatctttgcaataatgacaaattgaaactaagttgaaattagacactcactgttcttggcaatcaatttttgcatattttgtgattctttttcgggtttgagttgctaaaaatgggctgatcactcacgccaggcactcaaatgcaattggaaaatttaaaaagtgaaaagactgagccgagatttggctaggcaaagcagctttttggatgaaattattaatcgagtccgatgcttaaattaaagactccgaataaaaaacaaacaaagtttttggctcaaaaagaaggcaatttttaaaccaattaagcctaattgcatttatgcttgtaggcactcaaatgcaattggaattccaatgtcgtgcgcaccgcaatgggcgtggaacagggcggctatctgagtgacgcgaacaccgcctaccgactgacggcagctgtgattgaggcggccattgcacagggcatttacgtgatcgtcgattggcacgcgcatgagccgaacgcggacaaggcggtaattacataatttgattttgcataatatattttaaaaaatcagagattataatttagcagtctgaaaaagatggtttagccaaaatatcaaacatttcccctttattggcccacaattattcatttaatttttgaaatatttacctctgatttaatttttatgaaactttaatagtaggaatcttgggttctcgagtgttagaaatttcgattcttgagcacgattcattgttttgcttcttgagattgaattcttcaccaaaattgcgaaagcgtacggctccaaccctcacttgctttacgaaacgtttaacgagccattggatgtgtcttggaacgatgtgcttgtcccttaccataaaaaggtaattcgctgggaaatgaaaattgctaacattctcccccttaaggttatttctgcaattcgtgccatcgacaaaagaatgtgatcattctcggcactcccaaatggtctcaagatgttgacgtggcggcccaaaatccgatcaaaggattcagtaatttgatgtaagtggactctccataagtgtgtaatagtgcattccgtaatgctgcacaaactaattaataattttttgcaaataattaataataattaattaatcagaattatattaatatattcgcgctattaaggtacactctccacttctatgcgtccagtcactttnngtgatgacttggcataagcttaagacgccgtaataanggtatcatatgatactgatcgcccaaaccattactg

SEQ ID NO: 362 - DNA, 8316 bp, Heterodera glycines
  unsure (1)..(8316): unsure at all n locations
aagtgcaataatantggacaaataataattcacaggtgtgaaatgctaaataaagtctgaagtccggatgatcaactgaaactgaagaaaatggaaaatgtgaagattgcgaaaaataaatatatataaaatttgcatgcgaatgtttatcgaaattccgattaaattgttttttgagcgcagataaatcgcaaagcataagcaatcgtttgtaacgtttgataacgaaaaggaatagagatattctcgagtttgacaatgatacgaattttccttataaaatatttttgttttgtaaataatttctgtaaattcttaataaaattcttctggtcggttcaaagcttcaattcttaatctctggttcatatttccataatagcagctggtccctttgaatcaaaaactgattattaaaatgataaattcaaccgaaaaattgacaaaaaattttaacaatttatgccaacgaagtattttaagaatataaaacaaaaaatgaaggatttttggctaggtcaggtcaaaaccggtcaaaatcaccggttccgggccgggttgacatttcaagagaaccgatttccgggcccagtttctcaaaagccgatcaaacatgcgaaaccggatttttccaaaaaaaaaccacggttcaagtttccaggacaggtaattccggtaccgggcccggcccggtctttactaaaaacccgagaataagacaaaaaaagactagcgtttcgagtcgaagtgggcgaagtacgaaaagtgtaaggttcggcgaagtacgaaaattgaaaagtgggcgaaatacgaaaagtaaggtttggcgaagtacgaaaaagtgccgaagtacgaaaaagtgcaaaatgggcgaagtacgaaaaagcgcaagtgaacaaattaaaagcaaaataattagtttaaaaacgaaaagcaaaatattattttaattaaattaattataatatttattatttaaattccgctacataattaaaatagattttccaggttatgaagacttctttaaaaatccataagaaacattcattttgattacaaagcggatctcgatggtggattttctctttccttttcagcaattggttttgctttcctcgcaacactgcatgcgggattatgttggaaattgtcgattttaagtttttggaattaaaattagcgtaatataaaaaattatttgctgtgtttatttttaaataattatccattaaatagtatagatttagtgaagctttggctcaccacatatatgattaattcaaaaacatttcttaattgtgtagcgaaatttaattaatctatatatattcaaattaaatttaattaacataattagagtgctcattttgcagcatatgctgtttttttttttgctaacttggggcgtgataataggcatgaaaaacgcatttctaacttggttgaggcttctaagtccacttctttcatgctgatttttgctgatttcttgattttttaatttttgtgcagatttttggaggttttttataatcagggagcaaacaatcgttttttgacgccttttttcaatttttggtgcctttaatctcttaatttttatgcttttttccaattttttgtttttgccttttttgtgcttttttcatgcttattttggaatttggtgctatttactgtggtgcttaatcggttattttttgtgctgaaaacgagcactctaaacataattattttgcttttcatttgatcgcttgcacagtaccctttgtatataggctaattgccaaagctcttagttttaaaaattcatcatcggaattttattcaaataaatattcacaatattctcaagaattatcaaatccatttcattttaataatttttcattaaactgtaattaaaaaaagttgaattattttaagacttttgccaattaaaaccctattttgcgtgatgctaatgtgtttgctaatgtgttacgaccacacgcccaatttaatgcaaatataattataaacatttaaaattttcatggcattaaaatgcaattaaatcaaagtgatttatcgatgattgctgttattaccatgatttatgctatataaacaaatctgaaaaacgctacgattgcgacaaaagcttttgcaaatgtttgtatgaaagtgctaaatgttcattaacaaaagtctgttttatttgtattttaaatagtttattttagagtgcccacgggaccgggacctggtttgcccaaaattcccggtcccgtggcactctattttattttttagaatttgttatgcttgtcagttcatgttttttgcgtattttattacaaattgcagcacaaggaattttattaagaatttacagaaattatttacaaaacaaaaatattttataaggaaaattcgtatcattgtcaaactcgagaatatctctattccttttcgttatcaaacgttacaaacgattgcttatgctttgcgatttatctgcgctcaaaaaacaatttaatcggaatttcgataaacattcgcatgcaaattttatatatatttatttttcgcaatcttcacattttccattttcttcagtttcagttgatcatccggacttcagactttatttagcatttcacacctgtgaattattatttgtccatattattgcacttttcagttttatgagtgactggttctgattaaataaatcccttaatccgtaaatccagatcctcaatatatttcttgattgtgtcctgcccttgacggtttaattggtcagacaaaccggtggattttttcttgtgttgcgaagctaccatattgccagactgcgtccagcgggaggaagtgccaacctgaaatgagcaaatttgtaggagaaatggctgaattcgagagatttagtgttcgactcgagaaatattcgcttttttgtggcgtgaaattctcggacggcacttcctatcagtggcccccaaaatcactcacattggcagccgatgttccgccagtgagcgctgcacaagcttcgcttttgtcagtgattgaccaattgacgtacgaaattttcagttggtccaacaggctccaccagcttgacattgagccggagttcagattaccgttgccagacgcttcgcatgtaccgtactcagtgacgaacaccggaagaccttaatgtacggttgcaaacagtaatggttttggacgatacagtatcatatgattacccttatttacggcggtcttaagcttattgccaagtccatcaacaaagtgactggacgcatagaagtggagagtgtaccttaatagcgcgaatatattaatataattctgattaattaattattattaattattttgcaaaaaattattaattagttttgtgcagcattacggaatgcactaattacacttaatggagagtccacttacatcaaattactgaatcctttgatcggattttgggccgccacgtcaacatcttgagaccatttgggagtgccgagaatgatcacattctttttgtcgatggcacgaattgcagaaataaccttaagggggagaatgtgtaagattttagcaattttcgtttcccagcgaattacctttttatggtaagggacaagcacatcgttccaagacacatccaatggctcgttaaacgtttcgtaaagcaagtgagggttggagccgtacgctttcgcaattttggtgaagaattcaatctcaagaagcaaaacaatgaatcgtgctcaagaatcgaaatttctaacactcgagaacccaagattcctactaaaaattaaatcagaggtaaatatttcaaaaattaaatgaataattgtgggccaataaaggggaaatgtttgatattttggctaaaccatctttttcagagtgctaaattataatctctgattttttaaaatatattatgcaaaatcaaattatgtaattaccgccttgtccgcgttcggctcatgcgcgtgccaatcgacgatcacgtaaatgccctgtgcaatggccgcctcaatcacagctgccgtcagtcggtaggcggtgttcgcgtcactcagatagccgccctgttccacgcccattgcggtgcgcacgacattggaattccaattgcatttgagtgcctacaagcataaatgcaattaggcttaattggtttaaaaattgccttctttttgagccaaaaactttgtttgttttttattcggagtctttaatttaagcatcggactcgattaataatttcatccaaaaagctgctttgcctagccaaatctcggctcagtcttttcactttttaaattttccaattgcatttgagtgcctggcgtgagtgatcagcccatttttagcaattcaaacccgaaaaaagaatcacaaaatatacaaaaattgattgccaagaacagtgagtgtctaatttcaacttagtttcaatttgtcattattgcaaagattaaccaaaatctgtgtcaatccaaaccgctcaaaatgaaattttaattttccaaccttcactgtttgggcattccaaaattgtgggtaccactggtgccagaacaacgaattgccgatcagctgcaccggtttgccgtttgagccgaccaaattggtgcctttgacggacaattggccgaacggcggtgcggcagcatcgacaaaagtaatgccaacgatggcaaggaggacgagttggacgaacatttgtgatcaaaccaaaagcagctaggaatgattatttatttgaatagtatttttttattaagagaaattttattggattgccaaaactgattttggaacgagtatttatagggcgacgaaacggaaaaattttgacaatttaaaattttgatgaattcgccaaacattttgattgttcagcttgcgcatgcactaatgatcatatcccgttcatccaaaaagcttatgcgcttttctgttcaatattttacttttcaaattttttggctaaattttgtttgttcagcttacggtgagtgattttgacagctcagagacgtaaatctccaacattttgaatgcgtttttctattttttttattagcacagcctatgaaattaattttcatttttgagcaattcatttttaatatgcttattaatgacttttgaaatgattgaaaaaatttatacatgtaagtttaataatgtattatttttttgtcggaaagcactttgggtcaaattatggactgaaatgactgattagaaataataatttaggtgacaaaaaacacttaaaatctctttcagattttgaagtaggaagaaggaaatgcgagggacgggcgaagctcggcttagcactcgaagccgaaggcgaagcccaatttttttcaaagcacgaagttcgaagccccaaaaacccgaagttttcaaagctcgaagcacgaagtttttgagaaaataattttcttccctatcaaaattttaatgggtggtaaaaattatttgtaacaaaaaatcatgatcaaaattaggctgttcgagaccgaaaattcctgagactgagacttctttctataaattaaaaaacaaattttcatgcttttcgaacagatttttttgcggcaccggggtgacgacaagcgccgcctgggaaaatttgaatacaatttatcaatagattttgtccaaaaaggccgatttttgcgattctgagccaattatcgaggatatttttattttatttttcacaccgcttttttttgcggtgtatttatttaaagcttttttgtgggggagaggggggggggggggggtacggcggtgccaataggcgccatctgggaaaattttgaaattttgagcgtactttgttaacagaattaggcgaaaaatgaaaaaatttgcgattttaaaaattgggggtttaggcgtcgggggttaattttggacctatatattaaaaatatacgatttccatcatgtttttcaaaatgttaatgtttaaaaaattaaaagaaaaccactacttggaggggaactgatcaaaaataaatagaatatataaatttaagattagcaaaagctaatcattaggggtgtgtttttcactttgataggtatgcattttcccgaaacttcgggtaaattacccgaagctgatgctcgaagtttgaatcccaaaaaacgcgaagatttcgaagcacgaagctcgagtttcgcctgtccctgatgcgaagacggagcaagtatttagggcgcaggaagcagtctgacgagcgccacaggcaccgcctgcggatcactcacatttttttctgactgaatcgctttaaaacagcttaatttttgaggacccaaaattcttgttaattccttttttattttctacgttaaaattttttgatttggtgaaggtttttagtccatataaatccatattttgggggttttcgggaaaaaatccatatttcggccatttttggcaaattttcacaagaaaaatgctaaaaaaagcgaaaaatacacctctaaagatcgacttttttggaaatttttaaaaaataacccccctaaaaaagagattttttcgaaatttcggaaatttttttaggtctttttttcgcttccgaaaatttttactgacaacatgagattattataaaaattttgatacgtatttggttggcaattgttaagctagaatttaataaaaattgacattttttaaggttaaatccattttttggcagttttagcatattttttagtctgtttaagtaaattttgaatatataaacacctttttcataatttttttaggttttaaagcataattttggcagtttttagtccatattttggtccataatttgccatttttgagcttttaagtccatatttcgggcatttttagtccatatttggtgttttttagtccataatttataaccctactaatgatgttcaaacgcagggaaaaaaaatgcaattttgtttggttacatgtccaaagttccattgaaatgagtacaaaattttgaatttataaatgctcattgcgaaatagctacaattattattttgcctcggatgcgcttcgcgtccgttttgaattgttaacaaaaaattacatttttaagtgcttggcaattagaaaaagaattattaatgagttaaaaatacaggacaatcaatcggccatataaaaaattttgcggcactattttattcaagagaacagcaggaggtgtacgttgagaaaatttttgaaatttagttgttattttcttattagatttcagcaaaaaaatttgaaaaaggaaaaatataatgtccttattgttgagctcatcattagggatgcgtttttcctcaatctttagtcgtgtatttttcttataatttcgggtattttcacgaagctcgtagttataagcccaaaagcgaagtttccggtgttgaagaagctataagtttcgctcagccccactgggaaattttttttgcaaattttggtagacccttttggcaccttaggaattatcttcattttgtgcttttggtcgatagaaagggattttttaaagattcaaacgaaaaatttataaataaatctatttcgtttgaaataaaaatgagaatttgatattggattgtccttttaaaaattttaattcttctatacctcactgtttgggcattccaaaattgtgggtaccattggtgccagaacaacgaattgccgatctttgccgtttgagccaaccaatttggtgccggagacgcacaattggccgaacggcggtgcagcagcatggagaaaggtaataacaatgagcatgagttggaccaacattgtgatcagaccaacagcagctaggggtaatttttattatttttgatttagagtaaattgtaaaatgattttggaaagcatatttataggacgaccaactggcaagaagattgaaagtgtaattttgattaattggccagctcggttgcattttaggtgttcatttaacttacaagttccaatacgtttttctcttaaattttgttaaagaattttcttttttacctgggcctatttcaattcggatcaagtcctcgacttgatgactcgacttgatgaacaaatcgagtgttttgtttcaattaatttttatttattacttgatctcatctagtgccgaattacactcgatgtaatttcatcatcaagtgtgagaatttaacatcgagtaaataaatttgtgtttgaattacattttaaagactcgacttgattttttgcactcgatg

SEQ ID NO: 363 - DNA, 1316 bp, Heterodera glycines
cattaaatgaccaaaattatgacaaccatgctttttgttcaatgacttaatggttttaaaaaataaaaaaataattccttcagaatttcccaggaccccgcgcatttttgttataccggtgtttaatggcattataatgacaaaatgtccgacagtcatgcttttcttgccatgatcgtataattaagaaaaaatccaatagttgttgaataatttcccaagactatgcgaataaatgtcactctagcgccaaaaccaaatgagcatgttaatcatcaggatcttgatatttttccctatgtgatttacggatttaagaaaatcgcaaattaattattggagaatttcccaagaccacccgcacattttgtacgctggtgcctaaacggcattaaatgaccatatgtatgacaaccatgcttttcgttcaatgacttaatggtttagaaaaataaaaaatatattcctgcggaatttcccaggaccacgcgcatctttgttataccggtgtttaaatggcattataatgacaaaatgtccgacagtcatgcttttcttgccatgatcgtataattaagaaaaaatccaatagttgttgagtaatttcccaagactatgcgaataaatgtcactctagcgccaaaaccaaatgagcatgttaatcatcaggatcttgatatttttccctatgtgatttacggatttaagaaaatcggaaattaattattggagaatttcccaagaccacccgcatacttggtacgctggtgcctaaacggcattaaatgaccatatgtatgacaaccatgcttttcgttcaatgacttaatggtttagaaaaataaaaaatatattcctgcggaatttcccaggaccacgcgcatctttgttataccggtgtttaaatggcattataatgacaaaatgtccgacagtcatgcttttcttgccatgatcgtataattaagaaaaaatccaatagttgttgagtaatttcccaagactatgcgaataaatgtcactctagcgccaaaaccaaatgagcatgttaatcatcaggatcttgatatttttccctatgtgatttacggatttaagaaaatcgcaaattaattattggagaatttcccaagaccacccgcatacttggtacgctggtgcctaaacggcattaaatgaccatatgtatgacaaccatgcttttcgttcaatgacttaatggtttagaaaaataaaaaatatattcctgcggaatttcccaggaccacgcgcatctttgttataccggtgtttaaatggcattataatgacaaaat

SEQ ID NO: 364 - DNA, 973 bp, Heterodera glycines
aatccgtaaatccatagggaaaaatatcaagatccctttgattaacatgctcatttggttttggcgctagagtgacctttattcgcatagtcttgggaaattactcaacaactattggattttttcttaattatacgatcatggcaagaaaagcatgactgtcggacactttgtcattataatgccatttaaacaccggtataacaaagatgcgcgtggtcctgggaaattccgcaggaatatattttatttttctaaaccattaagtcattgaacgaaaagcatggttgtcatacatatggtcatttaatgccgtttaggtcgccgccatctgcaggtgcctcggaaccgtccactgatttaaacttgtccaacccgtcgaacattgacagcagtgcccaaatggtgaagtcgcaagtgcccgggtgtgtgcaaatcagttgtaacaacttatgaaaccaaagggaatatgaacaatgaataagtaatttttctacctgaagtcgcacaatgtcgaaattctcctgatccaacaggaacaggacgagaagtgtgcttatggattctttgtcaagcagtggcacagtgcgctcgtcaaacgaagtgccggctgcgtcagatgcgtttttaatagtatgtatgcttttacgagccattgtcgactgctcttgcattattgctgcgatctgtttcagttccactggtggcacatcggcatccacccgagcagtggtattgtccgcctgactgatctgctgctggagtaaatggtctctgataacctataaacaggaaaaggaataaaatgtcgtgttttttttcaaatttgcctcttgtctcatatcttcggggagtgctgccaaaaatgccgggtcgactccttcgggcatggcagcttcattcggttgctgtgcattcgtaccggaaacagccgtagacatttgacccgcattgtcggcagcttcccgtgatg

SEQ ID NO: 365 - DNA, 4352 bp, Heterodera glycines
  unsure (1)..(4352): unsure at all n locations
agcatgtcatcatcagcatcatgatatttttccctatgtgatctacggatttaagataatcgcaaattaattattggagaatttcntcaagaccagccagcacatgttgtacgctggtgcctaaacggcattaaatgaccatatgtatgacaaccatgcttttcgttcaatgacttaatgttttagaaaaataaaaaatatattcctgcggaatttcccaggaccacgcgcatctttgttataccggtgtttaaatggcattataatgacaaaatgtccgacagtcatgcttttcttgccatgatcgtataattaagaaaaaatccaatagttgttgagtaatttcccaagactatgcgaataaatgtcactctagcgccaaaaccaaatgagcatgttaatcatcaggatcttgatatttttccctatgtgatttacggatttaagaaaatcggaaattaattattggagaatttcccaagaccacccgcacatttggtacgctggtgcctaaacggcattaaatgaccatatgtatgacagccatgcttttcgttcaatgacttaatggtttagaaaaataaaaaatatattcctgcggaatttcccaggaccacgcgcatctttgttataccggtgtttaaatggcattataatgacaaaatgtccgacagtcatgcttttcttgccatgatcgtataattaagaaaaaatccaatagttgttgagtaatttcccaagactatgcgaataaatgtcactctagcgccaaaaccaaatgagcatgttaatcatcaggatcttgatatttttccctatgtgatttacggatttaagaaaatcggaaattaattattggagaatttcccaagaccacccgcatacttggtacgctggtgcctaaacggcattaaatgaccatatgtatgacaaccatgcttttcgttcaatgacttaatggtttagaaaaataaaaaatatattcctgcggaatttcccaggaccacgcgcatctttgttataccggtgtttaaatggcattataatgacaaaatgtccgacagtcatgcttttcttgccatgatcgtataattaagaaaaatccaatagttgttgagtaatttcccaagactatgcgaataaatgtcactctagcgccaaaaccaaatgagcatgttaatcatcaggatcttgatatttttccctatgtgatttacggatttaagaaaatcggaaattaattattggagaatttcccaagaccacccgcatacttggtacgctggtgcctaaacggcattaaatgaccatatgtatgacaaccatgcttttcgttcaatgacttaatggtttagaaaaataaaaaatatattcctgcggaatttcccaggaccacgcgcatctttgttataccggtgtttaaatggcattataatgacaaaatgtccgacagtcatgcttttcttgccatgatcgtataattaagaaaaatccaatagttgttgagtaatttcccaagactatgcgaataaatgtcactctagcgccaaaaccaaatgagcatgttaatcatcaggatcttgatatttttccctatgtgatttacggatttaagaaaatcggaaattaattattggagaatttcccaagaccacccgcatacttggtacgctggtgcctaaacggcattaaatgaccatatgtatgacaaccatgcttttcgttcaatgacttaatggtttagaaaaataaaaaatatattcctgcggaatttcccaggaccacgcgcatctttgttataccggtgtttaaatggcattataatgacaatgtccgacagtcatgcttttcttgccatgatcgtataattaagaaaaatccaatagttgttgagtaatttcccaagactatgcgaataaatgtcactctagcgccaaaaccaaatgagcatgttaatcatcaggatcttgatatttttccctatgtgatttacggatttaagaaaatcggaaattaattattggagaatttcccaagaccacccgcatacttggtacgctggtgcctaaacggcattaaatgaccatatgtatgacaaccatgcttttcgttcaatgacttaatggtttagaaaaataaaaaatatattcctgcggaatttcccaggaccacgcgcatctttgttataccggtgtttaaatggcattataatgacaaagtgtccgacagtcatgcttttcttgccatgatcgtataattaagaaaaatcgaatagttgttgagtaatttcccaagactatgcgaataaatgtcactctagcgccaaaaccaaatgagcatgttaatcatcaggatcttgatatttttccctatgtgatttacggatttaagaaaatcggaaattaattattggagaatttcccaagaccacccgcatacttggtacgctggtgcctaaacggcattaaatgaccatatgtatgacaaccatgcttttcgttcaatgacttaatggtttagaaaaataaaaaatatattcctgcggaatttcccaggaccacgcgcatctttgttataccggtgtttaaatggcattataatgacaaagtgtccgacagtcatgcttttcttgccatgatcgtataattaagaaaaatcgaatagttgttgagtaatttcccaagactatgcgaataaatgtcactctagcgccaaaaccaaatgagcatgttaatcatcaggatcttgatatttttccctatgtgatttacggatttaagaaaatcggaaattaattattggagaatttcccaagaccacccgcatacttggtacgctggtgcctaaacggcattaaatgaccatatgtatgacaaccatgcttttcgttcaatgacttaatggtttagaaaaataaaaaatatattcctgcggaatttcccaggaccacgcgcatctttgttataccggtgtttaaatggcattataatgacaatgtccgacagtcatgcttttcttgccatgatcgtataattgagaaaaaatccaatagttgttgagtaatttcccaagactatgcgaataaatgtcactctagcgccaaaaccaaatgagcatgttaatcatcaggatcttgatatttttccctatgtgatttacggatttaagaaaatcggaaattaattattggagaatttcccaagaccacccgcatacttggtacgctggtgcctaaacggcattaaatgaccatatgtatgacaaccatgcttttcgttcaatgacttaatggtttagaaaaataaaaaatatattcctgcggaatttcccaggaccacgcgcatctttgttataccggtgtttaaatggcattataatgacaaaatgtccgacagtcatgcttttcttgccatgatcgtataattaagaaaaatccaatagttgttgagtaatttcccaagactatgcgaataaatgtcactctagcgccaaaaccaaatgagcatgttaatcatcaggatcttgatatttttccctttgtgatttacggatttaagaaaatcggaaattaattattggagaatttcccaagaccacccgcatacttggtacgctggtgcctaaacggcattaaatgaccatatgtatgacaaccatgcttttcgttcaatgacttaatggtttagaaaaataaaaaatatattcctgcggaatttcccaggaccacgcgcatctttgttataccggtgtttaaatggcattataatgacaatgtccgacagtcatgcttttcttgccatgatcgtataattaagaaaaaatccaatagttgttgagtaatttcccaagactatgcgaataaatgtcactctagcgccaaaaccaaatgagcatgttaatcatcaggatcttgatatttttccctatgtgatttacggatttaagaaaatcggaaattaattattggagaatttcccaagaccacccgcatacttggtacgctggtgcctaaacggcattaaatgaccatatgtatgacaaccatgcttttcgttcaatgacttaatggtttagaaaaataaaaaatatattcctgcggaatttcccaggaccacgcgcatctttgttataccggtgtttaaatggcattataatgacaaagtgtccgacagtcatgcttttcttgccatgatcgtataattaagaaaaatcgaatagttgttgagtaatttcccaagactatgcgaataaatgtcactctagcgccaaaaccaaatgagcatgttaatcatcaggatcttgatatttttccctatgtgatttacggatttaagaaaatcggaaattaatta

SEQ ID NO: 366 - DNA, 1586 bp, Heterodera glycines
  unsure (1)..(1586): unsure at all n locations
caatgaatgtcaatatttcgcatcacttttctttcttttttctcatcattcactcttcgccaccgtcgcttccttcttcagggcgcgcttgcgcgtctgcagtgagttgtcgcgcacgaatttgttcagcaacggggcggggacgtagccgaacatcagctcggcctaaatgggggagggcaaattctaacaaatttggaattcgtacaaattcgaaaaatgcaacaaaaaaaaccccgaaatgaaaattttgccggttcgaccgacctgaatttggtgggacaaacagccggtggtctcgtcaaccaaaccaatgctgcggagcgcttgggcggcaaattcctcggggctgggcgtgaagaaggaagccttgcgaatcttggccattttggtggccaccatcatcgggcacaccgtttggatgacaatgtcggtgtcggcgtattccatgcgcagaatggaggacaaccaacacacgtatttctgagacagagattcaaatgatttttttgataagattgaattctttaaattatttccaaaatgaaaaggaatcgaataaaattttcttgtgtatttttagggtttttagtgatcggcgtatcttagaaaattaaaagttctaatcatttgaaaaacattttttgagaaattctaaataatttgaaacgttcgatgacactctttagttggtggctccattttaaaattatttctcatgaatttttaatattcaatttaaaatcggggtgagtcatctataaagtattaccgaattgttttatgaggtcccaaatcattaattagaccaaaaaatatacaatacagcccaataaaagcaaaatgttttcaaaattccaacgcggcaccccccttttcccctccaccttcgacgcggaataagcggccaggtaaaaccaattgaaatacgctgccgaggaggccaaattgacgacgacgccgcgtccccgttccctcatctgtttgagcacaaaagcggagagtaccgtagtgggcagggtgttgatcaccttgaaaggtacaaaatcaaaacacttaagaccaccagcagttcaactgatttaaaacgtacggtaatgtcggagacgcgttgcagtccgccctcaatacggtccaatcgctcggggtactcgtagctcatcccgacattgttcactgaaacaatgtttacattcgtttgattattaattgatgctctttaatacaatccattatttcgggaaaacggacactctaaggaaatgttaaacataaaaaggtccaagtggtgcgctctttatacgatggtttgtttttcaccggccttttttgctctaaaaatttttggtaaattaatcttgttgggatttgaggggaaggtgaatttgggatttttgacgaattcctcaccaaaattcaatatgcttttaaagacttactanaattccaaaaatatatatatatatcaggaattcataaagcattcattccgtgctaacaattttgtcatccatcagcggtagtgcctaccgagcattcccactttcatgtggaaagttgngagaaaattgtctgctcgtagtcct

SEQ ID NO: 367 - DNA, 1181 bp, Heterodera glycines
attttcctccgccactgcgttcagtttgtccatggagcgtgagatgagcaccacgttgaagtttttcttggccaactcgagcgcgtatgccttgccaatgccgtcagtgctgccggtgaccactgcccactcggcacccgcgagcacctggaaacaaccgatttgaacggaaatgttagggaattggaacgccgcattccccaccaaagattttgcaatgcttaaatttcaaaaaatgaattattttgctccatttttctatatttttgaatgaaatttaaaaaagtaaaaatttaaatatgaaaattaatcttttttttgtgagtgtattcttttattctgacagttctcttcacccataatttgggaaaaatataaattgatattttttgggaaataagacttggtcggtctaaatccgacgaggtcctctacccaccttgatattctgaggaacagcgaacaaataggggaaaaccacattgtacagagagcggaagagtttctggagaaaaatggcaattgtcaaatagccggctaatgtgacaagaaaagacatggcaaaatattaaagtgaacaaatgccttaaaatttgttacacaaaaattactaaggaataaaattaaatgagaaattccaaaatttaatttttgtgggaaattttataagattaaaatagcaaaggccaattgccacgccccaaatcatcgaattggacaaaaagttaatgaatgcgtggggcggttgaattgaaaaggtggccgattaaatttcttttgcaaaaacagaaatgaaagtcgcacaaaaatgcgaacgtaaaattggaattgtaatgaatgaatagaaaacactcatcggttgattggagaaaaatgtgggaccattttgaagagaaaggagaggagaaaggtggggcggttaaaggtcaatatctttcgattttatatgggaaagtgaaaaaaaagaataatggaaagtgcaattttaattaatcaattgcataattaattaattaatgatgtattaacaaatacatacataatgttttgaatgaagaaaggaaaacgaataatcttgaacagcgcagagagtagttaacctacagctctcatcgcagggtgtgaaaatgattaatgggttttttttccctttgatctttgccgccggccggggggggggg

SEQ ID NO: 368 - DNA, 817 bp, Heterodera glycines
ttccttcttcattcgccgtttaatgtaaactttcctccccccccccccccatcaattgcttaacttttttttttctaaattgtgttatttttttttttttgacatgccaaactttgcgaggcgtactggtggcgcgccttgccatcaaaaaagaatggctgcgcgggtggccatccaccttgtaaaaaatgtaacttttttttttttagttcaaaatttctttcaatttcgcttttttacagttttatacaccgggaggcacagaaacaacagcggcaaacagtgggcacttggtaaaaaaatcaaatcattttttttcaaaatttaatttttccttttcgattttaggcaaatgctcgacgaggacaaaaacgaagggtatttttttcttcttttttttttaaatttttaataatttcccgctcacatttaaggtgttcaagttgaaaggcaatgttgaaatgaatgaagctgatcgaacagccaacgaagtgggtttttttttttttgaaatttttttaaattcaaaattaaaaattttttgaggaattggacaatgtgatcaacatcagtgccaacgccaatgccaacaatcggaccaatggtgatgaggtgaggtattgtaattgaaatttaataatttaaaaaatttttccattttgatttaaggcggcagcggcggtgagcgacggcggggcccaatgccaacaatgggacaaatgccgaaacggtaagcaattgtaattaaatttctaaattttgatcaataattttcccattttggtttaaggtggcggcagcggggatgagcgacagc

SEQ ID NO: 369 - DNA, 2092 bp, Heterodera glycines
cccctgaggtgtgggcccagattgggctcacccttggggtgtgggcccatgttgggcccaactttttgttttttgggctctgattgggctcacccctgaggtgtgggcccagattgggctcacccttggggtgtaggcccatgttgggcccaactttttgttttttgggctctgattgggctcacccctgaggtgtgggcccagattgggctcacccttggggtgtgggcccatggtgggtcccttttgtcttttggagccctgattgggctcacgggctgtgagccctgctgtgtattaatcatttaataaaaaaaaatttttttttcataaaccgcgttcgggggcagccaagcgaagagcgaaggagcgatctgttgctcaaccaagagcacctgctgctactaccaacaacccgcacatgccgtttccaatgatgatgccgatgatgatgccaatgatgatgcctttcaatttccccttcccgcctcctccccctccaccatcacaacaacaataattttttttgcattttcacatttatttttatgcattttcatttatttatttttgtgcttaccttcaataaatcaaattacaaaattcacggtcgaaattttcagtttttcttaatgtttactaataattcaatcaatgacagtgtgattaaataaagatggcaaattttattggttaatgaaaaatgaaaatattaacgattactgtaggcaatgaaaaagtgatcatgaggaaatacagtaggagtacaattacacaaatattgtaaatacatgcgatccaaagcaaataaatgtggcaaattttattggttaatgagaaatgaaaatgttaacgattactgtagacaatgaaaaaaagtgatcatgaggaaatactgtaggagtacaattataggagtacaaatattcgaaataattaggatccaaagcaaatattcggtacacgtttatgatcctaagtattccaaatcagttaatttttggaaacaaatcagacattttggctggtcaacggccattatcgcaatagtgcacggtggacagctaaacacatgtccgcatcccctaactccgaataacacttcacctttctctaagcaccaattgcaccgatcacttattatcaactttttttcctctgtctctctcgtattttccttttcttctcccccctctgcgactcgcttactcatcagttgtccaatcaccgccgcgctttgtgccgcaatccgctgagtcctttgttgttctttgttcagcatcgtcgcccatttgtgatcaatccgctgctcggcttccagcagattttggcggaattcttgctccatttgttggcgcatcgtttccatctgcgcctccgttgtcgcggctgcaccttcttcaagctttcgagtgcgcatctccaggccctcaatgtcttcagccaagcgcattttgatctgtgtgaacgccgccagtgcaagagctgccacttcttaaaaattattaatttgcatttatatttttcacattaattataccccggtcatcttccgagaccaattttggctttttggctgatgttgctgctgatgatgatgaggacgaagccatagcacgttttaaggacgaagctgctatggtggccacctcctcatttccatattgcagaactcgatttgcaattgcctcatgttgtttttgctgctgatttagcaattcaaacgtctcacgcaacatggctggcgacactaccgtagcccggtttgatgtgtatggagaatagcgctaaaatttacagaaaaataaataaaatcagtaaaatgtaattgaatttctcacttcattattagcccaattctccattaattcgatgcgtgatgtacagttgagcgtcatatttttgaggtcactgaagaggtaccgtagaaagcggtactttccccccaagtccttcatttgtgagccaatgtcagaattcatttttattcttaaatttaattataaaaatgtaaggtcaataagcagaaaaggaatgaatgctttggctttgttatgcgcatgccgccggttattaattaattaatttccgc

SEQ ID NO: 370 - DNA, 3542 bp, Heterodera glycines
ccatttgtggtcatccgctgctcggcttccagcagattttggcggaatttttgctccatttgttggcgcatcgtttccatctgcgcctccgttgtcgcggctgcaccttcttcgagctttcgagtgcgcatctccaggccctcaatgtcctcagccaagcgcattttgatctgtgtgaacgccgccagtgcaagagctgccacttcttaaaaattattaatttgtattatatttttcacattaattataccccgtcatcttccgagaccaattttggctttttggctgatgttgctgctgatgatgatgaggacgaagccatagcacgttttaaggacgaaactgctatggtggccacctcctcatttccaggacgcagaactcgatttgcaattgcctcatgttgtttttgctgctgatttagcaattcaaacgtctcacgcaacatggctggcgacactaccgtagcccggtttgatgtgtatggagaatagcgctaaaatttatagaaaaataaattaaaatcagttaaatgaaactgaatttctcacttcattattagcccaattctccagtaattcgatgcgggatgtactgttaagtgtcaaatttttgagatcggtgaataagtaccgtagaaagcggtactttcctcccaagtccttcacttgtgaattaaggtcagtagaattcatttttatttctaaatttaattataaaaatgtaaggtcaatgtaattttaagcagaaaaggaatgaatgcttggctttgttgtgcgcatgccgccggttattaattaatttccgcaaccacccaacccaccccctccaccgcgaatcagttgtgacactttcaaaagcaaagagacgctaattaattattaccgctaccgctatgtattgttaaaaggcaagcaataattcggagggatgttctcaatgaatttatttaagaaaaaataaaataaaatagtgaaaatgatttaaaaataattaaaaaaagcatcataaatccaaatttgcttcattcattgtttggctttttcttcatgggtgcaattaagtcagtcgctcggcaattgacccgcacgcattcctgacatagctcaaagttgatagaaaagcggtcgtcgtccaggcgcttcaccttctgctgattgtgatacaatcggttccagtcgtcttaaaatattaattaaaataaaaaattgtctattgttaatttacccgggcagaggtatgtagtaagcaaatattttcccttcgctaatttccacaaatctcggtcctccaccgcgcgcttttttgttggcggcggcccctttgtctcatgatctggttcagtttccacatgtgtcggaatgggttcaattttattctcatgctgatttggagcggcagcagcagtagaaagagtagcagcggatctcttcattttgtataaaataattttggtgttttgaattaatgaaggatgattttgggtttggacagacaaattaaaatgatttcggtttttagtcaggtgaattatttaggtgagagtgggcggggctaatcagtaactaaatgatgggcgtggcccaacttttgagtatataaaagtgaaattagtcgttataacattcattcttggtgaaatggtactcgtcagcgttttctgtgctcagcttcttaactgccctgtcaaatcattgcgtgatcgactcaatcaccccgaggatcggagcattgtaataaaacatctgattggacgaaaagtgcgtacaacatacaacgaccgtaatgggatgcggaaaacatttttcgtcagtggaatttcggaccaaggggcagccttccttcccgcatacggtcatttgcgccgaccattcaacatcaatgtagctgctcatttttattcgcgacaccgtataaagctacactttccttatactccatgcataattgagagattttcggggggaggcgaagatcggcattttccattggaactccttgaaattgttgatgatcaagaccataaatgttggttggggcgtctgttcacagaaattggcgagactgatcagaaatcctcaaagtcatcatcctcatcatcatcaactcaaactttgcgcctgcccgatgatgaagagatgacagaaaatatagggcgcgatgagtgcagtcaaaagtttccatcattttggtgaaattttaaattatttatgttaattatgcatttttctaccataaaaggatcactttaatttcttaattaaaaattgcttttcaaattcattaattttttgacaattgtatcttctttggcctaattatgcacttttctacctaaaaataacatctccaaatacttaattattttaaaatttcatcttccattcataaattatgcatcaatttttattgaaaaacgagttaaatacaatttatggtgtattgatgagaaagacagatacatcagaaaacaaaaacattacaaagtgtggccaaaattcttcacattgaaatcgctgcctataattcccttcccaacatatggtcggtaacatttctgtaggggcatggatacgaccctccctccctcccgaatgttcggtcggaggaagttaggataagtgacaatgattggctcataatcacccgttgttgcgtaccgcaccacttcttctttgaacgtctcgtaacgcatgccttggttgttgatcacgtcgtagttcagcgtcaatccgcgcaccttgagcacgtattccttttcggcatccgccccagctccctttcgtcgcaaacacagaccatactaaaatgtgaaataatcaatacaaattaatgtataaacattaaacttacttgttttgcacccccactgcaaaactacacaatgtcgtggtccgggtactcgtcagtgaactggcccaggtgtggaccagttttgagcggacatcgctcctccgggtggacgaggatgagactgtctgtatctaaaaaatatttgcaatttattttgtgtaattttgttagggcatatgtaccggtgtagagcagctcagagcctggcgacctaaccaccttctgcatagctttgagcagaacaagccgcgcagcggaagtggtctacagagagatgactaaatttatcaatttagcacaattttataagtttattctcaccgatgtttgagcaagcgtgctcatcgacccagtcctttttgtggaggtaggtgatgaggatgtgcgtctcgtccagctgatcaatcgatgtgacttcgatcgatttgttgtccaagtactcggccagcgtcaccgggtcgtcagtgatgagtgtctggcacaggccaaagttacgaagcgaaaaacgtccccctaaaaattacattttctgtccaaatcatatgtcaaaactcacataaattgttcaggcagagctttgccagggaccgtttccccttgttgaccaccatttttgcaggatcaatgttgatgccaaactgctcagcacactctcgtacaaattgttcttccttctcagcgtcccctct

SEQ ID NO: 371 - DNA, 7180 bp, Heterodera glycines
tttctctcctccggcagagtgggcggtctgcacttccacttcgtactcctccgagtaccagtggaagaaccgtagggcgagaaggctttgattttgagcgttgtcgtaaccgcgctctgggacgatggccagatggtcgtcaggcaggtggttggtgcgaaagtgtcgcatgcacgcgccggcgatggtcatgcactcacgcagtacgtcgataccatcatggttctctctgtcgtcgatcccgtccacgtactcctggcgacgcgaaatctcgaagaattcccgacggaatgcgacaagggcggccatcagaatctcgacatcattcgtgcaataactgaaacagaaaaatttaatttgtacattttaaaaaaacccctttacctggctagcgcctcatcgagcataaaaggctcttggtggtgcgcggcataccattcgtcgaactgtcgcctctttccgggcatcataccgtttgccaaatagtcgttgggcgttgggcgaatttctctgccgtagttttccggtctgttggccaaatgcgggaagaagggcttgtcctccacgtccagaccataagaagggatgagtgcagctaacgaacacggcatcaggttgaacgaatcccggaatacaatgtttgggttgcgccttttctgcttctgtactttcatttcgtacattttatttccctgaaattttaaaattttgacacaaaaattcgtaactgagtacccgtcgcagcatttcggggttaaaaccaatccgaaacagctcgcggaagacaagcaccatatcgaagcgaccaccaaaatgcgagtaggcataggtgtcgcatttcttgggcagttcgaacacgagccaattcacgaatggctccagcgggttgtcagctaccacttgcttgtccacttgtgtgtccatgaatcggcgttgacagaacacaacggtccgatgtggtccgcagatttgacatcttgcagttgccctcttccatttgccgttttcaatgcagtcggggcatgcaacccgcgcagcaatgaagtttggctgatgttccctcttctcaggttgttgggggtccatcgcctggtgttgcatagtctccaagtcaaaggccacaattcggtaggggtcgttttctttcggttcaatttgctgaatgtagcaaccgcgttccacgttgtgaaagttgttgcacgtctgacaataacgctcgtcgcatttgtgaccctaaatccaacaataactgaaaattttatttaattttagtgtttacctttctcccatctctgttgtgcactcgtgtgtcccaaattactccacattctttgcaacgttttgattgagcacaaaagtttgatgtcaaatggtgttgatgacagtcgttgttgcgaaatgccttgttgcaccccgcacattcacggaaaaacccatccaacggagagcaggggaagcgaggtccaacacgagaacagagcatacagcgcgccttgcaagagttaaggtgtcgtgacggccgttcataaggcttttcgcattccagacagtaatgttgaccgaacaagccatactctttcttcacaccgtcaaaatgaccgttgtttaggtagagcacaatcggtgtgtcgtaatagttgttgatgtacttgtatagcggcttgtactgacccgtggagccaaaaataaacacagcaaaacgatgtcgttgctggctgttgttccaatggtccaccacccggggcacaacaatttcagcatcatacgcattgagtccaggccgtgcgccaatttgttgcatcagttgcaaagcatccctttgaaggcagccctgttggccgtgttggctgtgaaggtagcgatggaacttccaacttgcccagccacggcttttggccaccattgttgcttgtaaggcataaaataaacagtagctgcgctcatcaggattgtttatcttaaaacaacccatcaaaactgttgctttatcatgtaccggaccttaatcaaactccgatcattaatacgatggtgaacaggtgctagagctcgtcgtgcgcctcccttcagcgttcttttggtcggcagtccaggtcgattaactgtcgtcacaactacggtaaacggttcaccccacagtgtgacgttctgttgcttcttgctctgtgccactttgacgaattgatttaagatggtgttgaccgtgttgtccgtgatttgccggatagggatggggatgtccccgccagtcaacagtggactactgatgaggcagccgaggtgtgtaggatgaattccccgctcacggctgtctgccacagccgcatcaatgctgtactggaaaatgccagcaataagtccttcaggatttgctgctgctggtacgtcctcaatgctgaaccgcgacttggctttgctgtactggaagcgcggcacgtgctcgatagtgctgtccagctttctaacgtagtcttttgcagtttttgatgtagatgaggaggtcccagcaccttcttggaccatttctcccaataattcgttgatgagaaagcggcgccgcggctttttattaggcattgatagaagataatcaatagaaaaattagagggccgtttgggaggttgattttgcattattcaaaatctaattaaaggaaagaaatgagtgtgaatgataaatgaatggtcaatcgagccaatttatagcgatcatattgggcatgggaaatgtgaaatcgattccattaaaagttgtaattgcaaaccaaccatgacctgatgagcagcgcactgccacccatgaagcacaagacgacagggcacctaaacggctcgtaaaattagacaggtttattgtattacctcaaggcctaaaagacattaaaaattgctgccaggataaacggggctctgtaaatcgagcaaccgccctggttaacagcaaaactaataaaatgtttaaatttaataaataatgtggactaagaaatggaaataattgtgtcctggcgtgcttataaagcctcccagaaatcgacaagctcctcccatcaatcgataattttcgacgccatcccgaaaggcggctttttcaaattttcctttgaagtaattccctcgggaattgagagtgcaatgagcacttatgaataattaacgacacctaagcaacagaagaattatacatttattgatttaacatttttcgtaataaaacaatcgcgtacatgtccggacttgcacaattattaagaatacttagaaattgtgtaaatgaatcccccagggacatgtggtaaataaaaacaatacaatgggcggcacaagtagagagtaaaggggactggtaagtgtgagtattccttcttgttccctcacgaaattcgcacaaaaaagatgacgtaatgctgggcgggatgggctgggcaaggctgtcaaaataaagcgctggtgcttccattcccctcgcgtaaatggcgcaccaatgagagccctccttgtgtcgggggtccctgttcacaacgagcgctgccgggtactgtagtgtggaaggaggcggcaattggtcactggcgaagcagccctgaaacactcgcccggtcagaaggttttcgctcaatatttttgtgatttgcacgctgtccattcttcaaccaaaaaatagagcaaagttgatgcagcacaagactgattatgagcattaaataaagagcgaacagtgcccagcaaatggcttgctgcgcaaagttgctttcctctggtatgtccttacacaattggataagcggtggaagaacagcagaaacatgttcatcaattaacttgtcactttttggagggattttggttgtagttgttgttgttggtggtggtggtattgttttggtagaaaaataaatttttgacaaagacaaccttctcaaatattcagtgtaggaatatgacggctcgtgttgttgtcgagataaagtcaaattttttatatacgcagaataagtatttttcggttcttctcgcactgttgttgaaataaccggaagcgaaactcgtagaaagaacaaaatgatgcccaatttttttgaatacattttaattacaaaatgatgaaatgacaattgtgggaagcttaaatagtggtgtccgtgcttattgatcggtttttgtccagcatcaccaatgagtcgcattctcccatcaccacaagcattattcctccgtctggcactgggtggttaaatttgatgctcaccgctgtagtgccattctttatcaaatcaaacagtgccgcttgatcatccccgctgttggtcaaattgaacacgtaaatgcaatgcgtttttccgtattgggcaaaagttatcccgttgctctccgatgagtttgcgaatcccaccgcttcattcatgtcattgaatgggcgaacatacctcccgttggggtagtccaagtcatagggcgcttgtgggtaagatcgtccattagcaacaatggaaatttctcggacattaaacggttgaaaattgaatggactgcgccgaattgagccaacataatccgcattcgccaccagacccattgtcacacgccgggggatttggtccatgaacaaattggctgtaaactcgtaacggccttgactgatgaacagcgatttcatcattgttttcctcacagcgtaacgggcaggttttacctccaactttcgcgcaatatccagcgtcaacccatccatcaaagacactttcttcacatacaatttcagtcccactacctcgaaacggtagcggggtgcacctgcgagcggcgcaattagcacaaattcgttatcgttgggcaaaatttcaatgtccagctcacaaaagttgatcagatacagcggctggttgaataggtcggtgtcaattttggcaatgaactgagcaacgttgctgagcgcaaacaaatcgcgtcgcgctgtgcatccgtctcccgtctcaagcacatcacccgggtcccggtagtagcccgctgcattcaggtgtgagtcctttgctgtggttgaataggagagctcatgtgaaaagtatgttttgtaagccatcagtgcattggcattaaaaatttcgcgcccgttgatgctcattttaatgttgcggatgaaagtttgaccgatcatttgaattggcgcaatgtttatatcatcagcggttaggtcaacaagttgtccattaacgttttctttacggattcgaaactcagtgagcaaatagcatttggagaggtcaatgaaattttggcttgagtgaagtttgaagtggtagggcgtgtcggtcagagggttgctgggcaaaagctcaaacacttttgaagacgagacgctcacatttgtagggggtatacggaaaaagtccaaagcattggtgattgagttcacggagtcagtgtcgattttgtgaaatgccattattatttagtaaagtccaaatgcgtctgagcgaacccgttttcttgctggctttgcaactggtcgtccaattattgtttgatgaccaggcacacgtgttctctttctttttatacccgttcgtccgcttccaaactgtttgggcaggccgcctttctccagcacagtatcaattccccgttttccctcactgaccaacgcctccttgagcggcaccccctcatgcccgactcgctccagcacccgctggccagtgctcagcgcctccgaccctaccgtagttccaacacgacgaagaatgggcaggaaaaagcgccaaagtccccgaaacacatcgccaacgcccgccccgcgttggataccgtagcccctctgaaaagggctggtgccacgaaagtagtcgaattcctctttttctaagccgctaccgtactgcacatactcatcatacccggcaatgcttgggtcaaacacaatatgaaccatttttataatgtcaaaacaaaatgaatgatgaaatcagaagtttatcactttcttaaatatcagtacgaccatcgttgtcccataggcgaacggcacgagacggcctttgtccattgtgcgcagttcaatctcaatctcattgatctcccgtggtaacacacgggcaaatattggcgagtcgtaaatcttctcgttgtactcccaagggatggcaccgctgatagacacaacacgaagcagcgaactcagtgaattgccaatgatcatgttttcggtcaaccctttcgagtagacagcaaagcttgagatgcctccgcgcaaatctacaggatattttgacagttcatttgacacgacatgttgagggttttcaaagccaagcacatagcccaactgcggtgagaaggacacatgactgacgatcgcctcattgaacaccagcttgaatcgttccatgttctcaagatattgaattgagacggaattgggcacatatgagagagggtctatttgaacgctgagggtattttctggtaaattcaaatctgctaatgttaaagcagctgatgttggcggtggtggtggctgctgtttctgttccgttccttcaaaacgctgttgagagcctgacggttttgcgggaaccgaaatgggagctgatggttttacgggcacttgctgtttttgttgatgaggcgttgccgagctttttagttgcgccggaggcgccgtaattgtcgtcttagttgaaggttttgcggcggttaatttgtctgttttattttcttcttctccttcgtcaaaacgcggtggagagtctgccagaggagcgcgaggagccaattcagcggaaaccgaagctggaggtggcgcattggctgtcgattttagctgagctggtggtgccgaaattgtcggcttaacagatgggctctttaccacaggtgttacaggtgttgttgtctttggcggcggaggggcggttgttgcctttacaattggcggaggggcggttgttgtctttacagttggcggaggggctgttgttgtctttacagctggcggaggagctgttgttgcctttacagttggcggaggggctgttgttgcctttacagttggcggaggggctgttgttgcctttacagttggcggaggggctgttgtagacttaacaggggcggcggtagtagacttagttgctggttttgcagttgcggaagggtgctacagctggaggagcgggcgttt

SEQ ID NO: 372 - DNA, 2308 bp, Heterodera glycines
  unsure (1)..(2308): unsure at all n locations
ctttaaaattaagctacttttttggcttttttcaatttttttttgcctgtgtagcaaactgattttgtatagtttgattaacgaaaccaccaataaatattttccttctttaagccgtgtgatcattgggcgtgtatcaatcattggattgatctggggatacacacaccggaatgaagataaatttagttccttttttttttgcttttcacgccatttattagtgtttttttttggaaaattcggtgagggaagtcttgaaagggatggtaccaataaggaaattggaaatattcagcacaaatacctttcccataaaaattcttgccagaccgtagccaaaggggaggggaaattcttcctctctccccttaagtaaaaatttttcaagaaaagtgaacattttttgaaaattattagatacaattttgttatcatttcattttgaaaaagggaatttaggaaaaaatttataagctaacataataatttttttgctaatttcaggcagagcgaccagttgttgttacgttgtgctcgacgtggcgtggccttgtttttttttaattttttttttttgccttatgagttgaaaccgacggtactttcctttttgtcacaccccctgctgaaatattttttaaaacaatttccctatggtaattttcagcgctatacacgaagataactggtccaaatgttcacgtaactcacgtaaaagcataagagctaaaactaactttaaaataaaaacacccaaaaagtgacagagactagccactacgccatttgcactgatggtcttgctactttatgaatatatttaattattatttctaaattttttcctttaactccaattttctcactaatttttgcactcagaccgccattcttaccagtgcttgtttttgccggttgccctaccgggaccgggacctgagcttttcaaattccgggaaccgggaccgggacctcgaatgaccgggaattcccggcccggtcccgtggcactctaattacaacttcaaaatcaatttttgtaaattgagcaaattccgcaaaaaaatattcgaaaaaatcacttccatttatttattcgatcggcgcaacacagcaaacatataacatttatgagttatgaatacatatgtatatacatagtattgtacaacagcgaatatacaaaaacagagacaataacatcataagacacatcggtcaatcattcaattctcatcatatacgcacgtcggcaagtatttcttcacaaagatgttatggtccacaccggcaagtgtcggatacttggaatatgtgaggaaaaagaggggatcacaggcaattacgtatcgtcaaagaaatttgagttccaatcccgcagcgggatccgcaaatttgattttttgtgcgggattatgcgggattttattgattttttgaagatttttctaagacagaatgccaaatatttttaaataaatttaataataaatttaattaaagttaactcatttttcatcgcaaatttcattcaaaatttgtgaaattttcccggcggcgcctatcggcaccgctgtaccctcctccaagttcccaaaaagtttttgaaaaaatcgcgctgtaaaaaacgtgtaaatagtcactccttttcccaaaaatgttctaaaataatgaaaaatgacaaaaaaagattttgataaaataattgaataattttttcaagcgaatatactaaaaacatttgtgaaataccttttacttggttaagaattaaaaaatttagcctattaaaatatttagaaatttttttattatattgtatatttttttaaaaatttccgatttccgacggttttggggttggaaatccgatttccgacacttccgaaaatttttggggcctcggaatgccatccctgataaggaccgccggaccccctgttcctagttttttgaaaaattgcaccgcaaaaaagtggttttgaaaagaaaaaaatagtcaaatttatgaaccgttaataatttgatttccgatgaactttttaccgtcggatccaatcgaaaaatcttagtcgacccatcagccccttttaatgcatcccgccagcccttaaacatttatttttcagcattttttgatttttggaaattttttaaatttaattgaaattttttcgaattttccaaaatcccgcaatcccgcacgggatcccgcaaattttaaatgcgggatttgcgggattaatcccgcgggatcccgtcccgcaaaaaatttgagttccagtcacgcagcgngatccgcaaa

SEQ ID NO: 373 - DNA, 1775 bp, Heterodera glycines
ttcgttaaacgtcgattcaaaattgacaaaaatagaacattttttctttgggtgacattatatgaacggcaaaaaaaatatcgggaagaagactgtactctatactcgggggagaagaagaagtcccacttgagaacaagtatgacatgaaattattaattaaagggatgaattaattcttagtaaagttaatcaatatatataacatagaagtgcaaatcacgaccaaataagaattctattatattcaatcgaaattcgttcatttcttataattgagaaataatgcgtttgacatgcaataaaaacgattaatttatacttctactacttaagacagtatataccataggattcgcaaattctctagaatttaggccgtaagatcattggtgctaatttcgcatataaattttcaatttttttcctttcagtgattgacggcatttcgttataacagagtcgtatcttgtcctattctttaatcctttttttccgcttcatattataataattacccgcaaaattataacgatttcatcatttctaccccccctacatggcgtcaaaacgtcggcgccaaaacgttttggttgttttaatctattttagaaacaaaaagagaattttgaaattttttattttcgattttttgttcgaatttcggctccgggttccgaattggtcgaaatggatgcttggttcgtgagcagcgaccctgaaaaccattggaagcatgttttcatgacttttgaaaacaaaaaaattttcttcaaaaaagggggcaaccaaccatcggcagtattaccttcgcgaaaaatacgtttttttttgttgttttacaaaatttttaaatttgggtgtttttattttaaagttagttttagctcttatgcttttacgtgagttacgtgaacatttggaccagttatcttcgtgtatagcgctgaaaattaccatagggaaattgttttaaaaaatatttcagcagggggtgtgacaaaaaggaaagtaccgtcggtttcaactcataaggcaaaaaaaaaaaattaaaaaaaaacaaggccacgccacgtcgagcacaacgtaacaacaactggtcgctctgcctgaaattagcaaaaaaattattatgttagcttataaattttttcctaaattccctttttcaaaatgaaatgataacaaaattgtatctaataattttcaaaaaatgttcacttttcttgaaaaatttttacttaaggggagagaggaagaatttcccctcccctttggctacggtctggcaagaatttttatgggaaaggtatttgtgctgaatatttccaatttccttattggtaccatccctttcaagacttccctcaccgaattttccaaaaaaacactaataaatggcgtgaaaagcaaaaaaaaggaactaaatttatcttcattccggtgtgtgtatccccagatcaatccaatgattgatacacgcccaatgatcacacggcttaaagaaggaaaatatttattggtggtttcgttaatcaaactatacaaaatcagtttgctacacaggcaaaaaaaaatttgaaaaaagccaaaaaagtagcttaatttttaaagtcatttgcaagcgtttgaatttagtgaaagggggtgaaagggtaaaaagcgaaggagaaaagaaaagcatttttgccaaaataaagtactggcgccaggggacgatggaattgtgtacaaagacccaatgatcggcgttgttgttggcttagcaagaagcg

SEQ ID NO: 374 - DNA, 8229 bp, Heterodera glycines
aaaaacccaaaccgcaatgaaaggcaaattcactacaatggtcatgcccgcagggaacaaatcagatttggagtcacttccgaaaggaggaagaatcggaattacgccgaaatttgtcagcagacttaaggaagcggtcttattttgtttccctatgccagtccggtccgttggggaatgagtttgtcacccagttataggcctaattttggatgcgaggacagatttgttatctaaaattgccgttattttgttaatgtgattattgtatttattcgcgcatttgttatgttattgttaactcgcaattgaagactgaaaattggaggacaaatgaattcgaacaaatatttctcttagttcgacaacaagaaacccaaaaatgggaaaaagaaagttaaaagccaatctacttgataaaaaatcatagatatggcaatgcatagactactacataaaagcgtgtgacaaaatctgatgatggattcatctggacatgggaaccatccgagctttaactcggaaaatgtatatgttcttttatataaaccattggatagagtgaggtcgatttgtacttattgaattttttattctactcccttatggggccccaaaaatatgattgatttttgctggttgacaatgttgcacgtgcagtgggactaaaggaaagaaaggagcgatgaatgtgtgtccgagtgggttaaaaacgtttgtttggagtccaatgttcaaatccacttgactaacgttttaattaaattttttttcgttattgcccattttaaagtgaaaatataccgagagaaaaatgaatgaattttaattaacatttaatcagaaattgacgtttttattaacccatctcggtcaccgaagctcatttcccttcgtcccactgcagactcacaaggaagcatccctaactatgactgcccaaataaaataaaaccatttgtacaattggcagtgcgcgcgcgggacggacatcggcaccgctagcggaacaaatgagcacggaagatgatgctgatgaaccaccatggagatgacgggcattgacggaggatgatgttgatgatgccgaggatgggacaaaaatggagacgccctcgcaataggactaaaaattgcaaggataaggggagaaatgagtggggaggggatttgtgttggaataacgatgaaaaaaatgccaacaaataattggaaatatgcaaaatggcaaaggccgacatgaataaatcaaaacaggtcgttgttacccaaaaaaaaaattcgggagggacattcgaagttttttttttgttgttctccggcccaagaatttgccaaggttactttgtaaaaaatttccggaatgttttttataactggacacaaaactcgcacaagctacattttgacataacttccaatgtaacaaaaaatagggagtgtttggatgatttttagagacgccgtcaggaaaagttcaaaatttcaagattttgaattacaaaaaaaaacaactcaagggccaatatgcatgtttatgtttgcatttagtttccataccaaaccaatggcttacaattaaaatttccgaaaattatttcaccctttccaacaagttcgggtgcacaacacatggcctgctccaggatccaaagtgcggactcgaacatcggcgatggtttgcgggtcgacgatggccgtgtcttagtcggcgagaaaaatcgcatcgatcgggtggaaaatttcgaaactgaacccctcgaagagctggcgccctttcctggaaaatggacagcataaaatcagtggcacaagcacatgacccgttaaatgaatgtaacaaatgggtttctgtcggtaatttttccaattgttgactgacaatgagagataattacgcgaccaaagccataaaattcaattttttctcacaaattggtggttgtgtaacaattccggtactttacttttaatggggacacatttcaaatacttgactccgaattttgtaagcatttgaagtatggccccgtaaaaataatgtacacaaatccgggtctgctagccgatggaaacacgaacaaaacccgtactcatttattgtggagaatcccaactcaaaccagcatccaacatgatatttgttcgtcatgagttgcaagttttcaaggtgtatgatcaatttttcaaaattttagccaaatcaaatgttggacatgggtttgaactttgttccgtctggtccatgaccatggttagaatttcgtctgacttatgaaaacatttcgcaatatgaatttttggactaaacctaaatggcacaaccccaactttgcgtgcccatgttcccaagtcaacaaggtttccaaacctgaacaccaacaacagcgaagcagcaatggaagaatcggcaatccttcacatagctcgaaatggcattcggcaaagccaaacactgaatttgaatacaaaacccgccccaccagtccccatgagcggcccaaccgcgaaccgatcacattttgaaatgcacacatttttttttatcttagttgactcaacaaacctgttgggtttaatttgagctgcatttgcagaattcgcatgcccattaaatgttgtttgaattgttgatttttcatcatccgccaagcagtcccaatggactgttagtagttacaagggggccagggtcccacttttggcgctaaatttgaattcaaaaatttgaattcaaatttgggcttgctttttttctctgcctatagggctatttcgtttattggctcgtgcctattgagcggttttgggaggtcagaaggtgtgggacgtgtttggcgccaagtttagaatttaaaattttctttttttctctgtcagaaagactgttttgtttttcgtcgtacacctattgaatggttttgggtgatgtccgtggaaatgaggcgctttggcgccaaatttaaattcaaaattcctgaaagtattgaaaattgaataatttatgttttaaaatattgtactattatttttgtaaataacaaaattttttattctcctagaaacaggaaattttttaattgttttcggcttttgtatcggaatgggaaattttttttctacgggaattgctgaacgtaattttacaaaatttttaattttttaatatttttctatctaaagctgaagttgaacagccgtttggaccagaccagcgaccgagtgcgccggtcgtgtgtgtgtgtcgtcgtgtgatgacttgggcatggaatgaacgagtgaccatgctgctgctgctcattctgctcgtactgatgtgccagttcgttttttggaacatcaccatttgagatttttttggatttttaaatgattcgatgctttcaatttgatattaaaaaacttttttcattctttattaattttattaagtgtttttcctcatttaaatatcgcgaatattttcttagcagctaatttattgtttgtttttgtcagtgtccgcacttcgaagaggccgattgttttgcaggtttgattgggtttagatgaaaatgaagagaaatctatgcaaaccgccacccgggccaggacgttttcgtaccgccgttttcgtaccgccattttcgtaccgccgttttcgtaccgccgttttcgtaccggacacgttttcgtaccgccgttttcgtacgagtgagtatcgaaaaaattgcattcaaataatttgttaatttttttaaattacttttaatgttttgacagttaagcttttattaactacaaaatgaaccagcagcaagtaattaaaacaaaacgaaataatgataaattggtgcatgatggtgcactttatgtgttccacaaattcagtaacgatggacttaagaaattttggcggtgtgagtttcatggcccggcagaccaatgcaagggtatgcaatatattattttgaattttgaaaatcttttaaaatccaggacgcttgcacacggatttaaataacgttgtgcagaagttggtcggagttcattcgtgcgacatgaacgctgcgcatgtggaatgtcagcgtcttgtaactggactcaagcgacgtgctgctgagacgtgcgaagcacctgcgaccattcgtgctcaagtgcttcaaaacacatgcaacctgtgctggcctcttttccgagcaaagatgccacaaaaaaggtgggttaatatcaaaaacaattttgtaaataattttgttttctttttattcaggtcatcaaacgtttgcgccgtgaggaaaatgcaccgcgagtcgaacctctcaatttggagcagttggagattccgaatacctatcgtgtttataagcgcactgagattgacgaggagcaattcctgttggcggacactggcgtttttcaaattcacggatactgaggttgaattggacaactcaaaaatgatcaattttgatcattttccattgaaatacggtagaaaatagttttttttataatcatcaaattcaaccaagtataactttatgtacgggtcgtagccctaccattcaaaaggcaattcggtagacaattttgtgctctttctggcacccaatcaaaaattccaaaaaaatttcctagccccctaggaaatgaattatttcaggtttttaaatgaactttaaggtggtttttcatgtttgagtcaagacttttttccgcccttttttgagtcaagtctgatcaaatgaattaatctcgggaatgaataagtcaaataaattttcttgttgtgtgcgaacgagccatatattgagggtaataattatacaaaaataaaaataataagtttaaatttattcaattgattttttatcaagtagattgccttttaactttctttttcccatttttgggtttcttgttgtcgaactaagagaaatatttgttcgaattcatttgtcctccaattttcagtcttcaattgcgagttaacaataacataacaaatgcgcgaataaatacaataatcacattaacaaaataacggcaattttagataacaaatctgtcctcgcatccaaaattaggcctataactgggtgacaaactcattccccaacggaccggactggcatagggaaacaaaataagaccgcttccttaagtctgctgacaaatttcggcgtaattccgattcttcctccttcgggaagtgactcaaaatctgatttgttccctgcgggcatgaccattgtagtgaatttgcctttcattgcggcttgggttttttcggcgattgatccaactggcagcacaaatcctttgatcgttaactgtccagttatcgcgcatttttcctcggtttatctcctctcgcgatcgatatgaaagcgattgcctccgcgagagcgccggatggtccacttttgccgaagccatccttaaaatatttttattggctcaattaagattttttggtccgtgctttaacatcatactgtacaatgttggggggggggcgtcaatgaaggggtagtgcgttcggcgggggggggggggtgaggatcatcggcaatgtttttttatgcgtttgaccatttttctccacctgtttttgctttgcatatccctttttccggcgccctttttggcagcggaaaattttttgaccatttttgcccggtgcaaaattagtcaattttcaagcccatttttcgacaaaaccttttagggttagtcgaacgcactgcgcgactttttccttgatctctccaccactttctcgtgttttcctttcctcttcttcctttttctcgaccaacccgcctcgtgcgttcgacaccctccgaccccaagcgttctgcgtcacgaccctccccctcttgcacagcgattgacatattccgccggaaacattccttcattttttgggccccttgctgacgagggggagcgggtttcaatcccctacggaccgcttgtttttaaacatttacacctaaaaaacaaaccgttgaaactaggttgatgtggagttgggctttctccaggtaactgtcgcccattttgcgcatgaattttttggaagctgtgtaggcaattgtcaccgagtcgcttgcagctttgtcgagctctccgcctccgcctgtcgttaccagcgtcccttttgcatttgggttaaatgtagtggtttcttccacttcataaaacattaagccgcctccctttttttcttctgtcacggttccgcttcttgctaagccaacaacaacgccgatcattgggtctttgtacacaattccatcgtcccctggcgccagtaccttattttggcaaaaatgcttttcttttctccttcgctttttaccctttcaccccctttcactaaattcaaacgcttgcaaatgactttaaaaattaagctacttttttggcttttttcaaatttttttttgcctgtgtagcaaactgattttgtatagtttgattaacgaaaccaccaataaatattttccttctttaagccgtgtgatcattgggcgtgtatcaatcattggattgatctggggatacacacaccggaatgaagataaatttagttcctttttttttgcttttcacgccatttattagtgtttttttttggaaaattcggtgagggaagtcttgaaagggatggtaccaataaggaaattggaaatattcagcacaaatacctttcccataaaaattcttgccagaccgtagccaaaggggaggggaaattcttcctctctccccttaagtaaaaatttttcaagaaaagtgaacattttttgaaaattattagatacaattttgttatcatttcattttgaaaaagggaatttaggaaaaaatttataagctaacataataatttttttgctaatttcaggcagagcgaccagttgttgttacgttgtgctcgacgtggcgtggccttgtttttaattttttttttttgccttatgagttgaaaccgacggtactttcctttttgtcacactccctgctgaaatattttttaaaacaatttccctatggtaattttcagcgctatacacgaagataactggtccaaatgttcacgtaactcacgtaaaagcataagagctaaaactaactttaaaataaaaacacccaaatttaaaaattttgtaaaacaacaaaaaaaacgtatttttcgcgaaggtaatactgccgatggttggttgccccccttttttgaagaaaatttttttgttttcaaaagtcatgaaaacatgcttccaatggttttcagggtcgctgctcacgaaccaggcatccatttcgaccaattcggaacccggagccgaaattcgaacaaaaaatcgaaaataaaaaatttcaaaattctctttttgtttctaaaatagattaaaacaaccaaaacgttttggcgccgacgttttgacgccatgtagggggggtagaaatgatgaaatcgttataatttttctgacgaagtctatcaaagagccggatttaattcttcatttactctttttcgctttggcttatgctctcttaattttgtatttaggtaatgaatcgtcaaattgattgtaaaaaacaaaagcctaaaatacatgcatgaatgccattttctgacgttgggctgatctaaggaaggaatggttcgaagaccgcacatttttgttggccccccccatgttctactagataactagcttcacatttgttgtattagtgattattcttctctgtgaaggatgtgatgttttataatttttgcgacccatgtgcacacacggatcgtttacgctcatggaagtcaacgtatgctgtttttttcgattaatgtctatgtcaaaaaattgaggaatactcatgtccaattgaacaaagcactcgaacttggatacacagtaacggatctatttgaagtaatctaatcaaatgaagatatatgtcatcaaaaaaaaataggcttgacattatgatgcttgagatggagaaatgtttcgaggatacatgaacgcatttgtcgggatgaaagttaaagcgagtgtgtggcctgcggagtgtgaaaatgagcaacaacggtctgagtacatatgttgattgcgaacgtgtcgattgttctcagcttgcgcgtgaaaagatacgaattatcccggtctgagaatgttcgctagggagttgacttgctcaaatttttttttgaatccatcaataaattaa

SEQ ID NO: 375 - DNA, 2900 bp, Heterodera glycines
aattttgggcaaaaccgggaccgggacctgagaagccgggaccgggacctcgatttttcttcgggaccgggaaccgggaccaaccgggaatttttaaaaattcaaaaaaattcaaaaaattcaaaaaatttaatttatttcaagtgaaaatattaaataattaaatttttatttagttttttatttaataaaacccaaaagttaaagctaataaattaatgaaaattttaaatcaaattttcttcatttctttcaaacaattaatcatttttggactaagtgatcgaatattattagaaattcagatttacgtttcacataaattttttcggcgcgctttttccaaaaaacttagcggaagaaaaggggaccggcggtgccgataggcgccgccgggggaaattttgaaaatttgagtgagatttgttaacagattttcaacaaaaaaggatggttttgggatcactaggctcaatttgtacggattttctttaaaaatgataaaatacaattaaaaaaaaattaagaatcatattttgtcgataggaaagccatgagtatatataaaaagaaatttcaaaatattttcatttctgtagaggaatcgaaccaggggaaagaagaagggaaagtgacggagactagccactaggccatttgcacagttggtcttgctactttatgaatatatttaattattatttctaaattttttcctttaactccaattttctcactaatttttgcactcagacccccattcttaccagtgcttgtttttcccggttcccggttgccctaccgggaccgggaccgggacctgagcttttcaaaatccgggaccgggaaccgggaccgggacctcggatgaccgggaattcccggcccggtcccggtcccgctctactctaatatcaatcgatcctctcggtgggaccaggtcgttttggcgccgacgatttggcgccgacgttttggcgccagggtcgttttggcgccgacgttttggcgccaagccaaaaatgaaaaaaaggcaggaagaaattgtaaaaattataaaaaatgaatttttcgttaaatataataattaacaaaatgaagaaatggaaacaatttatttggtagaacattggaggtgccaatgagaatgtgccgtctccgaaacattctttcattcgatcagcccaccggccgaagctggccttcatgcgttattttaggcttttgttttttcgtatcaatttgacgattcattacctaaatacaaaattaggagaacataagccaaagcgaaaaagagtaaatgaagaattaaatccggctctttgatagacttcgtcagaaaaattataacgatttcatcatttctacctcctccctacatggcgccaaatcgtcggctccaaaacgttttggttgttttaatctattttagaaacaaaaagagaattttgaaattttttattttcgattttttgttcgaatttcggctccgggttccgaattggtcgaaatggatgcctggttcgtgagcagcgaccctgaaaaccattggaagcatgttttcatgacttttgaaaacaaaaaaattttcttcaaaaaaggggggcaaccaaccatcggcagtattaccttcgcgaaaaatacgtttttttttttgttgttttacaaaatttttaaatttgggtgctttcttttttttattatagcttggcgccaaaacgtcggcgccaaaacgatacggacccgtattttattcttttagattaaaaaataataacccataaatccaacaaaattttttggggataatctttgttttttatacacattggacctacaaatgttcaaaaattcagggcgaaataccagaatttagaaataaaattcataaaaatgcccaatttttcactcaaaaatttcttgccgtttattttcagtcatctcaatcaatttatggcacttgtactgttgctccattacagtccagcacttcatttgcgtcatttgattctccgccacccggccttagcaatagtcaaaatgtcagatttttttcaaacgttaaatattcggtttttgcctgaaaactgaaatttttttctttttcctccaaatcgataagttaataaattcataactattttaaatcaatgaaatttaaaattgtttttctccagtctcacaatggcggtgccaattcatcgtcgtcatcttcgcatcctttccgttaccgtggtaacgaaaaaattcattacagaagaatgccattcattgcctataaaattttagaaaaaattttatattttgaaaaaaaaagaattgcgtgctcggcttatgcgtttgctgtgctgttgttgctccaacaatgcacaacatcatcagcccatcaaccgggaaggacaagacgaattaaactgaagatttgatttttttgaacgcccgaaaatgaatcatatggctaagatttttatacaaaattggcattttaaatttttttttgatcccacattttttgctttatttttcttcgttttgcaacatttgttcttctgcttttcctattctcgccttcttatacaaattgattgtttcaccttctcagaaaagaaaaattcttcttttataattttttaaaaatccctttgcacttttaagaattgattatagggatttgtaacttggggagtcgacatctgggaatttctaaaaaccgccaaataaccaatctatttatcaccaggttcccaagtgtccttatttctaaaatttgtccttatttggaggggccagatcttcgagatcaataatgtccttatttctaagatttttcttattttcaggcttccactaactttttaaatttttgatgcttaatgatttatttcgctgatattttt

SEQ ID NO: 376 - DNA, 8394 bp, Heterodera glycines
tgagccaatgttcaaccaacgactcatctccgttttctctgcacccgcctacacaggccaaacaaacgcgggcgcggtactggaagtgaagacgtcgagccactttaccactcactttttcccgccccaatcccagtgattgattgtactttgtattgttgttgttgttgtgtttataataaatgctcttttgtgcttcaattgagatggttttgtagggaagagggtggcgagggcggtaaaattttgcgtctgtttggttggagggttagctctcgaagaactcggtctgcttaattctagtaaattcatgtcaaaattatgatggattttccatgagttttagacaaaaaagtggtccctcctataagtctatcagcaggtcacacatttcgtttgaaattcgaatgttagctgcccaaatttgagagaaactgaaattcaaagtgtgccattccttctgtttaaattcatgggataacactggtacaaaaatgacgagaagagcttgcaaaattcataaacaaggaacagaaacttttgatctctaaggaccgaaaaattttcaaaaatttcattttttggggtttttcaaaaatattaataaaaaatgtaactttttaaaaaatggaaaatatgtccaaaaattaaaaattttctatttttactcagattcttcaaaattaataaattttagctatatttttgcatttagctattttcgagatttttagcttaaatttaacgaatttgaagaatttgtgaaaatgttgcccaatttggaaaaattcaagaaactttcaaattaattgacggacaaataacaaaatgaactccaaaatgatctcattaaaaaattggacaaaatcttccttattttagctttaaatatttattgtataattgtaatatttataaatttttctttaataaaataaattttgaacaaaatttaagaatagtttatgggcacaaaattatgctctaaatccttttagttaattcaagaaactttcaattaattgacggacaaataacaaaatgaactccaaaatgatctcattgactcattttcattgtttgtgtgagccggtcaatccgggcatagaaatcacactgtccgtgccaggcacatttcgttgggagtgatcaccttaagagatcgcataattaatgaattattgtctcttattagttttacccttggggccgtcaaatggcactttggcaatgccaatgccaaactcggcacatttcgagtcaatttcactgatttgctgaccaaactgggcactcaatgcctgccattcgctgttgttgctggcatgggaagaagcggaggcggcaatgacgaacatggcacggacgaagccgaggctgtgggcacactcatcaaaaaggggaaaaacataataataataatttattattattgggaaatgatccattagtttgagccattcccacttattaccagcagaatgagtgccaagagatgcttcgatgtcggccaaaagggttgcgtcgccgcccttcgagcagccgatcagttggcctttcaatgcgcccgcaactctttgggcatccgaacaaagcgatgcctttgaaaaggaatgggcgaaagtgccaacgtaattggccatcagcgaaaccactttttgactgccgggacagcacggatctgcagaaaagcaattaattaattaattgtaaatgaaaacaattaattacgcggtgccgaaacgcaacatttgcacagcaaacagaaaattgtgacgatggcgagtagagagacggacgaagaaggagaagacatttttgaaggatctttggcagatttgatggaattaattaatgatgctgattggttgatgggattagcttattcgttttgcttaaatacgtttttagtcggaaaaatgccatccatagaatggcatatccgatgttggcatttgtagtcaaatattttggaaaaaattggttaagtctatgcatatattgcaaaatttaacagcttccatttaagctaaaaatctcgaaaatagctaaatgcaaaaatatagctaaaatttattaattttgaagaatctgagtaaaaatagaaaatttttaatttttggacatattttccattttttaaaaagttacattttttattaatatttttgaaaaaccccaaaaaatgaaatttttgaaaatttttcggtccttagagatcaaaagtttctgttccttgtttatgaattttgcaagctcttctcgtcatttttgtaccagtgttatcctcgggggttatcgatggcgctgatcacgaatctgacatcagattatcatataaatcatctaatctatgatttttcatcaagtgataacgtcaaaaaaattttttgatggattttcacttttactgttattcattcacaaaaataaattccatcaatatgtatgtagctggaatagttgttcgagacgaatgacacaagtcaaaaatccaactttcacatgaaaacattttcgacaaattttatgttgtcaattaattttatgcatattcaagtacatacataaaaggtataaacaaaacagtatattagatgagtttttttagtgggtgaacaacggtaaaaaagtgaaaatccatcataattttgacatgaatttactagaattaagcagaccgagttcttcgagagctaaccctccgaccaaacagacgcaaaattttaccgccctcgccaccctcttccctacaaaaccatctcaattgaagcacaaaagagcatttattataaacacaacaacgacaacaatacaaagtacaatcaatcactgggattggggcgggaaaaagtgagtggtaaagtggctcgacgtcttcacttccagtaccgcgcccgtgtttgtttggcctgtgtaggcgggtgcagagaaaacggtgatgagtcgttggttgaacattggctcaaatccggattggatgaactgcaaatggggaaacattaatctctgattagaacgaaggccgcttaaactcacttggtgcgctcggatgatgcacgaaatcttcagcagctggcaagttctgataaccacatcttcgccgaacaggacacctgcgcctcgtggattcggtagttgtccttgcgcttccatcgggtcggcccacataaggtcaatgtgcagactatcggtcggcggtagcagcatcgggcgttccaattgtttgagctgttcaatgcttcgaattttgtcgctgatgcctccatgcatgcctgaaaattgaaaggtggagaatgaacaaaaaaaagagcatctcacataatattttttggccgattagcccggtcagcggcatccacgcgaaggtgtcattgaagctgtcgaacagggcttgcgaatgggccggatagcgttcctccagttcctttttgaagccgtacctaaaaaaagagggggaaaatttaaatatgaataagtgtgagaaaaaaaacccacgttgcgttgatgttgctcgtctcgtggttccctctcagcagcacaatcgatgtcggatatttgacctaaaaatggaaacgtttctttagtattggctgaaaaagccaaaccacaccttgtagcaaagcagcagcatgatggtctccacggattgcgcgccacggtccacgtagtcgcccaggaacaggtatttcttctccggcggggtcccgaggcagttgaagattctcatcaagtcaggaaattggccgtggacgtcgccgcagaccataacaggcggaaggatttcgaccagcgatggttggcgtttgaaggcgtcagttgcggcagcgcacagttgttgaatttctccgctggaaacctgcaaaaagggatgaaattgacaatgcaaaactcgctttttcacctctttcggaaactccatttgtttcgaccgtacaattttttggatcaaattgtcggggaatggtctcggagcttctgccatcgactttgctggtgctgttgttgttgccccttggacgcacatcgtgtggaatttgatttgggcctccacgaagtccagcaggctcttcttcatgttctgcactttcttctggtagtccaagacgagctccttcagctgtgtttgaaggcgcgtgaactcgctctgtgctcgttgcaattggggctgaatctgaaaaggattgaaaaatgtgaactcagcagcaacaacaacaaaacaacattctcacggcatttttttcctcggttgttgatgcgcgcctaaatttcgctttgaagacgtccaaatccaagcgtttcgtctgcagcagtgccagttgtttctgaaaaatgggaaattaccagcaaaaaacaaaaacagaacaagctaactcacgcggatagcgctgattgttgtggtggtgcctcccagcttcacgtcgcttttgctgagctgtcgtcgcgccgcgccaagagctgccagagtttgagccgtcttctgcagggcttctccgaagggtgtccgctctccgaccattttggacgccaccagcattgctgtgccatgtgccaatccgctgctcagtttttgcttgtagagttccatcttttccatgagcttctcctgttgcactgcgatccgttcggcgtttgcacaaagtttttccagttctgctcccaacggagtcgtctccgcgcccaaagcctcctccgctttctcaaaaaaagtttgtttaaaaaaatttacaaaggaaaaaaaaattttacacctgtagcgtgcgctctgctatggatttaattatttccataggaaaataatagggagtagttaggcaaagtgatgatgaatcaaaattcgaccctttttataaacttttcaagtgttcaaagaatgaatttttcttaaaaatttctaactaattaccaacgagaagggaacaactacctatataatgcaatgtgcaggtgcgaaacagctcattctttttacgcatttgtgtgtctttttttcacggacgacaaattcacggaacggacttttgcgtctgtgatttgcaggctcaagcggagacgaaggagggggatttggattccgttaatctttcagtgtgaacattttccttcccttcagaaaatgctttttcatttcatgattcttaacacgccttatctcctaatacgtttaattgccggcgacgactacgacgaaggctgcgaacagcgcaactgttgcaactgtgtggcggtaaaaatgtcggtcgatttcccatgcatgtgaattgcctatttcagcaagcaaaaggcgaccagatgtacttgttcgaaatcacggagagcgcgtggctaccccactgcaacggtagcaaagcgtactttcgactaaacaattcggctacttacacaacttgttttagcgtgcaaaaagtccatttcgggcagaatggccgcggaattggagtgttccaagttcaactttcatgggaaaacgttccacgtcgaatgctcaaaactcgcgaatgacaaagtgtgattgtcaagatctctattgtgttatttccgtcataataatgtttatgtacctctctctctctctctctctgctgtgttttctttaatacccaagtgctaattattggtccgaaattcttcaatttgtatgcgttttcgtgccaactgtttaattttaacgctgcgtttttgatttaaatttttggcattagtttcaatttttcacttaggtatgtttggtcagtcattaatttaggtaaccgattcgaaaatttggacaatctgccgtagtataatggtccaattaaaattcacattgaaatagatttttttcgtgcatccattcagcatataaatttttacaatttgaaagtgcggccccaaaagcacccaaaaagcgctgatttagaagacaattttgtggttttcactaacagccaaaaccaattcactaaaactcaaaataaatttgtgccaaccaaaggcatccaaaacaaagatcctttgctccatttctcattttaaataaagagagatttcatgtgtattcgccaaaattaggaacaaacaaaaaaaaaatgcaaaaatgtagcagaagggggggggggacctttccctcaacggatttctctcgttccatcgcttttcgttgcaaaattatgaaaaatgaaacagcagcaaaatttgcatttttccgccgatctttagcaaattttggagggattccgaagaaattgaatttggcaacttttctgcttttgttggtcgtcctatgccggcaaaaactttttgaaattcaagtgagaattgttattagattttgcactaaaattgcctttttctatggggatccatccctaattctaaaattgtaaaatgttgccaaaatttttttgtatctaaattctctgttggataagtttaatgaaaacatttaaattaaattctttcttgacaagcaaacgataaatttagtcactttttgtgctaatttttgaaaatggcaaacaaaaactgacaaatttcaacaacatttggccaacaaaactgacagattcaacaaatttataaaagaagagagagaaaacggaaataaaatttgaaataaaaaatgaatttttgaaatttttagggaaattgggggggggggggaaattatggaagaataagagggagaaaatgacagaaattcaacaaataaagcctaagcttaagcataggcccaagcaagcctaagctaggcctcgcctaaagcttaggtctaagcctaggcctagcctaagccagccttttgtaaattctcgtaaggctgagttgtccatcagccgaatgtgatggccacacagcagggacggcacggaattccgatttccaaaacctttttgagccttggaattctgattcccgaaaatttttggggcctcggaatgccatcgctatcatttccattttgagttgaatttcctctcggattatctgagcggagggaacactccgacaacgatggcctccgcttcttcgctggagaaactgccgaaggagaaaagcatttttaaattttggaaatttggtgaatttagcggcggaaaatcaaaggaatggcaaaatgattttatttgcataattgtcgaaatattaaaatttcttgcccttttatacctttgcaaaacccacgcatttccgtttttgcaattgaatttgggccaaaaattatttcgcccactcatttccttttgctttacaaataatgctgacaaaacaatgccattcttcgaaattagccattttattttccaatttaatttgttgggcttagccaacaaattatgtttcaatgcgttggcgaacgaagttggaaaattgggcgacaaatgaatttgcaagcagaaaatgccggcaaataaatgccaatgatttaataatcgtattttcaattaaataagtctatgcaaaatgtattccaattaagcggtttaataattatttatttttgctaaattacaaatccaacaactaattgacggacaaataacaaaatgaactccaaaatgatctcattgactcattttcattgtttgtgtgagccggtcaatccgggcatagaaatcacactgtccgtgccaggcacatttcgttgggagtgatcgccttaagagatcgcataattaatgaattattgtctcttattagttttacccttggggccgtcatatggcactttggcaatgccaatgccaaactcggcacatttcgagtcaatttcactgatttgctgaccaaactgggcactcaatgcctgccattcgctgttgttgctggcatgggaagaagcggaggcggcaatgacgaacatggcacggacgaagccgaggctgtgggcacactcatcaaaaaggggaaaaacataataataataattattattattgggaaatgatccattagtctgagccattcccacttattaccagcagaatgagtgccaagagatgcttcgatgtcggccaaaagagttgcgtcgccgcccttcgagcagccgatcagttggcctttcaatgcgcccgcaacactttgggcatccgaacaaagcgatgcctttgaaaaggaatgggcgaaagtgccaacgtaattggccatcagcgaaaccactttttgactgccgggacagcacggatctgcagaaaagcaattaattaattaattgtaaatgaaaacaattaattacgcggtgccgaaacgcaacatttgcacagcaaacagaaaattgtgacgatggcgagtagagagacggacgaagaaggagaagacatttttgaaggatctttggctgatttaatgaataaattaatgatgctgattggtaggtgtggttggcttattttattgcttaaatatgctttttat

SEQ ID NO: 377 - DNA, 1552 bp, Heterodera glycines
tccaacgtacccaatggtcttttttctgctcgtttcctttatttttagccttttaaatgtgcctaattagttaattaccccctcttttgcaggtggccgttgttctttcgtccgttcatctgaaggaagacaaaattgatgtgccgcaggtgaccaaatgcgctgactcatttatattcaattttcccctgtttttcagcgcgttaaacgcggagaatacggcggcggtgcctatggcggtgacggcggtggcgttggtgcgcctgccccgggcggtggcggcgcggcgaacattgccaatgtgaacataaaccaacagaacggatgcaacgggcggggaccgcagtaccaatgggcgtacacgcggaagacgggatgggtgtgcatcaacatcataaacgtgatcatcaaccagcaaagtggcggaaagtgatgagaggagccgaaaaaaaagagagagagggaaacggaatgccaaacggaaaaaaagcaatcgaacggtgtgaaaaaatcatactgtaacggatgtacgataaatgttttttggaatagttaataaataaaaaaaagattgcaagaatatgtatttattatcctgcatattagccgtgacaagtcatgaggcagcattttaaaatgataccacaaaattagtgttttcatggattccttggataaaaccctaatttccattcaacaaatgtataaagtcatttttctctgatgaaaagggattaattattaatataattttataatttttttcaaaataaattttcaaatttctaaataaagtaaacgctagtaaattttttacagcttaaaattcacaaacaatgagataatcttttttatttacaattagcctaaagaatgaacattttggtgcaaaaactgttaagaaattgagccaaattccgagttttttacccaccagggtctcctcctatttccttgcctaggaatttttcaaaaatttaaataagaatttttgagcgaaaatatgaaaatcttcgaataaattcaattttttttttagaataggtatcagtcagtagtgagtgatataggttgaaacttgttaaagtcgcgccttttcttcctagggcttatggactagtcagctgatgacaactcagtttataaaaaattacaaaattaagcctaagcttaagcataggcccaagcaagcctaagctaggcctcgcctaaagcttaggcctaagccaatcagctgagttgtcctcggttgaattgtcctaagctgagttgtccccagctgactgatcctgacgcgcttgctacaaaggaaaagtaaaaataaataataattttcgaaacaaaacccgaatgtaatggccacacagcagggacggcacggaattccgatttccaaaaaatttttgagccttggaattctgattcccgaaaatttttggggcctcggaatgccatcgctgccacacagttgtggttattgtttattacttctttgttgcccaacaattctcacgcattttctgataacggaattaattttaatgcatagaaa

SEQ ID NO: 378 - DNA, 2228 bp, Heterodera glycines
tataaaaaattacaaaataaagcctaagcttaagcataggcccaagcaagcctaagctaggcctcgcctaaagcttaggcctaagccaatcagctgagttgtcctcgtaatgcatagaaataaatttgtttttaactcaaaccaaaaaatcaaatttataaaaaaaacatttggaaaacaaatcaaattcttttgaaagttcgtcattttcttcgtctttctttgctttgctttgccatctctccgcttcgcccactcatttccttttgactttacaaataatgccgacaaaacaatgccattcttcgaaattagccattttattttccaatttaatttgttgggcttagccaacaaattatgtttcaatgcgttggcgaacgaggaaaattaggcgacaaatgaatttgcaagcagaaaatgccggcaataaatgccaatgatttaataatcgtattttcaattaaataagtctatgcaaaatgtattccaattaagcggtttaataattatttatttttgctaaattacaaatccaacaactaattgacggacaaataacaaaatgaactccaaaatgatctcattgactcattttcattgtttgtgtgagccggtcaatccgggcatagaaatcacactgtccgtgccaggcacatttcgttgggagtgatcgccttaagagatcgcataattaatgaattattgtctcttattagttttacccttggggccgtcatatggcactttggcaatgccaatgccaaactcggcacatttcgagtcaatttcactgatttgatgaccaaactgggcactcaatgcctgccattcgctgttgttgctggcatgggaagaagcggaggcggcaatgacgaacatggcacggacgaagccgaggctgtgggcacactcatcaaaaaggggaaaaacataataataataattattattattgggaaatgatccattagtttgagccattcccacttattaccagcagaatgagtgccaagagatgcttcgatgtcggccaaaagggttgcgtcgccgcccttcgagcagccgatcagttggcctttcaatgcgcccgcaacactttgggcatccgaacaaagcgatgcctttgaaaaggaatgggcgaaagtgccaacgtaattggccatcagcgaaaccactttttgactgccgggacagcacggatctgcagaaaagcaattaattaattaattgtaaatgaaaacaattaattacgcggtgccgaaacgcaacatttgcacagcaaacagaaaattgtgacgatggcgagtagagagacggacgaagaaggagaagacatttttgaaggatctttggcagatttgatggaattaattaatgatgctgattggttgatgggattagcttattcgttttgcttaaatacgtttttagtcggaaaaatgccatccatagaatggcatatccgatgttggcatttgtagtcaaatattttggaaaaaattggttaagtctatgcatatattgcaaaattcaacagcttccagccttcaattatttaaaattcataggaaatacaccagtgaaatatccaacaatttcctcttaaaaggaaaaagccgtcgccagccaatgccaacttggaaagaatgtcggcacttttttcgaaataaaaagcatatttaagcaaaacgaataagctaatcccatcaaccaatcagcatcattaatttattattgcttttaattagttaataattaatcaacaacagcgaatggcaggcattgtatttaaagctaaaataaggaagattttgtccaatttttttcatattacttagaaataagaaaaccaaagtctttcattcactcatttgttcggcactttcttctggcgaattcattttaaactcaaaattcagccgatcaaaaaatttgtgtataatcattttagtgatttcttctgtttcacgggtgccacacttggacacactcttccgcggactgatcttttgccaaaaagcatcattcatattagtagggctgccaaaaatatgtacaaaaatatgtaaataaatttttaaaatggttattttcttgaaaaaggcacaaaatgccataaaaattatctaattagcagggatgctaaaaaacgccaaatctgtacatatatatgcgccaaaaatccacagaatatgtgctaaaactcaaaaaaggctaaaatatgt

SEQ ID NO: 379 - DNA, 4233 bp, Heterodera glycines
aattgggagcgcagggacctcgccatagtttggttacggcccaaccaattcacccgtgacggtcaacagcccccgtggtccgtgttcaacaacccccaaccgacggacattgagcaaggtcaccctactcccgcttcaccaattcgcatctcgtcatgtgccattgtttaggtctgcttggaaattgctggcttttgtctgcgttggctgtcatttctcaacggcccgacattctcgagaagttgttcattacgaaagagtacaatcatagaggggtctacgaagtcaggtggtgacaactttattttgatcataccgataatcggttttaaggctttgtattgacggaatttggcggcggattatcgtcgacgattttttcccttgtcatcggtcaactaaacgccaaatttttgcggtggggaggagaagccaactttgggtgtcgctaattgagaaggcacttgcgaagtataatggcaattatgccatcctgaaatccggactaatttcagaaggtataaataaatttagtggttttggcggttactacatgcctttttttaggattttcaaccctcaccgggcagccaaccctttttatcgaccttgaatttttgagtgactccgactttgacatcgtttgggctaagctgttaagtgcgagacagctgttctttttgatgtcatgttcttgtggtgcaggtcagtttttttgcaaatttatttcgacccttcgttgtcccattttccaaagtaaatacaatgtccttactgtgaaaattaaatccagaattaaaggtgaacgcattattgaggaggcggaatatcggcaggttggactgtcgccggaacatgcctattcgctgttggatgttcgccaaaccagcgatgggcatcggtaacctaggaaaaagtctaaaatatctctgtctctgtccaacatagagtgatactgttgcgcaacccttggggagtaaactttgtttggcgcggtgaatttagcagcgaatggcttggttggactcaccagctgagaagggaactcgccatgggtgaagcggctggtccgggcacattttggatgcctcttcaacaatttgcgttctatttcgactcggtcgaaattgcgcagctgagagaacattttggatggacagcgacgcgctatttgatggacatcggatgggaccagcaaaattcatggtgaccaaaagcattcggtgccaatgtatatgttttcatttagcatgattcgaccgataattgatgaacgaaccgaactctgtgcgactcttttccaacaaaatgctcggaccacggtggaccaagttgacattatgttgctgctccataaacaggaagatgggacaacaacacctggtaactttggacggcatttttcatcgactgccattcatttctttattatcaggtgaactgatttgccggtcaccgcgtcgaattacgccgagtgtgcgaatcgaggacacttttttgccgcctggagagtatttgctctgtgcccattcattttcaaaatttggaaaacaaatgattccggggactattgtcatacacaggtgacaaaaatttagagtatttaaaaattaggataccgattgatttctcttacaatttaagttcacgagaaatttttacaatgaaacttcggaccacaactctcgacgacttgcgccagtcaatgtgttctttgctgctcaaagaaggcgtcctccaaaatgtttgtttttggttatttgactgactttattattagggcttatatttatagttgctaaaaactgccgaaatacttaattgaaaacagtttttttcaaaaatactagaaaaatagcttaacaacagctaaaaaaacgtttttcgcgcatttaaggttacggggagctcagaaaaaaaatagtgaaaaaattaaaatatcagccctatttattatatattgtcctattttgagttttctgagtttatcacacatgttctccatgatgatgctggtttggcttacatggtagacaatcacagccgggacaattatttaaaggtcgtgttttggattatgaattaattcgttttgtttatcttttttgctcaaagaatccatttcttcctatttgcgcattatttttcgaattaattcccatatttctcatttaaggtccattccgattgtcaaaactcaacaaatgttctttccactagctcttctttgcttgcgttcgattccatccctccgctgcatcgacaggtccttccttccctttctttatcaacttgccaatatttggttttgccggggactccaaattattgtttatggacaatgatttcggtcgggtcacttgcccaattggagcgcagggacctcgccatagtttggttacggcccaaccaattcacccgtgacggtcaacagcccccgtggtccgtgttcaacaacccccaaccgacggacattgagcaaggtcaccctactcccgcttcaccaattcgcatctcgtcatgtgccattgtttaggtctgcttggaaattgctggcttttgtctgcgttggctgtcatttctcaacggcccgacattctcgagaagttgttcattacgaaagagtacaatcatagaggggtctacgaagtcaggtggtgacaactttattttgatcataccgataatcggttttaaggctttgtattcacggaatttggcggcggattatcgtcgacgattttttcccttgtcatcggtcaactaaacgccaaatttttgcggtggggaggagaggccaactttgggtgtcgctaattgagaaggcacttgcgaagtataatggcaattatgccatcctgaaatccggactaatttcagaaggtataaataaatttagtggtttgggcggttactacatgcctttttttaggattttcaaccctcaccgggcagccaaccctttttatagaccttgaatttttgagtgactccgactttgacatcgtttgggctaagctgttaagtgcgagacagctgttctttttgatgacatgttcttgtggtgcaggtcagtttttttgcaaatttatttcgacccttcgttgtcccattttccaaagtaaatacaatgtccttactgtgaaaattaaatccagaattaaaggtgaacgcattattggggaggcggaatatcggcaggttggactgtcgccggaacatgcctattcgctgttggatgttcgccaaaccagcgatgggcatcggtaacttaggaaaaagtctaaaatatctctgtctctgtccaacatagagtgatactgttgcgcaacccttggggagtaaactttgtttggcgcggtgaatttagcagcgaatggcttggttggactcaccagctgagaagggaactcgccatgggtgaagcggctggtccgggcacattttggatgcctcttcaacaatttgcgttctatttcgactcggtcgaaattgcgcagctgagagaacattttggatggacagcgacgcgctatttgatggacatcggatgggaccagcaaaattcatggtgaccaaaagcattcggtgccaatgtatatgttttcatttagcatgattcgaccgataattgatgaacgaaccgaactctgtgcgactcttttccaacaaaatgctcggaccacggtggaccaagttgacattatgttgctgctccataaacaggaagatgggacaacaacacctggtaactttggacggcatttttcatcgactgccattcatttctttattatcaggtgaactgatttgccggtcagcgtcgaattacgccgagtgtgcgaatcgaggacacttttttgccgcctggagagtatttgctctgtgcccattcattttcaaaatttggaaaacaaatgattccggggacttgtcatacacaggtgacaaaaatttagagtatttaaaaattaggataccgattgatttctcttacaatttaagttcacgagaaatttttacaatgaaacttcggaccacaactctcgacgacttgcgccagtcaatgtgttctttgctgctcaaagaaggcgtcctccaaaatgtttgtttttggttatttgactgactttattattagggcttatatttatagttgctaaaaactgccgaaatacttaattgaaaacagtttgttcaaaaatactagaaaaatagcttaacaacagctaa

SEQ ID NO: 380 - DNA, 5370 bp, Heterodera glycines
  unsure (1)..(5370): unsure at all n locations
gtccattccgatgtcaaaaactcaacaaatgtttcttccactcgctcttcattgctgcatttcgatcccatccctccgctgcatcgacaggtccttccttcccttttctttatcactttgccaattatttggttttgccggggactccaaattagttgtttatggacaatgatttcggtcgggtcacttgcccaattggagcgcagggacctcgccataatttggttacggcccaaccaattcacccgtgacggtcaacagcccccgtggtccgtgttcaacaacccccaaccgacggacattgagcaaggtcaccctactcccgcttcaccaaatcgcatctcgtcatgtgccattgtttaggtctgcttggaaattgctggcttttgtctgcgttggctgtcatttctcaacggcccgacattctcgagaagttgttcattacgaaagagtacaatcatagaggggtctacgaagtcaggtggtgacaactttattttgatcataccgataatcggttttaaggctttgtattgacggaatttggcggcggattatcgtcgacgattttttcccttgtcatcggtcaactaaacgccaaatttttgcggtggggaggagaggccaactttgggtgtcgctaattgagaaggcacttgcgaagtataatggcaattatgccatcctgaaatccggactaatttcagaaggtataaataaatttagtggtttgggcggttactacatgcctttttttaggattttcaaccctcaccgtgcagccaaccctttttatcgaccttgaatttttgagtgactccgactttgacatcgtttgggctaagctgttaagtgcgagacagctgttctttttgatgacatgttcttgtggtgcaggtcagtttttttgcaaatttatttcgacccttcgttgtcccattttccaaagtaaatacaatgtccttactgtgaaaattaaatccagaattaaaggtgaacggattattgaggaggcggaatatcggcaggttggactgtcgccggaacatgcctattcgctgttggatgttcgccaaaccagcgatgggcatcggtaacctaggaaaaagtctaaaatatctctgtctctgtccaacatagagtgatactgttgcgcaacccttggggagtaaactttgtttggcgcggtgaatttagcagcgaatggcttggttggactcaccagctgagaagggaactcgccatgggtgcagcggctggtccgggcacattttggatgcctcttcaacaatttgcgttctatttcgactcggtcgaaattgcgcagctgagagaacattttggatggacagcgacgcgctatttgatggacatcggatgggaccagcaaaattcatggtgaccaaaagcattcggtgccaatgtatatgttttcatttagcatgattcgaccgataattgatgaacgaaccgaactctgtgcgactcttttccaacaaatccacggtggaccaagttgacattatgttgctgctccataaacaggaagatgggacaacaacacctggtaactttggacggcatttttcatcgactgccattcatttctttattatcaggtgaactgatttgccggtcaccgcgtcgaattacgccgagtgtgcgaatcgaggacacttttttgccgcctggagagtatttgctctgtgcccattcattttcaaaatttggaaaacaaatgattccggggactattgtcatacacaggtgacaaaaatttagagtatttaaaaattaggataccgattgatttctcttacaatttaagttcacgagaaatttttacaatgaaacttcggaccacaactctcgacgacttgcgccagtcaatgtgttctttgctgctcaaagaaggcgtcctccaaaatgtttgtttttggttatttgactgactttattattagggcttatatttattgttgtgtatttgctacaacaataaaaatgtttggtttttaaccaaaacaaatgttgtccaataaataaataaataatttattaaacaaataaatgaggaggaggacagcaggaaataaataataataaaataaaataatgaaatggtggaatgaatgggagaatgcccggagtgagggaaagggagacatatttatggggctggtcaaggggcggggcgagagacaataagagagggagtgaaagggaaaatataatcaatagggttgttcccttatccaacacctcccttctttggaaaaatccctctgcgcgagatcatggccggaatacatcgtacttccgcttcgacgggtccatgttcagctgctgaggtgccctcttggcgcgtgttgatcttcgcggcgcattttgattttggccaattggagatttggctttttcaatctccttaatgggggtccgatttggttggttcccagccaaaatatttccatttgcttggccaatttgcgatgtctccatttccattgggaaacgacggcgaatttggttggcatgacgatgtactgcgcgacggagcgtctgaacgtcgactcgataagtcggagagttgccaactctctcgataatcgtcgccggcaaccaatttgccttattgcctttcaaattccaaatgaaaactggctctccattttggaaagtgatgggcttggcgccgtatttgtcgttgaattgccgttccatattttggtgtttctgttgaaatttaccaaaatttttgaaattgactgccggcattttctgatgcttcattggcaccgaattggtgatttgcgaagaatttggaaacataagttccttcggaatgatttccaactcttcgatccaaggcatgccgagcaaatcctgatggatttcgtcgctgacgtacgcaatcagtttcgctgttcgtccgttgtacgaaacttggcaattgaattttcctttaattgcgaatgccttttcgttgcagtttttgactgcgatggtggtcttgcccagctttggcttgccaagcttttgccacgaatcagttgtgatcaccgtgatttgtgcagcggtgtcgacattcattgggttttccatcccattgatttcggtgacaattctccaccatttgttactacttccttcaatagccttacatgttggctgaagtaaaacggtgtgaatgtgcatgtcattcccagaatttgtggccacggcacgaacacgtcgggtttctgtgccgtttttgcatctttttgcgatatggccaattcgtccgcacttttcgcacgtcgaatttttgaaccaacagtctttttgccaatgatttttgcctccacatgaatagcagggctgatcaggcaggtccacttccttttcaatagccgttgaattattcggctggaaatgtcctttctggctttgctgtggccttgatttggacttctgcttgtcccggatttgctgcggtttggctcggatggcactggtgctgcagggatttgagccgagggagagcgcgctttcctttagaatttggtatttgcgacactcttctcctagctcttgcagtgaggttgaccgtccgctcgttcgactgtcttccaaacgctgaaggcatttttgcctcagatcggtgaattcgtcgcgcaatgcaatgatgagaatcatgcatttgagctcctctttgctcagcgaaagatctgcgttttcgcaggacgagttgatttgtgcaatcaaacttggaacgtcctgttgcgcttcttgacgaatttggaagcaatcaaagcgacggagaaacaatgatcgggtttctccaaacaattttttcaattttgcggtcgtctcatcccaattgaagtcgttctgcgtctttggtgcgatgctgtcgcagtaccgcttgtattccgcttcgcccaatttgccaatcaatagctgcactttggactggtcgctgagtgcgtgtccgtcctgggcgatgatctggccgtagcgcttgagccaaacgtcgaatgtatgccctaactcagggtcatactcaaatgttgaaaggcgagcatcgattgatgtcgctaatgcagcagaactgttgttttgttccgctgatgctttcaaaacagcctccaaaatcagtttaagctgattggggtccatcaaatttggtgattagccaaccggcttttgtcgaatttgtcgagccgactcggcttttgttgtattttgtcgagccgtcccggctttagaagaataagcagtttcttttcactgcgttatgacgaaattgacgagccacccggcttttgacgaatttttgctgagccgacccggcttttgacgaattttgatgagccgacccggctttagacgaattcggagcgccgacccggcttttggtgtctagcagtttctttgactgctttttgaagaatttgccaaataggctttaaaacaattcacagccagtcccggcttttcggtgaatttgttttgccgtctcggctttgtgtcctgaaaacaaaatttgatgccttttctcacccaaagatgtagagcaggtcctttgctgactgcgccaaattgttgtgtatttactacaacaataaaaatgtttggtttttaaccaaagcaaatgttgtccaataaataaataaataatttattaaacaaaattatggagaaggacagcaggaaataaataataataaaataaaataatgaaatggtggaatgaatgggagaatgcccggagtgagggaaagggagacatatttatggggctggtcaaggggcggggcgagagacaataagagagggagtgaaagggaaaatataatcaataatcggtgtggtcccttatccaacaataacatagggatttataaaataaaacttgcagaaatttcatttaaactttggattaattgtccttcgtaattttccatattcaatgtgaaaatcgtgcaattaaagaaaaaataaaattgaaaaaaattccgaatttcattagaatatgtgcaattttcaatatttaaaatctagtgaattaccaaataaaacttgcacaaatttcatataacctttagattaattgcccttcgtaattttccatattcaatgtgatagtactttgaattaaaganaagataaaattgaatggctttaaaagataaagtcaattttattagcctttaaataaatatattgagatgttttttgttctttatttaaatgcgtaaattattatgtgattccaacgcaataataataataaaaattccgaatttcattagaatatgtgcaaattatcaatatttaaaatctagtggaataccaaataaaactttgcacaaatttcatataacc

SEQ ID NO: 381 - DNA, 1758 bp, Heterodera glycines
aacaactaaaagggtcaaatatcagcagaagtcgaattaggaaatgtctttgtatgggccgaccgaattcgaccgatttttcctcgtcaattctttcggcactgcctttggcactttgcattcgtaattgggacaattgctgctgactttgctgctgcttccccgtctcggtttcatcaatggccacttttccgtcgccgactgattgatgagtgaattcagcggcacactgagtgaagcttaaagcttaagaggataatcatttttaataaacaatttttaaagaataatttttgcttgcatttgtctaatgacatttcgtcgtcgtctgaattgttttccgattttttcatattttagagaagaaattcagagaagttatctaaaaatgtaaaggttggtgattttcaagtcatttcttagcattgaccaagtaaaaagtaatgccctaagactgaggatggtcattaatgggacgcctaaaaatcaattgaacgcctaaagtgaaataaaatgtgacgacggggattaaatatttaatatttttctgtatattcgttttgatgagtaatacacaaaaaaaaacgttttttaagccaaaaattcgtttcacatatataaaaaaaatattttaaatttacccggcggcgtctgaatggcccatttttgaactaacaatacatcagtaaatacctagtttcaccaaaaaacgcttaagaatggttattgaaaaggcttctggacaagtcagctaaagacaactcagccgaggacaactcagctgatgggacaattcggctgatggacaattgaagctttttcaattcggtctacgcttgtacaacatctcatacgaaaacgacccccctgctgtacgaaaacgaccctgaccgtaatatatataataccgtatttgctctaattatcccccatgggggattatttttcaaccttcccagaagggggggggataattttttgccattagagtaaaaaaagctcttccggtcccttctgggcattttttactattgattcactatgggtcaagcctagggctaatattctaagttttttttgccatttttttcaatagctcccagtgacctgacacgaaataacattttttttttgttgtttaagctacttttcgagttattagtgcctattttctagatttttatttttagagcctaaaaaggttaaaaaaaactttgaaaaaaactatttttgcctaaatctgaattctttaaaattttcatttttttgagcacaagaatttagactaatttttggaaattcataatacacttcagggtggaataacgcttaagaaataaagaaaaaccatgagaagttttgtattttatttggtttttataaattaaagatgaaaaattttccagaattctggaaactttcgattttcaaaaaaaatcagaactccgtctgaaagggagttttcacaaattaaacacaagaaaaagccgcaattttttgcattacaaggggtattttattttatattttatcatagttttaaagtaagttttaaaaataaaactcattttggaattcggaccaaacgggggtgggtgtacatcagggctggccgtgatcacggatcacggatatccgtgattgggaaattcaatatggctaccctggggtacatagtttttcaagtggataattttttttacaaaaatggttcgggaatcaggtgaaagtaaattaatttttccctaattatttttt

SEQ ID NO: 382 - DNA, 5999 bp, Heterodera glycines
  unsure (1)..(5999): unsure at all n locations
tgctgtacgaaaacgaccctgacgntaatatatataataccgtatttgctctaattatcccccatgggggattatttttcaacttcnccagaaggggggggggataattttttgccattagagtaaaaaaagctcttccggtcccttctgggcattttttactattgattcactatgggtcaagcctagggctaatattctaagttttttttgccatttttttcaatagctcccagtgacctgacacgaaataacatttttttttgttgttgtttaagctacttttcgagttattagtgcctattttctagatttttatttttagagcctaaaaacttttaaaaaaactatttttgcctaaatctgaattctttaaaattttcatttttttgagcacaagaatttagactaatttttggaaattcataatacacttcagggtggaataacgcttaagaaataaagaaaaaccatgagaagttttgtattttatttggtttttataaattaaagatgaaaaattttccagaattctggaaactttcgattttcaaaaaaaatcaaatcagaactccgtctgaaagggagttttcacaaattaaaacacaagaaaaagccgcaattttttgcattacaaggggtattttattttatattttatcatagttttaaagtaagttttaaaaataaaactcattttggaattcggaccaaacgggggtgggtgtacatcagggctggccgtgatcacggatcacggatatccgtgattggaaattcaatatggctaccctggtgtacatagttttcaagtggataattttttttacaaaaatggttcggaatcaggtgaagtaaattatttttccgtattattttttcatgttgattaaacatttaaacgagttgtaatttagaattacctaattgctttttattaaaagtaaaaaaattttttgaaaaattccatttgtctcccagggggataaatggagactgggggattatttttcaaacccctcctagactgggggataattgaagattgggggattaatggagattggggataattagagaaaaaacggtatacaatacaaattcgatgacgtcagtattctattcttcacttttaccgggtgaaaaaggtaatcccagaagaaaatattaaaaaagaatttctggacttctctgctaagattttcctttttatatttattttggcaatttccttaacgaataaaatggctggaaaagtgaattgtctctttgattattgatatttattatttttacatggtgatttggttttattgatgattggcctcattcttatatttaattttgttgtgaatccttatttttgtttaatccatattactcgaggacgacttaatctatgacatgtccacagaataagtggattactcccttttgtggactttttcttttttttgcataaataaatgtcatcgttcatttttaacataacataaagctttctctcttcatggaaaacattttcaaatttaaactttctgcttaattactaaaagtactgctgaaatgagaaaattgtgaattatggaaataaactaaaagaaattgcacaaatacgacagaaacaaacattgaatgatgacggatgcttgtgcttgtgggctaacggaaaaacattcaaaagttcggttactttgccgctggaattgcactgtgaagtatgtcctattttcttcaaattggcttttgcctaattaaatgctaatcactagagatcgacctggacctggatccaggcctggatttttcctggatccaggtccaggtcattttttggcaacctggatttttcctggacctggattttcctggatttttgtccaggaaatccaggtcaaatgtgaaaaaaaatccaggtccaggcaaaacacgaaaaacctggattttcctggacaaaattttagaatttattatttcaagtgaccgatgtttttttcacgttttcaaaaagtgattaaataaattcaaaactcattattattgtaaattagaaaatgaataaatacgaagaaatgccgtttttttttcctcgtcaatttctcttcggaaaatgccaatccaagaatttatttatccaaccccaagtcccggggtcattaataaggctttgtggtattttccgaaataccaacccaaacgttgtcctttatttgtgaaaatgatccgccgactggccaaattaacgccacatccgaccacgtccccacgagcaaatttgcaagtgcctttctcccagtagccgttgatcaaaaagttgccggtgcttgcgtatgcgtaagtgccagaacggttcaaaagggacagcaaaggtttgtgtttgtcggcaaatccgaaaagcgcgaggctaacattggggaaaagcaaacaaatcattaaatcattatggtaattaagaataaattaaatacaaaagcacacactaaccgttttaactctttgagcgaaatttcaaagtaaaaaacgcctgagagattgtttttccatgaaatcggatgtttcgtgaagacggtgcgccaccctttcgaaaaattgtaattaaatacaataaataaattttaatttagcaaacagttcataaatataaaaaaaccaattaattgcgctgttcgagagtctcgagactccgcaaatttgggtatcggaagcactttaaattagcatatggcttacagtcgccttttccacatagtctgacaatcaaagattcgtccccactgatttggagatcattgtgacagaaagtgacgtcccaacaattttgaagcgaaattgaaacaatctttaaataaaatttaaaaatatattttatatttgaatttttatagcacccgttttcaacttttcacctcaacattagccaagtcgaaggtgaattttggcccaaaatttgccacaattttatcacatgagcaagccaaagaaacgaaaggaaataattggtgatcggaagaagaagcgaacaaatggatggtgtctaagtgttttaaaatttaaaattttcaaaaatttaaaacccaaatgttggccattctttgtgaaaatcagtttcaggttggccaagtcaacgccaaacccaacaacatcatcggcaccataaatgtattcggcgtttcttattttcaatgagccactaagccaaaaagtgccatcgctttcgtatgcataagtgccggtccgattgcaaattcgttctcccaattcgctcgactgtttggggcaaattccgatggtagcccagctgaaaattgtgaaaaatttaaacattttcggaaacctgcaaaaaaaaaattcatttattttgaaattttagagctattagaaaagacggattttatcaaattaatgtacaaaaaaccaaaaaaaaaaacatttttagccggaatttattttaagtccattaattgtcattgtatattataattttggatttatcgaccaccaaaataatgacgcaaatggtgttgttttgcaactatttttgacactatttaaacagtttatcactttagctctttttttttgctacttttcgtcatttttacttagggtgtcaactaagttttgaccctcgaaattattttcgagattttattatttttttaattgaacaaaacacaatcatgattcgaaataatccccttattatcaataatgagttgccatttttcaggcaaaagatcaatagaaatggaaaagttaattaggagctagagttgattaagtaaaaatgctcattttcggggtaggtatttttgaaggctgatttaaagaaaatgaaaatagatacagaggcagagaaaacttgagtgtatagagcaaagttaggactataaaaatacaataaagaaaaattttaattttaggtaaaataaatttacaaaataacgaatccttttcattttccaaaagccctgtaaaaaaatgcattaaccataagaacagctttttgctcaaccaatgctagatacaattcgttctttattcgaacctctcgtctctatagacttttacctaaagagacgagattactaaatccaaatgagtttgccaaacttcttgaaagatctgatctgaatttgttgatttctttgccaccccagctccaaaagtgaccatttgtttgttttatttgatattgtttcattatttctttatttttcggcgtcacgcttttgcgtataaatgattgattgacaagcaatgccaaagtttgccttaattttgtcgcccgatcacacaatgaaacgcatggaaagaacggaagatgatcagcagaagaggcagaagtaggggcaacgaacaggtttaatccatcgaatggccaaatggacgcccattccgacgaaatcgccgtgcgaaaatttggcattttcattcacccagcgggaactattcccccaaaaatagctgtcgcttgccagattcactgttcggcttgcgcattctgcgaagacagagcgaaaatcttgaaaatattttattatttcgaacgaaataatttatattgatagacattatttataattaattacaatttccaatttataatggactgacaaacattcggagccaacgatttcgagatcactgtgacaggcatttgaatcccaacgattttgttgttgcataattggaaatatctgaaaacattcattttttattattataaaataaattaaatatatatatatatatatataatttattatttgaattaacagttcacctcgtcaaagttcagaagatcacttggataaagaacaccctctgaatgaagaaaaaatttaaaaaaaaatttaaattattccaaaaagtaatttaacattatttttatttacaatttccgcaccgctccttcaaaatgtcgtaaaattttccaacactgcaaatttcgccatttctgttcctccaaagttgtgatttgtgcctgcatgtccttcatttgttgacccaattgaaaaattcaaatattttgataagtaatcattttcaaaaaattgtcgtatgctaatgatccgctaaattacctcattaactttttaacaatgttccgccgtctgttgttcgttatgctgttgcaaaaggcgaccaaaaattatctgcagacaattttgtaggtctgtgaattgatcgacagaaactaaattgatacatcaatcgctaactttacataatgaattttaaatatattaaaattaaatttcaatgtcaattttatttttgatttctcaacataacaagtgatttttgattattttgccaaatcagtaccgtatttttcgctttgatccgccgtttgtttccttttgtccgattcactgaacagtttcaaaattgcctcaaattgctcccacaaactgaaaacacaaatttgcactaactgacagttttccttaaatgagaatacagtagtcatgggtaaattaacgtaaaagaaaatttaattccttttcctaccatgtttctccctttgctgttagttttgcccgcaatgcatcgcgttcagccactaatttttgtggttcaatttaagtgcactctgaatgggtgccaaattgaatttttaaaaaattaattgtcgccgtgattagagcttaattaattgcttgaaattcttatagatgacaaaatccttcccctttcccacgttctcgtttcgcttctgatgagtgatgatgtccaacaaatgtttaaccctcgtcagttccatttccgccttctcagtctcttcacgcaaaagctataaaaagggatttgtcagctaatgaatcatcacatttttagcaaatggtattcgcacacacctgctgaaaaaaccgatctgaaaattggtgtgaaaattattataaaattaaaataaagttttttgaataatttttatatgttttgctacctaaaatgcgttaataaaaatttttttgactatttttgtgcctatt

SEQ ID NO: 383 - DNA, 3666 bp, Heterodera glycines
ttaagaaaatgcattgtattttgtacttgtaattttaataccggaaaacatgtattttcgctttttccagcatgtttaaaaatgtgatttaataaatgaaaacattcctcagcgtcggattgtggaaaaagattattttttctcaaaaatttaactcaaaatttcaaaatttggtaattttttggtgtaaatctgttaacaaatcacacacaaattttcaaaaattttccccggcggcgcctatcggcaccgccggacctcgccccccctgtacctcaatttttttttgaaaaaatgcgccattaaaaaagttttttgaaaagcaaacaaggtcgatttacatggcgacataattctaagctaaaataaaaaaagtaaaatttttttaaaattttattaatcaaaattccaaaaattttgaaaaaagcccgggcccggcgggcgcccggcaaaaattttagaccgggcacgggacgcccggtaaaacggtttttttttgaccgggcggcccgggcccggccaattgtcgaagcccgagctagggcccggtcccggcattttcaaaattccgggctctactatttaatgcctattttgcgattttttgtgcctaaaaatggaagccctaatcataatacataatgttatagcttttttagagataatattggactatatttaacgaaaatttgaattaatgtaaaaattgaacattcttaaaattccaggaaaaaaacagggcgcaaaacgaataatcgcttgaagagttgcagcgggctaattgaataaaacaaaaagggaaattgttatgaaaaagaggaattaataggtaggtcaattaatttaaaagatttgcggctaattaatgtgtcaaaacagtaaaggaggagcgaggacaaagaaaatttagtcgaacgaaatgtcaagtcattcatcatttttaaacaaatgcaaaaaaaatcactgaactttcaatttgggttgtccagggctaaaaagtgaaatggaatgaattagcaaaagattcgattcaaaaatgattggatatgtctttttgccactcgtcgactaataatcatcaagggtatgatttttagagagggaaaacgcaaaataattaattaaatagtggagaaattgggaaaaataaaaataataaaattggtaaaattttaaaataagtattatttctacaaaagaattaaattatgtaacaattttttcactagtttcaataggaaaagaataaaatttactcgtttttgcataaaacgcaattttttttcttagatcgaaaaggcgcttcttcaaatgcttttcattatcaaagtctttttttttgtcacaaaacacttgaaaatttttgaaaaaatttcaaatgaccgtccttgttaatttttttaatgtttaaagcccaaaatagcgacttaatatttaaattttattccgattccaacaagctttatttgactagaaaagttcatatacaaatagagtaaaagtatatgacaaagagaaacagagaagcgaaagaaaagagataaagggaaggaagataaatgatttcagcgaagaagaataaacagaattattaaattattattgaaaattttaaattctgaaattaaacagagcggtgggcgcctcttttttgagtaagataatgaaaatttgagttagccaaagatgaattaagaatccaatttgcaacgattcgaaacttgaataaaaaaaaattttaaaacattaaaaactgtcagaaatattgaatttgaatttatctgcatgcccaaaaacaataaaatatttgccaaaaattgaaccatttattatttatcaatgaacggatgatagctctttgtttggagtatactctaattaattaattgttcgaattattttaccaaagtcctttgatattaacaaataattgctttcagttaaatgtgcatattttatttgtatttttgttataaatagttcatagaaaaattatttaaaaatgcgtcaaaaagaaggtatagaaattttgaagcgtttagcatgccatttgggttggataagaaattgataaaatgaattaaatgggcaaaaaatctcattaattacttttggatatttaaatattttgattttttgtttttgctttaatcttttataaaaaatgaaaaacaatagaaaagtttaattttttacttgaaaaaattaatttaattaaatgttgttttttccaagttggtcctcccagttccaggtccccaggcttctggccccggcaaatccctgttctggtaactgttagtactcaatccgtcctaattatttcaatttttgttcaattacaaaatgcttctaccacaaataagctcattaacataaatatatttcgcacaaaaataaataattgtccgtcgctgatttcgccactgcttcatcacattgcttctcacttcaccaatttatgtagtacatcaatggaaattgacaaaatcacttttttattccaataaatagtgcttatttttgttaaattacaaaatgcttctaccacaaataagttcattaacataaatatatttcgcacaaaaataaataattgtccgtcgctgatttcgccactgcttcatcacattgcttctcacttcaccaatttatgtagtacatcaatggaaattgacaaaatcacttttttattccaataaatagtgcttagttttgttaaattacaaaatgcttctaccacaaataagctcattagcataaatatttttgcacaaaaatatgtgtccttcgctgatatctcagttggttcatcacattccttctcacttccccaattgatgtagtgcatcaatgggaagtgagaaatcactttttattccaaaaatatatttttttctttttaaaaattgtttggaaaatgttatagcggcccaacgacaaattatcccatggatctaaatcccgtaagtacaggatagagtcatcagcaccgccgaaattcccttaactcaaaagtttttttaagagaatggtaatatgcggacatgaatgttctcatattattggaaactgtctgggctctgatggatttgaatttgatagtgtgcgtttgactttgaataacttacgataaattttttttattttctgccaataagtaagagtgccgagttatgacgtgccaaacttttttagttaataaataaattaaatatttatttgcatttactttgagtgcccagtggtgtagcggtattgcgccagtaggcgtcttttaatccccaggttcggttcccccacatgcattcttttttttttttttgctttttggtccaagtaaattatcaaattagtttataatacaagattttatttttaattttttaaattcatttttatacataaaatactcaataaaaatattagacaaaaattttttttcaatcgacatgatatttgtgcatttattgcatctttatgtttaattacattttttaattttaattaacaaaattaaaaaagattttgttttataaaaaatatatttaataatctactttgcataaaaagcaaaaataaaattgtaaaatgtattagcatgtaaaggattcgaacctgagacccaaaaaaagatttgactaacgcactacccctacaccaata

SEQ ID NO: 384 - DNA, 7087 bp, Heterodera glycines
  unsure (1)..(7087): unsure at all n locations
aattatgtaacaattttttcactagtttcaatagaaaagaataaaatttactcgtttttgcataaaacgcaattttttttcttagatcgaaaaggcgcttcttcaaatgcttttcattatcaaagtcttttttttgtcacaaaacacttgaaaattttgaaaaatttcaaatgacgntccttgttaatttttttaatgtttaaagcccaaaatagcgacttaatatttaaattttattacgattccaacaagctttatttgactagaaaagttcatatacaaatagagtaaaagtatatgacaaagagaaacagagaagcgaaagaaaagagataaagggaaggaagataaatgatttcagcgaagaagaataaacagaattattaaattattattgaaaattttaaattctgaaattaaacagagcggtgggcgcctcttttttgagtaagataatgaaaatttgagttagccaaagatgaattaagaatccaatttgcaacgattcgaaacttgaataaaaaaaaattttaaaacattaaaaactgtcagaaatattgaatttgaatttatctgcatgcccaaaaacaataaaatatttgccaaaaattgaaccatttattatttatcaatgaacggatgatagctctttgtttggagtatactctaactaattaattgttcgaattattttaccaaagtcctttgatattaacaaataattgctttcagttaaatgtgcatattttatttgtatttttgttataaatagttcatagaaaaattatttaaaaatgcgtcaaaaagaaggtatagaaattttgaagcgtttagcatgccatttgggttggataagaaattgataaaatgaattaaatgggcaaaaaatctcattaattacttttggatatttaaatattttgattttttgtttttgctttaatcttttataaaaaatgaaaaacaatagaaaagtttaattttttacttgaaaaaattaatttaattaaatgttgttttttccaagttggtcctcccagttccaggtccccaggcttctggccccggcaaatccctgttctggtaactgttagtactcaatccgtcctaattatttcaatttttgttcaattacaaaatgcttctaccacaaataagctcattaacataaatatatttcgcacaaaaaataaataattgttgtccgtcgctgatttcgccactgcttcatcacattgcttctcacttcaccaattgatgtagtacatcaatggaaattgacaaaatcacttttttattccaataaatagtgcttatttttgttaaattacaaaatgcttctaccacaaataagctcattagcataaatatttttgcacaaaaatatgtgtccttcgctgatatctcagttggttcatcacattccttctcacttccccaattgatgtagtgcatcaatgggaagtgagaaatcactttttattccaaaaatatattttttttctttttaaaaattgtttggaaaatgttatagcggcccaacgacaaattatcccatggatctaaatcccgtaagtacaggatagagtcatcagcaccgccgaaattcccttaactcaaaagtttttttaagagaatggtaatatgcggacatgaatgttctcatattattggaaactgtctgggctctgatggatttgaatttgatagtgtgcgtttgactttgaataacttacgataaatttttttattttctgccaataagtaagagtgccgagttatgacgtgccaaacttttttagttaataaataaattaaatatttatttgcatttactttgagtgcccagtggtgtagcggtattgcgccagtaggcgtcttttaatccccaggttcggttcccccacatgcattcttttttttttttgctttttggtcaaagtaaattatcaaattagtttataatacaagattttatttttaattttttaattcatttttatacataaaatactcaataaaaatattagacaaaaattttttttcaatcgacatgatatttgtgcatttattgcatctttatgtttaattacattttttaattttaattaacaaaattaaaaaagattttgttttataaaaaatatatttaataatctactttgcataaaaagcaaaaataaaaattgtaaaatgtattagcatgtaaaggattcgaacctgagacccaaaaaaagatttgactaacgcactacccctacaccaataaattcataatgcaaagaaataattatttcttttctttaattataaaaagatgaaaagtttggcatgtcataacttggcactcgtgcttatttggcagaaaataaaaacatttttcttaagaacccatgggtgctatatccacccaccaagtctcattcggaaatcccacggacacctggggacctttctttgtgagtatatttccgagtttttggggatgatgatcacgaattgacatattttttgcaaaatacagttaaaaattgggaaaattaacctaaaaggcattcctgaaataaaaaaggccaaaaaatttatttgacactgcaatacttgtttcttttaggcatatgtgatcgatgccaacaactcggctgccgtccattggataccaaatgtcctcactgtacaacagttgtggtcgtacatggatcaaactgagagggtttctcagacgggcttttcgtaataactttatttaaaggattggatacaaatataattttttaaatattaatgttaaaatgagacttttagagattttcaaattttttcaacgagagctttttgaattagagaaaaatgccctgtttttcaatccctcggtaccagtgagctcttccgggcattatttaaatttggcctccctgttcgttagtagaatctgccaaaagttaaaaaaatgattaaattagtaattgtaataaaaaaaaattagtttcgcgctagctttgcttacgtcagtcattggtattcaatatgatgccacatttttctttgttaatgtcttcatcccctatttgcgcgtatttcatttatgggcatggcattttttataaaaatatttttttatttatgccattatatatctatttttacatcagatcattattaacacataaaaatttttaaattttccatagtaagaaactgctttcagcaccaatgcatgggtttggcctttttctgtcgctactggcggcaataaatttgtcgagaggtcaaattggtccaaaggatgaaagcaaaaaaggtttgaacaatattttcaataaaattttaaatattattttgttttgttttaggtctttttttgatggccaacgaatttctcgagacagggaaaatgcttctcgacgaattcccaggaaacaaacaggcggagaataaatctgatgatggactcaattcacaaaaagcgaatggaaaggcattggaagagaaaagtgacaatttccagcaaaaagcctttgagtttttgtgtggaatcgaaatgaaagcaaaaaatgatgagaaaggaaatgacaaaacaaagaaagatgacaatttgttagcttttaaagaattagaagaaaagcgactcaatttttgtcaaaattggaaaaatggcaaaagcatttggaaaggatggaaagaggcagggatttcaatagtaacatcagtgaacaatttgaaactgaatcagcaaatatacggagaaagtcttcgaacattggcgaaaatggaaattttcaacagcaaaaacaaagaagaatttggaaattttacgaaatttggcatcgatttgctaatgaaagtaactgaaattcttaaaggtaaccaattaagttattctaaacaaagaattttattccaaatggggtaattaaacatttaattgaagatgcgagaattagttcactggctctggctgatcagtctgatcatgaccaacggaaaggcaacaacacatcacgacgaaggaaaagggcttttcatgggatttttcgccgagagtttagcttggaaaagtgttttctgtacttgctgttgacttgcatgtccgccggccttggcactgacatggtcgttcgtctcgcccagcacaaagtgcgggtcgtttcatttggcaattcggcgcctccgcctcccttttctaccgaaggccatcacacaaccccgcttgaaggatttgagattttcgtagctattttttgctttcttaccactttttagttttccaatgacactcaataaatttttacgggaatttttaaataatttacaaaagaatgccaaataaaaaagtgttttttcatttcaataaaaatgttaaaatgaaagacaattaattaattatatgtttttaccaagaatagtccaaaaaactgagaaattatttattataatagcacggcatcaatgatcaccaaataattttctcatttaattctatgtaatgaccacatacagtgcccccaaaaaatcttgaaaaatgtaataaaatatgtgcaaaaaaccaaaaaaaaggcaaaataagaaaatgcaagaaattgatttttaggggtgtatttttcaattttcttgttttttctttatagattttccaaaaaatgccaaaagaggtgctaaaattccaaaatcgcccaaatgtgtgcgagcgccaaaaatgtgtttttatgtatttataagtcgctctaaatcaaaaaattgttcgttgaaaatgttattttttggcttctctcgccaaactaagccgaaaaaaaagtaaaaacataaaatccggtctctactgatgaaagatatctgtttattttaacataatgaaaaattacagttccataacgattgttaatgctgttcaatgagtgggttccattcagcatgtgaatttttcaaaatttttaagctgaaaaaaattcaaatataatatacgttgttaattacaattgtactttattgaatatttattgaaaaactctcatattctaatggggggattaaacgaaataaaaatgaaagacataagtttagctagccactaggataaacacaaattttatttatttgctttaaaataattaatttttttcaattgtcctttattccaacgggaccgggacctgagaggaccggtaacacgaagaaattctgctaaaatgaaatgtgattttatttcgctgataattgaagttttaatggaaatttttttaaaaaaatgagataaggataataactagggcccggatttatatgctggacatccaaaatatggacgaaatatggaccaaaacgttgaaatatggacaaaaaatacgaaaaaatggacaaaaaattctgaaaataggtttgaatttttgaaaaaaaaattctaaacccataaaatttctgtcaagaaaaaaattttaaaacaggaatatagaattagataattgagacctcttatttcttaagtacggagaaaaaattgacgtaatttttgtaaaaaaaaaaaaaaaaaaaaaaattttttttcgcgatattttctcaaaaattttcctaatttttggtatttatttcaaaaatttttgattttaaggacgttccaaaaatttccatcgttaggagttcctttttcgaattttttgtggaaattcctaaataatgaagtaaaatatggaaatatgaacaaaatatgaaagatggaaaaatatggaaataaaaagacatccaatgcatcaaatcaagctaaaaatactatttacttcatttttaggccgaaataagttgaaaaagaatatggatatacataaaaatccgtgccctaataataaccaaagtttaaaaaaataaacccatacaatacaatttaaaatgaaattacattaatatttttatttgatcgctttttcataaatttcaataatcagaagattccgtccaaaactttggttgttcgccgatcgtttcgcgagtcaactttttttccattctcaaatcggcatcgtcgtcccctttattcatcggcaaatgttcctccccaatttgcacatcgtccatcacgtgccaagggtggcgctctcgtgccactttcggcttttcctgttaaatttatttatatattttttaaataatatttaattaattatttactttttgttgttcggctggcgattgtttaccctttaattgcattttcaattctccaggttttatgtggccattacaatgcggacacaccaaatgttcttctttctgttttccttgatcagcagtttctgcggcatctgcaaatttaaaaataataataaatttcgctttaatttattaaaaaatcaaattgtttactcttcatcggttgtcccacaataaaatcactgagaaaaagtgcaaaaaatggaagtaaaatgcatggcaatttaaacattttttgaactctttaaaaatttgtaaaatttttatttggtaatgatttatgcagaaaaaatattcaccccaacaatttaactgtttttacgacgattttcctcctcttttagatgatatctgctggatactgacgggccggaaattaatcccaacgcatttccggccttggaaaattaattattcatttataaaaataaataaataaataaagatatgcaaattatgaaataattacatcatcaaatattgtttttatacgtttttattattattaacgaattcttgaaatcaaaaatcgggggatccatttttggaacactttttgccatgtaacttttttatagagcaagaataaatttgtccaaaaacttcatgctatttgggtcttcgtctagcaatttcgaacagaataaaactgcgcccattaacataaaagacccgacaaatcaaaaaacgttccatttacattgacattttagtgatggatatgggggcggctcccggacttttcgacagtaaacataaaaacaaataattcttattnaaataaattatattgcttgtcgttttttctaaatttcttttaaattaacatactaatatgtattgctaaatcagaattactagcgatacgtttattacgttttttacc

SEQ ID NO: 385 - DNA, 2607 bp, Heterodera glycines
tccttcgttaatttttcaccaaaccaaaagggtccaattcctgcccaatcaaatcgcccgaactatattttttgaattcttcgtcaaatgtagattcggtttgcactttaaattttgtatgtgttataagaaaaatcctttaaaaattccaaaagatttgcttgttgaggccatttctgacaaggaatcaagtaatgtacggcgttgtttgggaggaggaggaactataaaaagcgacgcagttttcaatgtcttcaccccaacccccgtctgtataaaaataaacaacgaaatctttttgattaaatctattttttacaacgaattcatttagcaaaattttcgaaatttaaaatttttgtggcttttcgtgatttttaaaatccctcatcgaaaaccaatccgggtcatatttatttccctaatttataaaaaataattaatgcatcctctttttgatatttaattttaaaaatatttttcactgtaataattttatttatttaattttaatcttttccattttttcacattaataatccatgcataatctaagcgtgaccggaaaatcggtcagtggaaaatgcgtcagtagaaaatgcgtcagtgatgcaaatattttaaaataaaattctatggcattagtattgtaatatagaagtaaacttctataagaaaatcattctcaattgcgaaccccggacccaaactcgaacaaaaaatcgaaagtcaaaattttcgaaattagtgtttttcttcaaatcggtttaaatacacagaaacaaactgaaatacatcaatcctgcaataggagatcatttatgccgtttttgaacaaaaaatgcttaattcgaaaatttagacttgcaacttttttgttcgaattcgcgtccggggttcagaattggccgaaatggataccagattcgtggtaagtgcccccgaaaacgcaaggaacttgtttttatgacaataaaattttcactgacgcattttccactgacgcattttccactgacgcattttccactgacgcattttccgggcgcctttttatttgatcgctttttcataaatttcaataatcagaagattccgtccaaaactttggttgttcgccgatcgtttcgcgagtcaactttttttccattctcaaatcggcatcgtcgtcccctttattcatcggcaaatgttcctcctccccaatttgcacatcgtccatcacgtgccaagggtggcgctctcgtgccactttcggcttttcctgttaaatttatttatattttttaaaaataatatttaattaattattcactttttgttgttcggctggcgattgtttaccctttaattgcattttcaattctccaggttttatgtggccattacaatgcggacacaccaaatgttcttctttctgttttccttgatcagcagtttctgcggcatctgaaaatttaaaaataataataaatttcgctttaatttattaaaaaatcaaattgtttactcttcatcggttgtcccacaataaaatcactgagaaaaagtgcaaaaaatggaagtaaaatgcatggcaatttaaacattttttgaactctttaaaaatttgtaaaatttttatttggtaatgatttatgcagaaaaaatattcaccccaacaatttaactgtttttacgacgattttcctcctcttttagatgatatctgctggatactgacgggccggaaattaatcccaacgcatttccggccttggaaaattaattattcatttttttcaacgaattattttttataatggaaaatattttaatttaaactcaaaaatgtcaatttcgaccagttcaacaaatggtgatttcacaccatcaataggtggaggaggtaatgaaatgggaaaaggttgaaaataaatggatttttttggggaagggagtaaataaatattataattaaatcagggaattaaatttataaattttcagaagttaatgacgattcaattagtttggatgaagattggcaatttgatagaaaaaatgaaactgttgctgatcggcaacaattgctgatggtgggcaatgaaagaagcttcaatgaggcatttacatatatttttcgacaaaattatttatttttattggaatttcatgaaagttatgctaagaataaggtggaaattgaattcaaaattaccaaacttgtacttgagaaggtaagttttacaaagaaaagttaaaaaatccccatttaacgagcagcagaaaaaccattgattttaagcgggacaaaatacttcgctttttggagctttgcttatgattagggttataagttgtatgcattaaaaaatgccaaatatgcgcataaaatatgcattaaaaatcccccagatatgccctaaaaacccgaaaaatgcccaaatatgcactaaaatatgccttaaaaaactgccaaaaatggctttgaatcctcaaaaaaatgccaaaaattatgtaaaaaattcagaattgactttaaaaaaccaaaacaatgactaaggagcgtttttagacaattgcaaaattttttttaggatatcaacaattttttttcaaaagttc

SEQ ID NO: 386 - DNA, 1832 bp, Heterodera glycines
catgctgatttcgtgctgaatttagcattttttgatgctgaattaagtgcttaatcatcattttttggtgatgaaaaatccggtctttaaatattagtaaaaaatattttatttgaatttttgcttaaaattttgaatttaaataattaagtgattaaaaataatcattttaaattagttttaatgagcatacatacaatttttgcgaaacttgagaacttttttaaaaatttttaaaggacggcggtgccgatgggcgtcgtcgggaaaaacttagtaaattttaactaagaaaaatttcaatttcaaaattttcgtcggcgaccctcccccccccccctgccctacctcttttacaccggcctttttctcattttccaaaaatttttttcgttttgcattcatttttgttacaacaaaatgatagattttattttttaaagcatccaatttttatctcttttttcaaaccacaaaactctctctctctctacgctgtagggattaaaatgtgtgccaattgttgtacagcaaaatgtgcacttttctgaacaaagagtgccgtgccggcacggcacacgacacccctcggggggagggaggagcttttttgtcggcactcaataaaaaatgatgatgagatttttgagtttagaggggaaaacggggaggaaaaattgttgtcctgctaatggatgatgatgatgtgaagaatgggaaaagcattcaattgacacacttttagtgggaatatttttttcgtgaaatgcgattttttgccgcgtttttgactaattttttacaaattttcattttttctatcattcgatagcccttaatgttttttactagcatgtaaaatatcaaaaattacgttaaatttccaaaaagttatgccctaaattgctcaaaaaacttggttttttagagttttctggccataacttttctgaaagtcaatgaaattttttaaattttgcaggtgaataaagacacttcttaaggctatcaaataaaaaaagataaaaatttgattactttttgagcaaagctaaattattttttgtctcaacttttgaccattaatcatttttcaataacgcccattttgatagttttggttattaaataacgtgacccggcaccagggctgggcgtaattacggattacggaaaacacggcgtttttggaccccccataatttacggattccgaatttccataattaaaacctccagttaatcccaggcttgtccagcaccgctgtgttttagggggtggggcggtggagtctttgccctccggcgtgttttgcaggcagcggtgacggctggcacaattccccccctgccgccgtcgttgccgtggggggggggggagggggtaattactgccagccgtcctgccgggggcagcttttttcttctgttgtgcttcttccaccaccagacacactatcatttttcgccgtcgttttagcaacgcttttgccgtcccccgcccctccggtggtgtaagtgagtgaaataagtgagtgagtggctcagctcatctccatctcatcattcattcattgccgctctctttttcccccggggggaaaatcgtcaaaacgccaaacccgcggccattcttttgtttttttttgtttcatttttaacttatttgtaagaaatgttccagttttgggtactgaccagaatttgttcatgtaaaaattaactatatgtcatctctgggccccaaatcccatttcccataaatttggctgaaaatccacaaattggacaaaatatgtaaataaataaattttaattaaattttgaaaaaa

SEQ ID NO: 387 - DNA, 1633 bp, Heterodera glycines
gccgggggcagctttttcttctgttgtgcttcttccaccaccagacacactatcatttttcgccgtcgttttagcaacgcttttgccgtcccccgcccctccggtggtgtaagtgagtgaaataagtgagtgagtggctcagctcatctccatctcatcattcatcattcattgccgctctctttttcccccggggggaaaatcgtcaaaacgccaaacctgcggccattcttttgttttttttgtttcatttttaacttatttgtaagaaatgttccggttttggggtactgaccagaatttgttcaggtaaaaattaactatatgtcatctctaggccccaaatcccatttcccataaatttggctgcaaatccacaaattggacaaaatatgtaaataaataaattttaattaaattttgaaaaaactgcaaaatagatgttaattttttgattaaatcgtatttaaattttttatctcaaaatcttattttagggctgccttattttgaaaccatcagatacattctaaatatcttttaattactggccaaattatccccgaaacgccggggatttaatctcagagaacggggaaaaatccccgaccaaattatcgaggattgtggcttgtagaaattaaaaatgtcaggagaaacaatttaacgctaaattaattatttttttttttttttgggatgtgtgccaatggcgaattaattgcttttcattcttttaatgaaagggcaaattcagccgtttttgctaaatttgggcggcattggcattttcgtaagatgttaaattagtttttttactttaaaatgttttaaggggactggaaaatctgtttaaaattatttattttaaattttattttaaaattcaattaaatctattccacattaaaatgataattaaattataactattttcctcttaattagcatttttccgcaccgttaattccaatttttgtgccattttcagcccattgaatttgtttaatttaaatcctataaattattttagaaataaattgtaaaaaatggagcaccacgccaacacatccatcgacgacgcactgctcgtggatgacaatgaaaagcagaaaaggctgttcagtgagttttatgggaaaatttgatcagatcagagggaaatagggaagagacagagagaataaatattagcaaaaatcgggagtctcgagccggaaaatcccggtagaaaaggcctagaaaatttggaaatttttcacaaaaatgtataaaatgcgtcaaagttagtcacctttttcgtgtccggcactgatttattatgtcaactgatcagtaaagataaagatgctttcttcaattattacacatcattaaataagttagtctgaacaaattccatagatatgatcggaacaaccaatgaaaagactgactgttctgatcatttatcagtaaaaaatggagaaaattgtgaaagtgatagctgatcgagacaatttctatttcccattttgagaaaatttgtgtaaaaattttctatttttttcagtgctcggcctgttcatattgttttgttgggtgggcgtcataattttgtgtgcttatccccaggttaataaaattaaaaatt

SEQ ID NO: 388 - DNA, 7071 bp, Heterodera glycines
tagagtccggcgggatcgggactcccgcggggattttacgggagttccccgtccccccccggcccccttttttcggtgaacgggatttttaacgggagcgggatttttacgggattcccgttcgggactcccgtcccggaaaattttaactcccgatcccgctcccggaaattttttttaccggactctagtattgaggtacataattttttaaaattaaaaagattagtaaaaacatgtaaaaattgaaaaaaaattaatataaaagcggctgctcctccgccatttttcattattcattcgccattttcgtctcttcaatttttctccctgacaatgccttcaaaaatgacactttgtacattttgtgcatttcttcttggctttttcccttttccttctcattttttagtcggttcgttgtgccaatgtttgtcgggtgttgtgccattctttggctttattgggaccgcttcaaaaaatcaccaaaacaactaggcgatcaaaataagaaatttaaaaaaaatgggatttaatttttcagttgcatctccggcgaaaagagcaagttttaacgacttacatattacacaaaaatttgcaaataaataggacccttataatgggaatctgctaatttcaccaacattttcaaatgcttaaatttttctgttttgctaagctaattgaaatccgtcaaaaactgtgcttaataatttgccacaacaaaatgtcagacaaccgaaaagaggcggaggaaaagatggcaaaagcaatgtaaaattaaaaatgccaatttttcaatttgaattttaaattttgttttccttttttcagcttcatctccggtgattgttggctttgtgtcttcgatttgctgccaccttctcaacttggccttggaattgcgctgatcagccaccgatttgacttttacgtggacgaacacttcaaaacgcgcaaatggacgctgaaacatattcaaattggaagcaaaattggaaagaatggcacaaatgaaatggaaattgtcaattctgattggaaatcgatgccaattccgcaaaatccgttgccaaagaaaatcgtcggattcgaacgcatcgacatcttgtaaaataggcgattatgcaaaaagttcggtaacacttcccattcattttcagattcatcgaccgaaatgccatcgcttttttccaccattttcgtccaatttttccaatcaatttggccatccggtcgatcatgaacaataaacgcaatatggaattgattttgcgcaacatttggccaatactcggaaaaaacatttatggcatggaattgtccgccttcattttccaccgtttgcgcaaattcgtcccgtcttttctcaacgattgtccatcacctcgttttgtctctttcaaccatggcggtctcttcaccaagtttccggccgatgacagtgccatggcgtcggatggacaagcattggccaaatggcttttgactccccactcaacaaatttgccaaaggtgttgaaatgcatggtggacagggatgatccgaatttggcgtcgaagattgaagcgttcaaagcggtgctttcatttatcattgcgtctttcttaatcaatttttcaatgttttaggcatttgccaattcttcgtctcctaccaatttcatcatttccgtttggtttccgcgaccttttgctgactccgttgtgccatttgatctgacaaatgaattgactcgggaacaattggcgttcaaaagaacaaacatcagccttcattttctgctgatccgttgtccaattgcgcgagaggcgagcaaatggacgaaatgggaggaggaagcgattggctggcgcattgatgatcaatggaactttattaaaattcatgttgatgctgataatgacattggggatgggtcagtgaatgaatgctttattcaaaaaagcaaaatttattgccttgcctttcactttttaggcttctcaacgcaatgatcggcccgagtgatcagcagcagaagtgaatgaatgaattgcaaagaagtgatcgatcaatttgaatcttggagttgaaaaagtgaaaatctattttgacgtgctctttaaatattctttttttttttgtttaatgaccaacttggatttgttttgtttttttgtaataaaaatgagttgactgctggtgaataaaatgtagcggaaacagtcaaagaaaaatgtcgccagattttaacgatttttgcattatttttgggttaaaagcgcctatggtaaggtagggggcggggtaatttcagtctgagcgcccattaacaagaacattaagtgccgatttaatgcagattttgcaattttatttcggtaatatttttgtttgtacccctatttttcgaaaaaatttaaaaaattgtaaaacgcttttcctgggcttttcaaggtcgctgatcacgaatctaaccgcgtcaggatcagtcagctgacagacaactcagctgttgggacaattcggttgatggacaactcagctttacgagaatttacaaaaggcaactcgtacaatggcttaggctacgaagcgggtcagttccgtctcgccagttccgtcttagtagtaaaagagccggttccgtctcaaatatttttggacccaaatttttttaaatttcagaatgtaaacagaaagttgagatataattaatagtgctgccaaaaatatgcacgaaaagtagccaaaatatgcatatgcacaaaaatctcgaaatatgcaaaatatgcaaataaaaataccgatttttctacgcaaacaaaaaaaaaacgtgtttttcctattatttatagcatggaaaaggcaggaaaaaaatacatttgcatgtttttggcagccctgatatttaatatgcctaatatttttgggtgttaaaaactaaaaactgccaaaatatttaggttttcggttctaaaaacctcaaaataggtgttaaagtttcaatttaggggtataaaataacaaaatttttagaggaaatttttcattctcaggggtgtatttttgaaaattagacgaaatttatgtaaattaatctttatattcgggttcggggtccaaaatgggtgccggattcgctgcaaaagtgctggacacattaaggctgctaaatttcccgacacgaggaccaagactgagaatcccgagcagaattactggacatttgcaatgttaaattcatttcaaaaaatttttattttcgaatatacttttaattaaccacaacttttaaaaaaccaggtatatttaggctgcggtaggctgcgtagtaaaagaatttttactttttttctaaattagttattgattttaaaaaatttgagtctaaaaatatttgagacggaaccggccctttgagtactaagacggaactggccagacggaactggccagacggaactggccagacggaactggccagacggaactggccagacggaactggccagacgggaactgacccctactgtactgatttggcctaattattttactttttgaatggtgctatactttttcgtcagtaagcattttcgtcagtgaacgatttcgtcagtgattttcgtcagcggataatttcgtcagtgaacattttcgtcagtgtactatttttatttattttgctgttttccatttttttcgtcagtgttccaattcgtcagtgaacattttcgtcagtgactatttcaggctcaatttttatatatattactttctttgtatatttttaatagctgagaatttattttattcaaaaatgggcttaagcaccataatatataaaatttgattatttttcaccacaaaaaacttaaatatttaaatgcctatttactttcaaatgaattcgacagtggtaatttcgtcagtgaatttgtgtttttaaaaaatgattaattcaatttaaaagtgcaaatggtaagcacaggcccgaagatattcaagcggatcacggtttccaatgtcctggaaaagagcatttaaattgttgtcttgtctgacatatttcccctttcttgctgcgtgcggcccccttattccatcagcaggcgcaatctgataatcaataattcgctgagaccacatctcatcttcttcaatcattttccggacaaaaccgctgagtcgctgatttcctttaagatgggcattccaaatggcatgccagccttcaaggctgttattcgtgcgtgaaagtccaagtgccaaacggtctgtcatgttccacaattgtattggaaaaagtgcatcccggtgtgccaaattcaatgcttcaattcgttcacggatccaaccgtcggcagccgcacccatattaccgcccgcgtgatcgacaagcggttcttcgttttcaatgacatggcgagggccaatccatgtcattagaaaataaagaatcaattctaagcgaaaaaataaatgaaaacaaagaaaaatagggaaattttgcaggagttcatcataattagggatcggattcttaagggtgaaaaatcgcaaaaataaggacaaaaaagtacaaatttgggggtataattttttaaattgctttttaataagaaacaatttcaaattatggcaaccaatcttattcattgttacagttgcaaataatttatatttgaaatttagaaaaataaataaaaacttaaaaatccgatccatattcataaattataaaatttaattcgacaaaaaaataaccctgtagctcagctgttggattgagggttgacaccacaatgcaaaagtagttataaacgaggccaataggaacaaatgccaatgcttgcaatgacctacggtgaaataaggctactcataaacaaacaaattttacaagcgaatttttcccatttttataacagtgtttttgactatttataatattgtcctagccctgacctaatgcttcgttggaactcaatttcctgaaggtattgggtgtgtaggttttggagcctttggatgcggcggtaaattgcctgcccaaagtgaaaaaggcagccatttcggattgcatttggaaaaacaattcgagcagaatgaatggctgccgattcaaagtcactcattagcctttgcggcgaccaattgttgccaatgctgtctctgattgcctcaaagaaacgtacatatgttgccccctccttatttggcaatagcccataaacgcatgggactgaacaatggtcgatgattgcgctcattgtgtacaactgagcaaatccccgcgggcatgactttaacggttaaaaaacagtaattaaagaaaatggtaatatttttacttcaaatgtgccatcaatggcacattcggtattgtattgacgtaggatttcgagagcatgcgctgagcagaagacaatcatccgatgtccatttaaaatttggttgaaaatgacccgattttgaagagcattgggaatcacaatattttcaattggcaaagcatcaagaccaacatcaccgaccttttaattttagttattaaatttagttatttaaaaaatttttatttaaaccatttacactaaaatacacctcttcgtgatgctttctctttgctatgttgaatttatttcgcatgtttacggcgcttggtgcgtttacacgcacatcgaccggaagttcagcccgaacatttcggacaatgtttcgactggttgtcggaaaatcacttcgagcctcttggcgaatttgctcatttgcctgtcttatctataccaaaaatagatggtttgcttttttggcttacattgagttggccaaaaactgcggcatggttgtggtcggctgacatgcgacccatcttgtaacgacttccatttgcatcgacgtgccacgccatttgaacacaagctcgcccaggacagtaagggggacgttttgggcatttccagtattcccagccttgctcgattcgagagtcgctctcataagcatattcgaacccaagacgagaaaggagaattttgccacggttggatttcgcttcttcaaatcgaacaagagccatttttggttgcagtaaacgaatgaattttcatatcgttcatttttatgcattgcaaaaactagataaggactaaacaaatatgcaaataggcaggcactcgagaacgcatgggaacgatggcgagataagaagtttgagaagtaaatttactaataatattcaacagttttaaagtacaatttcttttatgtaaatcatttattaaagtacaaataatcacttattttatctagagttaccatacgcaaaaagcgataaatactgtattaaagaagttgataaaaatgaaaaatttttaattttatgcatccactgacgaaaatgttcactgacgaattggaacactgacgaaaaaaatggaaaacagcaaaataaataaaaatagtacactgacgaaaatgttcactgacgaaattatccgctgacgaaaatcactgacgaaatcgttcactgacgaaaatgcttactgacgaaaatattaaccacgtctgttgatgttctgctgctgattgttgttaaattgtacaacagttgtaccaatattattcgcttgaaggaaagcaaattgtgagcgaaatgcgcaacgatattgggcactgaaatattaattatataattcttaatgggttgattaaacagcgacccaacattattttaaatattttatctttatttttggttcatcttagctctggcttgaagacttttcgttatattaatgaatattttttaaaccaattaaaaaatccagacccaggcctaaaagcataggcatgtctggggttttcctggattttgtccagaaaaaaacaggtccagccagggctaggagttttcttggattttcaggggaaaaaacaggtccagccatgggtaggcatgaatttctgatccaaacttttttgaaaaacttttattttcgtgtgttttgcacttgcaaaagtaaagcactggtgcgctgcttccgtatgccaacgtttggaaaaaacactgatcggaa

SEQ ID NO: 389 - DNA, 2943 bp, Heterodera glycines
ccagccttgctcgattcgagagtcgctctcataagcatattcgaacccaagacgagaaaggagaattttgccacggttggatttcgcttcttcaaatcgaacaagagccatttttggttgcagtaaacgaatgaattttcatatcgttcatttttatgcattgcaaaaactagataaggactaaacaaatatgcaaataggcaggcactcgagaacgcatgggaacgatggcgagataagaagtttgagaagtaaatttactaataatattcaacagttttaaagtacaatttcttttatgtaaatcatttattaaagtacaaataatcacttattttatctagagttaccatacgcaaaaagcgataaatactgtattaaagaagttgataaaaatgaaaaatttttaattttatgcatccactgacgaaaatgttcactgacgaaattatccgctgacgaaaatcactgacgaaatcgttcactgacgaaaatgcttactgacgaaaatattaaccacgtctgttgatgttctgctgctgattgttgttaaattgtacaacagttgtaccaatattattcgcttgaaggaaagcaaattgtgagcgaaatgcgcaacgatattgggcactgaaatattaattatataattcttaatgggttgattaaacagcgacccaacattattttaagtattttatctttatttttggttcatcttagctctggcttgaagacttttcgttatattaatgaatattttttaaaccaattaaaaaatccagacccaggcataaaagcataggcatgtctggggttttcctgcattttgtccagaaaaaacaggtccagcaagggctaggagttttcttggattttcagaaataacaggtccagccagggctaggagttttcttggattttcagaaaaaaggcccagccagggctaggagttttattggattttcagaaaaaacagtccagccagggctaggagttttattggattttcagaaaaaataggcccagccagggctaggagttttcttggattttcagaaaaacaggcccagccattgctagtggttttattggatattcagaaaaaaataggtccagacaggactatgagttttcttggatttgcagaaaaaaaggtccagccagggctaggagttttcttagattttcagaaaaaacaggtccagccacggctaggagttttattggattttaggaaaaaaataggtccagccagggctaggagttttcttggatattcagaaaaaacaggtccagacatgggtaggagttttattggattttaggaaaaaaattaggtccagccagggctaggagttttattggattttcagaaaaaacagtccagccagggctaggagttttcttggattttcagaaaaaaataggtccagccagggttttcagaaaaaacagtccagccagggctaggagttttcttcgattttcagaaaaaacagtccagccaaggctatgagttttattggattttcagaaaaaaacagtccagccagggctaggagttttcttggattttcagaaaaaaataggtccagccagggctaggagttttcttcgattttcagaaaaaaacaggtccagccagggctaggagttttcttggattttcagaaaaaacaggtccagccagggctaggagttttattggattttcagaaaaaataggcccagccagggctaggagttttcttggattttcagaaaaaacagtccagccagggctaggagttttcttgggttttcagaaaaaacagtcaagccatgggtaggagttttattggattttagcaaaaaataggtccagccagggctaggagttttcttggatattcagaaaaaacagtccagccaaggctaggagttttattggattttcagaaaaaacagtccagccagggctaggagttttcttggattttcagaaaaaaataggtccagccagggctaggagttttcttggattttcagaaaaaaacaggtccagccagggctaggagttttcttggattttcagaaaaaacaggtccagccagggctaggagttttattggattttcagaaaaaataggcccagccagggctaggagttttcttggattttcagaaaaaacaggtccagccagggctaggagttttcttggattttcagaaaaaacagtccagccagggctaggagttttcttgggttttcagaaaaaacagtcaagccagggctaggagttttcttggatttcagaaaaaacagtccagccagggccaggagttttcttgggttttcagaaaaaacagtccagccagggctaggagttttattggattttcagaaaaaaaaataggtccagccagggctaggagttttcttggatattcagaaaaaacaggtccagccagggctaggagttttattggattttcagaaaaaataggcccagccagggctaggagttttcttcgattttcagaaaaaacaggtccagccagggctaggagttttattggattttcagaaaaaataggcccagccagggctaggagttttcttcgattttcagaaaaaacaggtccagccagggctaggagttttcttggattttcagaaaaaaaaataggtccagccagggctaggagttttcttggatattcagaaaaaacaggtccagccagggctaggagttttattggattttcagaaaaaataggcccagccagggctaggagttttcttcgattttcagaaaaaacaggtccagccagggctaggagttttattggattttcagaaaaaataggcccagccagggctaggagttttcttgggttttcagaaaaaacagccccgccagggctaggagtttttttggattttcagaaaaaaaaata

SEQ ID NO: 390 - DNA, 4432 bp, Heterodera glycines
  unsure (1)..(4432): unsure at all n locations
tggaacataaaaaagaaaaatagctaacaaataagactataataantgagaaagaccaacaacaatgttaacaaactaaccagtgtcattgcctgatatttaaatttataaacgaaataacaaaataaatttctgaaaaatgaatttatataagaaaattaaatttattttattaagaaaatttgggcaaaaatccagattcattcatcaaacattaacaaataatttccaacaaataaattcttattcatttttttgtgaataatattaataatactttttaaaattttgaaaataaattttaattttgtgagtaataatctaataaatataaacaaattaaatttatgtgtgaaaataaataaattttagtcaaagtcaaaacggcatcattaagcaagtaattataaatcagaaattggcataaataaatcgtgatcagtgacccgaaaaattatacattgttattttcagaaaagtttttttttaatttaattcatatttaagttttcgcgcaaattcttatatttgtcattgcttcatccatcagccgtaagtgtcagaaaatatctatttaaatggattataatcaataaaaaagtaaagccatgataaagaaagtaaagagaaaattaaaataatttactttaaaaaaattacaacagccagaataatggaaacataaattaaatatgtaaagcataatagcacagcataaaatttaatgttatttatttgaacattttgtcaagatttattaataaaatgaaataattacaattatttgtgtttattatttttgtcatacatatttttcaaataaaaataacaccgaaacacatgttaatgatataccatacattttaattttatttgcgagcaaaagtctaaaattgagctaataaataaaataagaaaaaaggtttattctgaaaaaaaagataaaaataataaaaaaataataatttttttataataatttaatttaaatatgatatgaatgaacaataaaaaaacgaatgaaacataacttttttgaaatttaagagattgttttaatttttttgtttattagagaaatattggggtgttgtataagttctgtcaccccgaccaaaaatttcattcaaaaatttataaaaaatcaaataataactcaaaattaatcaaaatatgcaccatcattcccgatcatattctgccatttttgagattttaaaaatgatctatcgattaaattcaagatagttagactcaaataaactgatgggtctacttaaaaaagtggacaaattcaaccactgatttcttggccaagaaaaggataaaggtacaaaacaaattatggttttgtagagcaaagttgggactatctgacaagctgaaaaagagtcaccaagaccgacgggttatttttttaaattgtcctgtctgaaaatgggtgctcaaaagtgccaagattcagcacccactttgtacaacattgttctgaaaggacctaataaaatgaaattgatgttttcatgggcaaaccaaacccggagaatccgaatatcgcctcagatttagtcagttgctgttctatgaccctgtactgcttcaacttcttgtcaacgacatggagcagtacaatgccagagaaaattcagagatcaaatctgaggccagatttggattctccggacttgatttggccacaaaaactgcttttaataaatttccaactgatcaaagcaaagttttgacccgtacaataaaagtgatcggatttgggatttagggtgctccattgggataattttaaaaaatcaatttgaatggggaagaacgaaaaatggcttttaaccgaagcaaaaatgtctgctctttcctataggacagaaattgatcggctgtcacttgcggttaacggtgcaaaaaattccgattagcatagcataagaagggtgacagaacttatacaacaccccaatataagagctatcttatggtaccaatgcaaagttcccagtattttttttcaaaataagacaaaatggctcaaaaaccaagattcgaacccaaaaaataagattttttctaaaactaatatcagggggggtccggcggtgccgatatgcgccgccggggaattttcttttttaatttgaagcaatttgttaacagattttgaccaaaaattatcaaaattttgtgattttttagctaaaaaattcagaaaatcgtaaaattgtgactgttctttaaggaattttgggcaattacagtatttgttaacagattttcaccaaaaaataaaaaattttacgattttgagccattttttaagaaaaaaaagttttgtggggccgggggccgcggtgccgataggcgccgccgggaaaaattttttcaaaattagtaattttggtagaatttatatcagcgaattaaatcattaagcacaaaaatttgaaaagtttggggaagcctgaaaataaagggcaaatcttagaaaaaaggtatagccaaaagtacaaaaggtaccaagttttcacacatttttggtcataaacttttttttaaacctaatgaaattttttgaaatttaccagactaatagaggacacttgttaatatatacgttatattaagatccctttatttagactgttctaataatggtccgttaagttaatgaaaaaacgacgtctagagaatttatatttcgccgagatcatgttctccgttctatgcgacaaacgggaggagacctcagtgttccggagattgacgatgagcataagtgtgatgaaatgaatgctgtgacacggaaacatccatctccacgagatcctgcctccttctcctctaaagtcgcagcgtgcctaccagtttccgcgggctaagtcaggggcttcacgaacttcatccgcgcaacgttttgctggaccatcagaacggactgctgccggacgaccggttgtccatcatgtgcgaagtttccgtcctcggttcagactgtccgctttgccaccgtcagccttaaattttcattttcagacagcacagcgccgtccgttggtcagccgatcacaatggcgacaagaagtgcgagtgcagccgcttacccggtggccacgcctcaactgatcgtgggcacggcgggtgccggcggtggtggcaaaatgccgaacgccgccgtaaccgcgaaacaaatacagcagcaacggcactggcaaagacagcagcaagagcagatgcaggtgagggggtcaattcgagggcgaaacaacgggggggaagggcgacgacctgctccgctaaaattttgttcaataaactatgtttttagaatttgacttttttagagatttttcccagtttggagaatgttgtttttaagcaattgtttttactagcacttgttttggaaggggaatcgaacttttcccgagtgagagtgtgtgtgcgtgtcctaatgtttttccgtttgcagcaccaccatcctccgggcaacatgctgtcaacgacgcttcaccaacagcagcaacagttcagtgccggaagtgacggaggcccattcataagaccatcacaccaacagcaacacacgccatggtgccgcatgctgtcgctgcaattggccagcagtactgcggcgccaacgcggggttcgaatacccgccaatgatggcatatacgcgtcaaaataattcaactacaattttcccatggacaaatgtgctgaaatttttaccaagcattaaattgtgaaaataaattgaagtattgaaaaatccattaaattaaatttaaataaaattaaatatttgaagtaattcttattgactatcagaaaaggaagtcaatacctttaccaaagtattctaaaaagtacattataccaagggaaaatggaaaaaattgatcattttttgggtcgtcggtttttaagcttaatttcatccgcggacatcgtagagccctatcaaccaaaggttcttttgaagcaaattttctgctctttctgtcagtcaaaaagttttccacgaaaaaacttttccgaccctcctaggaattttttcgacaccaacccctgcgtttacggcattttaacagtgaaaatgtcaatgtaattgaattttgttagatttatcgtgttataggatgtcttttcatgatgttcattgctttattgctctttctttttccaaaaatcttttttcattaaaaaataatgtaaaattttttattttcattattttcaatacctaaaaactttacggtgaagcacaaataatcagcttgcgaaatttatgaattaacaaataaaataagttttcagatgaatgcgagtatttttctgctgttcgcagtttgctgttcttttctggcccattattcccaaggaatgttttctggtctcaaaaatacatttaaaaaggaagag

SEQ ID NO: 391 - DNA, 3356 bp, Heterodera glycines
ttgctattattcgatagccctatgtgtcctctactagccttggaaaatatcaaaaaatttcattaggtttaaaaaatgttatgaccaaaaatgtgtgaaaacttggtaactttcgtacttttggctataactttgtaaaacttgaccaaattttttgaaattttgatgaacttgtagagaacacttattgctatacaatgataccaaaaatgtctaatttggttgatattgacaaaagttatggacagttttttgttgaaatttccatttgataacggactcaacaccatctaattgatgcttatgagagaagttaagaagtttttaacatttaaattttttaaattaattttaattcttaaataataatatagttgaatttattttcacaattataatcttcattcatatttatttttccaaaaaattttcataatatataccaaaaataaaataaataaaatagcattctcaacatatctaaaatctaaaagcacaaagtcaaccgttatgatcaatagaattagagaaaaacccagcaattttattaggtagaataaattttttaagtaaacaaaataaatccaataaataaaacaaattccttaatttaaaaattatgtaatagaattttaataaaatagcccatcgaacaacataatctgaactaaacgaccaattatgattatttatttttatttcccataattaatgtattttgatttctgatcccttctttgagcaccccctccccccgtaattctccttttccccggggggcaattcaaattgtaaatagccccgcgtcttctgccgtcctttgttaaaaatcccatttctgccagttgggtttgcccctttgtcccattttgcaccatcccttcacaaaaattcaaattcctttcttcagccggctcaactccggccaattttgtgcaaaaaattttgcagaaaatttctcacaaaatttttcttttattcaattcgttggctaatttgcatttttttgttcgtccatttttgtgcaaatttttgtcccattttgccagatgcgcttatttgtgcccgcacctcgcaaaaatttttcctatttaagcgcccccggccaaggggtcgctcattttcacttttctgctgctcctctgtattccctcttcctcctctctccatcttctcctccccctctcttcctaattaactttctctctctctttctttcttcccctcccttttctctcgctccgcttctcttttttgtctctctcgtccttcctcccttttctctctcttttttcacttccccctcccatttcccctttttacctctcaactttccttcttttttcctctccctccttttccccctcgaaaatatttatttttttttgcagttttctattgtttataaaaattgaaaatgggcttcgaactcttggttactgagaccaataaccaagactgctggtatgtgccggagcaggaaacagatagaattgtgaaagttagaggcattgcggcaggactgatgggcaccacgggggagaatgtgcgtctccttttgaatggtaggtctatttctggtggcatctattgatgataaagcgtatccccatttaggacgaccaatggatctacaacgcacggtcgcacagtatggactccaccaaaaaagcaaagtcactgttgagcgcttggggggcgccgggtcgtctgcatcggggaatccgaaaagcccaagatgattttgacgatgacctattgcgatgatttttgtaacatgcatgaatgtgtgaccatgaaataggacacctgtggtgagtgcctattaaactttcccctaatattgaccaaattatgaacaattaaggaattgtccaccccttatcaaaggggctatggtgcagcacagcggggagcgggcgttggtgacgtgtttcgaggactttgacgcttctttctgcccattttacgtcgtgttggcaccacagtagggtcagaggcgttgagcactgggaaacgagtgctggagcgcgttgggaacgatggaataccgattaaggaggcgctggtcaccgagggaaagcgaggaatagacaccgtgctggacaaaggaggactgcctaaacagtttggtactggacagaagggtataaaaagaagacgaatacgtgcgccaagtcatcaaacaataattggcggacccccaatcgccgtaaagcagacaacaagaaagcgtgttcggtcggacgcctttggactctactgattagcagcaaccagcaggatgacatttcataaaatcgacaatgactccgtgaactcaatcaccaatgcgctggactttttccgcattccgccgacaaatgtcagcgtctcttcatcaaaggtgtttgaactgcttcccagcaaccctctgacggacaccccctaccatttcaaacttcattcaagtcaaaattacattgacctctccaaatgctatttgctcaccgagttccgaatccggaaggaaaatgcgaatggtcaacttatggacctgaccattgacgacgaaaacattgcgccaatccagatgattgggcaaacattcatccgaaacatcaaaatgagcatcaacgggcgtgaagtgttcaacgcaaatgcactgatggcctacaaaacctatttttcacatgaactctcctactcaacaactgcaaaggactcgcacttgaatgctgcaggctattaccgggatacgggcgagacactggagacggggccgggctgcattcaacgcagggatttgtttgccgaaagcaaaacagcccaatttattgccaaaattgataccgacctattcaaccagccgctgtacttgattaacttttgtgaattggatgtcgaaattttgccaaatgacaacgattttgtgctaattgcacccgccatcggcggtgttgttcctcgttaccgtttcgaggtgatggggctcaaaatgtatgtgaagaaggtgtcattaatggacggattagcgctggacattgcgcgaaagcttgagataaagcctgcacgttatgcagtaaggaaaactatgatgaaatcgatgttcatcagtcagggtcggttcgagtttaccgccaatctgttcatggaccaaattccccgccgcatcacaatggggcttgtttcaaatgccgactattcgggcacaatcacgcggagcccgttcaattttcaaccgtttaatgtgcgggaaattgcgatcatcgccaacggccgttcctacccccaggccccttacgatttggactacccgcatggcaaatatgtgcgcaatgtcaacgatatgaatgaggcggtcgggttcgcaaact

SEQ ID NO: 392 - DNA, 3766 bp, Heterodera glycines
atccagatgattggcaaacattcatcggaaacatcaaaatgagcatcaaagggcgtgaagtgttcaacgcaaatgcactgatgccctacaaaacctatttttcacatgactctcctactcacaaacagcaaaggactcgcacttgaatgctgcaggctattactgggatacgggcgagacattggagacggggccgggatgcattcaacgcagggatttgtttgccgaaagcaaaacagcccaatttattgccaaaattgataccgacctattcaaccagccgctgtacttgattaacttttgtgaattggatgtcgaaattttgccaaatgacaacgattttgtgctaattgcacccgccatcggcggtgttgttcctcgttaccgtttcgaggtgatgggactcaaaatgtatgtgaagaaggtgtcattaatggacggattagcgctggacattgagcgaaagcttgagataaagcctgcacgttatgcaggaaggaaaactatgatgaaatcgatgttcatcagtcaggatcggttcgagtttaccgccaatctgttcatggaccaaattacccgtcgcatcacaatggggcttgtttcaaatgccgactactcgggcacaatcacgcggagcccgttcaattttcaactgtttaatgtgcgggaaattgcgatcatcgccaacggccgttcctacccccaggccccttacgatttggactacccgcatggtattttaccactctttgtgaaaggcatagggaatgattgattattttattataccacggcgcacgttgcgcgcgctgttggtgcctgccgcatatatacagcgagctcacgcgggaaaggctcacttttttcgcaaaaataaattaaatatattaataaataataataatgtcgttggaagaccacaattattgcggcgagttgggcggtaacgaaacgcccacaaagagaagaaggagaaatgacgatgatgatggggagggagaaccgaaatttcaaaaaaactgcattcgcacactgagcgccgacaaacagtacaaccaaaaattcaaaatgcagagcgtaaagtcgacttttgtcatcgaaaatttgcccgccaaccctgagtcaatgctgcgcacattgttcgctcactgcatgtcaaccgccttggacgagtcccagcagaacggaatcacaccggatcaattgggcgctacaatctcttcagatctgctaaatccgagcatatggattcctatacgccgcatttccgacaacaccgccgactcaatcatgaaccgcttccttgaggtggcacagtcaaaatcgcgggagggctctctgtggggctcgccgttcactgtgaccatcacaacgcttgatgttgcgcagctacctcagcggcaacaggtgcgtggcagtgggaaaaggaccgtagattcagtgcaacatgtcgtcaaagaaagtgctcttctgcgaatcaacaacatcgatgatgcttattgtcttttttacgctttggaggcaagcaggaagtaccacatcaaagagatgagccgaagaaatttctgttattatattaaccatccgaacgagcgacgactggaagacgtgtttggactgatgagcagcgtaaacattcgcacagatttgagagaatatgatgcggttgtctatgtgccgattgtcgtggactattggaatcggaaatacgcaacaacaaaccagcgatttaaggtgttcatttttggcgtcacaggcagctatcgaccaaaatttcaatatgggccggacaattacaacatcgaaatgccgctctaccatcacaacggccaattcgacggaattcgatgtggggtgggcaaagcggtatttgggcgtgactactactgcttttcgtgtgagtgcccctacgataatgctaatggtcacacgctacaatgtaaagcaaagtgcataaattgtggccgcataggagtggggcgaccgtgccgagcggatgacaacaacgacagttattacagagaatgcacagcatgtggcaaggatttcatgagccaagactgcttcagtcatcatttgtcgagcaatgtgtgtcaacagttcaagaaatgcaaacagtgcggagttgtgtggaatgtcagacaaaaccgacgaaaaggacgcagcggtcacgtttgcggtgagaaattctgctacacttgcaaatgttaccataaaccggagcggggctgcttcatacagcagttgaaggcgcgccgccccaaaaagtacagactgatcgccttcgactgtgaaacaacacagaacacgcgaattgagggcgaccgcagacttcattctgtcaacttcatctcatgctatgtcgtctgcaccaactgtataaatgaaaatttgtggcgaaattctctacaagcgccatgctgcatttgtgggcggcagcgcaccgtcacattctcccaccgtgcctatgaacgcacccaaaccgatgcccaattcatcactccgtgtccaatggcggcctttgctcaatggctgctcagcgaattcgatccgcgctatcccacaatgctcttcgcccatttcgggggtcgctttgacaacattatgctgtttcggcagttcttcctcaacgggttttgtccacagatgatccgtcggggtaacaaattatacgaaatgaaaattgcgaggggcgaaaaaaacccggaaatcatcgtaagagacagctggaaccttatgccggtgccgctcggcgctctgcccggagcgtttggactcaatgtgcaggataaggagttcttcctcatttggcgaatgttgagacgaattatgggcacattctgcagtcgctaccgccaaaagctgactacttatacggtggaatgacgcccgaccggcagcgcagattttaccagtgctacgcggaacaccgccatcagcagttcgacctgtgtgaacagctcgcagcctactgcatcaacgacacgcacatactaattgaggcgttggtcgcatttcgaacggagttcttgacgattattgacccacttgagcgacatggatgcttggatgacgacaacgacgacgaagaggaggaggaggtggaggaagaagacaaagacaatgcatttgaagtgatcggcgatggcattgacataacgtgggagccgatgaccatcgccagtgcctcaatgagacattttcgactcaatcacctgaagcgagaacagctcgccattgtgcccgagtgcggctacgacacgacaaacacgcaaagccttgtagcgctcaaattcatggactggtacgccaaaaagaacggggtgagcatccagacggcacactcgcccgacggagagaaaaaaattggccagtacactgtggacggatacatcgcggcgaccgacaccgtgattgaggtcaacggctgccactggcatgcacacgaccatccacgtcaccgttttcagccccaaacagtgatggcgaatgggaaaacggcgcagcggatacgggaggacgatgcgcgacggctggccttcatcacatctcaggtgcaacaagtgctcgtattttgggagtgtgaaatcaacgctgagaagcgctacaacgacgaaatgaaacgctcctttgcgcagtacaaggacagcggccctatccatttgaaggactgctaccatggaggacgtgtgggtccgcaacgactacactacgaggtggcggatgaaatattacgacgttcgttcgctctacccccacacgaatg

SEQ ID NO: 393 - DNA, 1550 bp, Heterodera glycines
tgttagaaatgttttataaaaaataaataaataattaaacatttcaagttacattaaattttaatattaaaaaattggaaaatatatatttttttgtttttttagggaataataattaaaatcatgataaattaaatattaaaaagagaactaatggcctaaatgtaatactttctaggaagcgagatgatggaaaataaagtaaatatttaaaaataagccgactatacattacgaatttataaaagcttcaatttaaaagagaataaatatattttggaaaattattgcaaaataagtaaaaataaataaattaaaattacaatatgagaaaatatataactaaaaaatgtgaagttgttgtatccgcagcaatcaaaatttatattttgtgcataatgtaaattgccctactttccccgacccaatggctccttcgttcactgcgacacccacacgaatggctccctgaaaatgcgacaccagaaaatccgacaccggcggaaaatgcgacaccgtaaatttttttttaaaaaacagaaaatgcgacacccggaaaatacgacaccaaaattagatttttaaaaattatttttaattttaaaaatgaaaaataaatcaattattattcctaaagaggttcttagttacgttttaaaaactataaacatgaaaaatcattgatttttgtcctaaagaggttctgccattcggttggaaattgcgcgcaaatattgcagaggatggcgattgtttcgcgtgacgtataactcattaagattcatgtcttggtccacataattttgcttgcgtttcattcccttgccacgtattccatttgctgggttgtttgcaaagtctttaacttgctgacgccaatggctttcttcttgccgaactttccgaagaaaaatgcttagacgtggcgatggtgaacggaataacgcgttcagatttctgtgccaagcttcaacactgttattggttctgtagaggtcgccttccaccctatcatttacaaaattcagttacttattatttggtttttttaccgatctcacatgttccacaattccatcggaaacaaagctgcccgattttggtttgctgataatcgacaggagaatgggtggggggtatgcaaaaatcgacgggagaatgggtgggtgggtaaatattttgagggaattaattgccgatgatgaaaattctcgtccatatgcaaatcggaaactgataagaattttttgtattatctgctgtccactttactaaagggtcatgagaattgtcttgaactaatcatagttcattttatattatattacttaaatcattttaaattatttttatagctcaatgttcgattttaaggaaaataagtagttcattttcattttttaaattaaaaataattttaaaaatttaatttaggtgtcgtattttcccggtgtcggattttccgttttttaaaaaaattctacggtgtcgcattttccgccggtgtcggattttctggtgtcggattttcttggtgtcgcattttctgg

SEQ ID NO: 394 - DNA, 971 bp, Heterodera glycines
tccttcctcgccccattccgtaaagggcgaacccacaaagcaccaccaacaaaaccttaactcaaaaaaattaacgatttatcattgtatttgagaccttagattttcgaaactttaatcaaaatttcaaatctaaggtctcaaaaaaaccagacaatgataaaataaatcatttttgcaaatctgatatcatattcgtgatcagaagggccgaaaatcccgggttgtttttccacaacttaaaaattaccaacaaaagtgttttttagggattaggggttgaccaaacgaaaaaacaaaacctgaagagcctcaatgaacgcctcagttccgggtttgtggttgttgacgaggtcggctttgttcggcacgattttgatgaagagctctttgccactctccatctgagaagggtcggtcagagcctggtagtggatcttgtccagagcgtcagatgagtcggagatcagctcgcggaggaagatttcctaaaccagattaagattttaaaaactgattagattagactttacgggttaattagactcccagagcatttcccattttaaaaccttgttcgagtaggtgttgatgatcaggggcatctccgcttggaacgaaaaggtttcgccggattgtccagacaaaatggcaaacatgatgaaaagcactggtgtagcaatgcagtgggaaaaagtcattttgggatatctaaaaataaaacatttaaataatatatattacattcctaaaaataaacaatttaaattatataaataattctaaattagataaaaacacatatttaaaatagataaatatatttaaaatagcattaaataagccttacaccctacggcccaaccccagcaagcgtccctccacccacagagtattgacgcgaaaattcaaatttgaatttagcgccaaaaattgtaacaaaagtacacgggtcactactcatgagaatt

SEQ ID NO: 395 - DNA, 8516 bp, Heterodera glycines
  unsure (1)..(8516): unsure at all n locations
ggaattaaagtcaaatgactttttttgctgactccanaatgacccttaaaatgacttcaaaggggggtctacactttgtttgaagcttctaacatacatttttttgtgactttttttgacttttttacactttttgggatttttatgccttttttgcgtttttgtgacttttttcatgacttttttgttaaattcccatccctaataataaaattatttattcaatcattttgattcaatttatccaatattattaaaaatatgtcccagagagattcaaaatttgcatctttgaattgatgagaaataaaatttttgctgttcatttcagaaatttcggtatttttcaaaaatcctatgaataagagggatgcgtcggtgcctaaaggcaccactggaaaaatggaatttttaatgagatttgttaacagagtccaaaaatagctaagtttgtgtctatgaaaaagtgcaaaaaaattcaaaatatgttgaaaattctaaatataaaattttatttaaatatttaatttgatttaaaagggtaaaaagatgaggtgaaatccacagaagtgtgttcgaagtaaaagattctgtccaaaactccacaaatttcggaatttttagccaatttttgtaagaaaaaattggagttttagtgcaattacataattaattttgtctaaaaagttcaaaatttgacagtttttaaaagagttttagagagtagacctgggaaatttctggaaattatggagtatttaatgcgatttgttaataagaattttttgcgggtttttcctaagaaacgacaaaagcctcaaattagtaacctaaccctgttttgatactaaaaattaaaaaatcattttaataatgagaaaataaaaataaaatcgattatttgatgccttaattgttttttctacgaaaaaaaaattatttcattgagaaaaataattggcaaagaaaatttattaaaaactttgaatatgaaacgcatggaaaatttctaactttttcataaatttccatattggaatttttaaaattagcacaagtcttaggaatacgcacaacgcgacctctgatttttaaatttacgaattattattattatttatttattaattacctccgttttgtctcctgcattttcttccttcttcgttggctcctgaaaagtgacctttttctgcttcttttgctgcttcaattcatctcttttgtgcttattcggcaattgttggttcattttatcgttccttctcagcggctatgaaaaatgatgagaaaatttgttaaaaattaattttcgataacaaaaagaaatcgtaaaagattcaaaacttattgtagggatgaaaaagtaaaaacttttgaaagaaagttttaactgctaatatttctcattttgttaatattatatagcatttttgattaaccatgagcgaaatattaaccttaataatgagaaaggacttaatcagcaacagaatcaatcagaaaaattagattcaaatgctttgctgtccaatttttattatttttattaatatgtagattgggttaattatatgattaaccagaataaaagaagatacacaagtttatattaatatattataatattttattgaactctcttcatacataagcttaatattaaatttaatttaatttgaattaaaaataaaattcataatattttcccagtaaatatgcaaaagttttctaatttattaaatatcggattattacactttaaatttctctctgaaaattgccgctgtcaaaaagagttaattggcattggtactgaaatatttcgtgccgactgtgcttgcgttttgtgccaatggcactcaaatacaatactcagttgaccgcgaataagtgacaaatcaatgagcacaaagccaacattttatgtttcaatgcctggagggcattgactaactgaagaaatgggcctttgtgccgagtgttttgcttctcggcattgaccattcgcaagctgctaatgagcgaggagcaccaagagttcattcttcaagttagttaattttttaatgaaattaattgtgatttattattcctttaattaatttttatttttcttgaaaaaagaagcgaatattttttggaaatttaattatttttcatttgtccctaaaggccattgcttttgacaatgctgaactgctcgccgagcttttggctgcgcggcctctgctggccaattgccatgacgcggacggaaggatgccgctgcaccacgcggcggctggcggacacgcgaaatgcgctgagattttgctcgggtccggaggtgatttaaaatttttaaattatttttaaacttaatccccctttttctgaattcattttttccagctgacgtcgatgccgttgccggtccgcaggacacagtcaaaactccgctgggattggcctccgccatgggccattgtacggttgttcatctgctggcagaaaatggtgctgaccttttttatgtggactcggatggccattccgcgctccaattggcccaaatgggtggccatgaccaagtggccacgctgttaattggcataattgaacgaatttatgccgaggcggaacggaaaaatcaggcaaaaattgggaagcaaataaaaatggggggggggggaaattttcacttccatcggcaccgccggccccttgtccctaaaaattatctggaaaaagcgatcgcaaaaaaagtggcttaatggaggactttgtaaatgtttgatctccccccccctcgtctgggcaatttactgataatttgaaaaatcattttgcaaatttgtcggttttatataaattgtgccttttcagaggctttgtgctgcttgtgttgatggcgaggtgggccccgtgttggacattttgtccgatttgggcccgaaaagcattaggaaacaaattttgaatgggcgatatccgggcgaacaaaagtcggcactgtttttggcggccgaaaacggcagggcggaaattgtgcgcgcattgctcaccgtacagtaccattccatcatttttgagcccagcggagacacggtatggacataaatgtgaatttattactatatttggaaaaggctattaattttgcttcataaaattctttttttatgtttaccaaaaatttttcatttcggttggccttaggccttttatttttttgaaaagtttccagtcataaaatcctttccattgttagcttcttcatgccgcaattgcctctcagaatgtggcaactgttgagcagattttgcacaaattcccatttttgatggatgccgtaaatgaggaaaagaatttgccattgcattgggcatgccggtaaagcaaataaattaattaataaaagcatctaaataaatggttagtttctctcatttccgatgcggaaatgcgcgcgtcgttcaggcacttttgagcgctgaatatcccgcggaggaattgaaatttttcgcgtttcggcatgaccgcgccaattgttcctttggcaatggcactgggacaaacgaacggtgtgaggatggctatttgtttgtctgtgatctgaatgctgttgatcgggaggggagaagcgcgtaagtgacagaagaaaacaatggaggaatcactgatcggagggggaggagagggaagtgatcagaaagggggataagtgatcacaccattgatcagagtgggagaagtcagtccgttcgaaatttatttgaataatatagaggtttgaaataaaaaaatggagaaaaactggcagagaatttgagccaattcatacaatgcaacaattcaattttaacaggttctttttggccgtaatggaaggccattctgaagttgttcaactgctcgctaaggttgtcaaataaaataaatataataaacaaagaaaacataatttaatcttaaactcattaacaaaaatttgaaatcttttgagttttactaattttataaataaagcaatgaattccataaaatgatttcattttctattaaagttcaaattgccaatttccaacggcacgcgccaccgcagagaaatgctcagaattgaggagaagcaaaatctgatggaacatccaattttgtttgatggacgagtaaatggcaaaactccactaatggtacaaaaaaagccattttgaaaatgtttatttttaatttccctctaatcttaaaaggttgcttgtgccaatggttccactgaaattgtcaggtattttcagtttattaattaattccctttctgtttatttttaaaatatttgcttgacaaattcaattaaattgccaatttttcatttacatgaggccaaatttgatcagaatttgtcagaggaacgtttaattgttaaagtgggaaatgaatcagaacacaaataaactagcaaataataatttccttgcagttgacaattttgtcgtaattaattggccattcaaaagaaaaataacaatttcacgtcaatagcttatgttttctgctcagaattttggtcgaacaatgccatgtcgacgtgaattattctccgccaatgagcggcggtgccggagaaagtggcggcggtgctttggccgaagctgcaaacagtggccatttggaggtgctccaagcactgttccaccaaggggcttttgactacggtaaccgtactctgagagggcggttggccaacgatagtgggcacagtaacgcggcggaaatggtcggccttttcctgcaacaattggtccatcatgacaacgaaaactgtgtgaacagtgcaaggagtccacggcaaaagaaggaacatgggcaacaacagcagcaggtgaagaagatgaataaatggtcattggctaattatcttttgcatttcaaggaccattctctagcactgccctttgtcgagagtttgttgaatgcctccaacaaagtgccattgtcggaccatttgccgtcaacaaaaggctgccaattgaattggcaatccaccggcattcgagagcttcgctcagaatggatggtcgatgcagcgcttaaactgaacccgcaaattccgcgccatttaaggtcgccgggttaataaatgccatggcattggcactttctccgctttaaaaaacaaaatttataatttagtaaatcattggcacttaatgccatctcacgcatcgatctgtcctccaatcagttgtgctctgtgccccatattctattcacccatttgtcctcgctccgttcattggacctctccaaaaattgcattccgcgctttgaaataccgccggatggtgcgaattggcaaatgccgagtctggacagactttgcctggacgaaaaccaattggaggaactgcccaaacaggtggacaccaacactggcatttgggcatttagctaagagccatttcaaagtttaatcccttcaatttaaattgtctgttgctctcagctgttctcttctgtccactttcctcgcctttgctttctctccgccactttcaatcgcttgcgccgattgcctccgtccgtttggacagcgccgcgtctcctcgagttgcacttggccaacaatttgatcagcgaactgagtgcggctgctctttctcagcaggaattgcgcaggggaagccatttgtacaggggcacgggcaccggaggcgcgtcggcggcacgcatttcacggcaaaaacagcgtgaggcggtggacggaaggtcagcaagggaaaccgagtcaagactgggccgaaaatccgagggtcacgagtggcaattaagacgcgtctcgaacaatcaaaatttgagtgttaatttggctgctgatcagtgtcaaatttggttagcttagatcgaccgaaatggacgaagaaaatcagcgacaaagtcggacaatggcgaaacggagggaatccccgacacagcaccaacagagcagcagcagaagggagtcaaggggagtcgcagctggcgaacagcaaacgacgagcaaaagccaatcgacggacacggaggaggacaacgcaagcgcaactccgaggggagcggcgacaaacgcagcaacggtcgtggagatggacatccacaggtgggcgagaggcgagagtcagtctcgaccaaattcattcccacaaaggcaacattcacaaaactgtgagtgccattcattcaccagcgaactatggctgttttatcgcaaataaaaaaatttacaatttcggtatttctgaccaaaaaccgtaaaaaaaagcataataattaaggttaaaaatattaagaaagaaatattaaaaagcataaaaatttaaaacaaaaataaagcaaatcccatatttttcgaaattacattaattttaaaaaatggaaataaatatctgacagattggtcgacaatttttaaattttagggtgaatatttggcaagagaaaatccacctgtccaacattgacgaagatgggccgacggtggcgaacgaagaagcgaccggcgatgaattagcggcacagaaaggcaatggcagtggcacaacgcgcagtcaaagccaactccaacttctgaacctggcacaaaacaaagtcatttaaaggcactaaaaccctaaaaaattagcgttcgttcagtttggccgaatgcccacctgcttggcctgctgctgtccccgtcttgccaagttggacctttcctccaattcgttgtcctccctcggccccgtcggctgtttgccgtcggcactgcgccacttggatgtgtccaaaaaccagctggtccgtctttttgggggtgaaaatccggctcagctgaggcaaaagctgcgcttttgcgaggctcagtccgaatttggaattgccggtgcgaaaatggacggcggtggcggtggaataacggcgggcaatatgccaatgccaaggcattcgagtgagtgccgaaaagacaccttaacatttgtgacattgctctcttaaggaagtcgctccaaatccgtggccagaagccaacgttcgttgagcgttgtgcgaaagagcggcggcggcgttggccgtgctgaacagcttcaaaatgagcaggaattgttgctgagctgctgcgtgcacaaatcacactgccgttttgaggcacttaaaacgctgaatttggcacaaaattcattggaatttgtggacattttgctgccaatgggcggaggttgaaattaatttggagaattttccgaatttattttttaattgattgaaaactcaaaaatgaaaatttagttttaatgccaggaaacaacacattgttttccggcactgtttcaggtgatggtgagaagctgttcaattggagagaaaattccgaattggtaattaattacattttttaattaactcaaacacattttgaaatttctgatcaaatgatgtttgataatcttgcttagtttattttacagaataattaccttttgtaacttattaatctattttttctctcttgtttttgtctaaaattaagcgcttttaattacaagattcatctcttttgttgtcgtttatcaattttaattgttattaaaaatttcagcttaagccatatgtgctgtttccttcgttgaccaattttgacctgtcgttgaatcgaattcgtcaacttccgaccacaatttcattgctcggctccttggccatgctcaacttggccaataacgtggagctggacagtctcgtgcccgaactcggccttttggagcgcctgtggaccatcggcctcagcgggtgccaactccgagcggaggaacccacgctgcaagcgatggtccaagcaggaagctacaaaacgggcgaagtgttagcgcaactccgacaacggcttgaaaagtgatgacattgccgggggtaataagtgtgataaattgtggcacatatttaaaaatggaaattccaaggcgattttcatgctgccccatttctctaatgtcctgatgatagctgtggcaatttcgagttagttttttcgtttagttcgatgccgtacccaatgctcaagctgatgttgcttggtgcctcgtctgtcggaaagagcacacttttgcaacaaattcgccttgaggggacactgtcgaagaagcgcggctctcaaaacgatgttcttaaacagcagcattttcactaactaatcacacctaattaattaattgttttggcatccaattattatccttcccccctcccctttccttcactatagagttggcaacgtcgtcggcactcgccgatcactcctccggcaaccgtttcttcttcctctgcaggacgtggcaacaggacacgcttcaccagccaacatcgtcctccatcggcctcaacttccgctggcactttgtcctcctccatttgtccgcttgatgtgttggaatgggtgtacgaaccggcaaaagtgtcgtcgtccaccacaacaaaaagcacgacctcctctcacactcagcactgctgcagatgcttttca

SEQ ID NO: 396 - DNA, 1696 bp, Heterodera glycines
  unsure (1)..(1696): unsure at all n locations
tcagcacntgctgcagatgctttcaggaccgatcacattccggggtctgggactttgacggcataaaacaggtgcttgagaaggaaagcattcaaaatttattggatatgttgacggaatgggcggagtttgtggaaaaagacgaaaaaattgggacaaagaaatggactgcaaaatgggatacaaagatgtagaacaaaaacttttaaatggcaatgcctttgcccatttcagcgcgagtaccaatccgtccagcggtgtttcttcacccggcgctgtcttttcctgctgttgtggaaagtgacggacggtgacattgcgttggccgacctgcacgactttctgctggccattcaggcacaggcgccgaacagttacgtgctaattgtcggcacacattcggactttgtgcgggagcaacctcatcgtttccccagtgactatttgagccaaatggacaagcaaatccaggtaaattgagcagagagataataaatgattagaaaatcagggggaaggcctctgatcagtaaaatgattggaaaactataagaaatgatcaatcaagataattgataactgctgttgaaataaaaccaccaaacactcgaccacaaattcaataaaatattcatctgtcgcttaggctgttaggacaaaggggcgggcaaaggatgaccacagaaatttgggctaagaatggacaaaaggagcagagggaacggcaccgaatatgggcagggtgaagaagggcgagacgaatatccaatttaaatatttatttcaaatgaaaggcacaaaagtgagtgatgatttagggattttggtccccttttatagcagaaaagaaacgtgggaggagcacttttggggaacaataagtgggaggaggcgtgggtggagtactttttttaggaaaagaggaaagaacatgatgaataattggacagaaaaacagaaaggacagagaattaccaaaaaaaccacaaattcaacaatctcacaaaatcgatcaaaggccaattagccaattcaattttttccgtcggccactgtgccgacatcatccaaaaatagcggtgaaaatttctcactgcttttcctttttgagcaacgcttcattttgggtgccgatccggagaagaacggcgttccacgagtgcttggatctctttacatttcgtgttgctcgcgcgaggatgtcagatcgttgtgtgccctcatttacacttgtgccacagaaattcggcaattttcacggggtggaggcccggcacggcagcgccttttggcacagaaagttccggcttcgtttgtattgctggaacatattgtggccgcaatggtcagaggacaaactccgttttttgccagttttgctttaaaatacttttgattcagtcagacgaatttcgtgccgttggcaaagagccaataatgcatttcaacgaattttggagtttggccactgatcggttggctcagttggaagaacaaaaggagcagcagcaggacaaaaagactagcaccacgaagcctgcctctggcactttgcactttcgtggtgcccaggactttcgtcaggcgtgtctgttcctgcacgagaacggtccgacttacccgtaggatactgtacataccgtattatggttgaaagaccacaatagaagcttagcttcaatttgtgaacgaaaat

SEQ ID NO: 397 - DNA, 6583 bp, Heterodera glycines
aggtgtgatttgctattatgacgacacctttctccgtgatttgtcttcttggacccgacatggctttgtgcaagtgagtttattgttgttccgttgtttatgaactgtttcctctttaatcgttttatttttatatttttaatttgtcctctctgtcagatctttttggcattttgtcattcgcggcacttcgtcactgctctttcggctctgccggggatgctgcttcgtcaccaccatttgtcactgtgacttcgctctcccaaatgcaccaaaattcggtcatcgagtccgtcgagctgtacaccgcactcaaacgggcagttcgccacaacttggcggtgactttcggttaattttaaataaatttgctcccacataagcttctcctctcttccggcatttctcggccctctgtcgaagtgtccttcaattcccacttccgtctcttccgccagtgtgtcatgaatttgctgcgaaagttcgaattggccatgccatttcaatatggtcgaatgagtcttttggcttcttgtctgcctgatgaatatgtgcttcgtgccgattacccgggctcaaaagttttggtaaaaaatctcttttttttaatatctatttaaatgctttgttatttcgctaaagatccgaaataaatttgacaaattgcgcattcggtggaactccgaaaaagaaacgacaaaagcaacggaattagtgccgataaaatcgacacgaccaatgcctataaaaatgtcgccaattcgcaattatttgcagcacaggcgactgtcccgcgcagtggcgacgtcaattgacaatttgaacagcacaaaattgacggaaaacaacggaacgggcgaaaatgaggagaaaaatgctgatctgatcaagattttggcagttgatcagtgcaaagaggtgaggaaaagccaagagcaaaagctgattatgggtgatgaattagtgaccaattaatagcaaaagcctaatctaatcattagtagtatccattgacaaatatgatcaatcaaacgacacttaatggtacaataaaagctgttagaaaaagctaatcattactgatcatttgataagttgtagatagttttttttattagcaatcacagtaatgaaagttttaatgacaataaactaataattatgatcactttatcattactcgcaaaaaatacggatactataggcttttcttctctaggagtgtcttcgtcgtctttacgttatgcattacattccgcccggcttttgggcccgtctcaccactcggctgctcgatgacgaacgcgttggcaatgtgttgaccaaaatgttgctcatttcccgtgcttctcctctaccgcagcagcagcatatgatgtcgatgacggagactgatcagcaacaaaaacaaccattggcggcactttggagcacagaggcaattgttgcggcattcggacgagcattgaacgcgggacgaatggtcaatttggcacagcgaccatcgatcagacggtgattattcgaatcacaaaggattaaaaaaatttcgataaaattcggactgagtgaattaccattttgaagagacgcttccgccgccgatgaaatggaaaatgtgccggaggaagagacttcgtttattgttgtgaattcggcggaggaaatgactgaggagttcgccttcaactccaataacaaaggcaacccgtcatcgtcgtcgtcgtcgggcgggacggtggtggtcaaatgctgcgagcgcggcgtggaggcgacggacgaacgttgccgcggcacaggcggaggcatcggaaaagttggggaagaactgggcaatgtgctcgaatggatgttgtggcgaagcggtgttgaggtgggcgaggcattttgggcagggtagagtgagtgaggtagggggcaaaatctaaaaatcatacggtagaataccaacatactgtaaaaacatttcgtgattagacccgatattttgctgattcgcttttcttaagattcgctgttttggcacttttttgctgtccttgcgccaatttcttccgttggcttccgtgtcggacgtgaattacgcctcccacgagttgcgacgtcgttttgaggagggacaatgggccacactgagcacaccaacaacgacggaccaaccgaatcagcatgtttcaccttcaccgctgagtcacatgatcgaactgttaataccgaaggttctacaggcggacaattgcttttatttttaaaatgattttgcttcatttctaattaactaattattacttgggattattttccgatttaacttttaaatccaacactatttttctcgcacagctgatttgctgatttctttggagcatttaattatcgctttcagattcgcgtccgctttctttggcacgacgtcgcctggcagttggagacggactcgcgcatggccgcccgactgttgtcgctgctgaccggcgcggtggacgacctgctggaggacgcgtacccgcagttgggcacccgcttcatcctttcgccccaaggccgtccgcttgtcgaccgactgattccgtgcgatcgctgcgcaattgaggccatccgcgaggaggagcggtattggctgcgagaaaacatcaacaggtgctgaaaaaaacaaatgccaaaaatgcagtcaatgaaaggcattcacttctttaaacagaaacccggcagggagaggagggggccaagcagagttgccgccccgtctggccaagtcaaagtccactaaatttaaaaacaacaacaattcgccaaagaaagcaagccgagtgccaaaatcgaaatcgtccacagaaacgccgttgagtcaaacatttggcaaatcagacgataaaacaacggcagaaaattccggaaatcgtgcgaaaagcaacagcgaaagccgcattaaaacaacggcatctcagcccatttatttgttcggcgttgaggaatgcattttggaagcgcggagagtgctgaaaaatgttggagaaaacggtaggagagttactataccaaggttttttaaattttacgttccagaaaaaaatgctgctggaagtgggcacaaagaactaaagcaccagcgattggaatgtccccgccatggcattgttcgttgggatagaaataatcggcaaactgaggaatacgcagcgtcggcaccatcatcatcttcattagttgtgcccgatttgtccaaaatggggccggatttgctgtttgttgaccttgaacatgaatggtccgcttgataactctgttaatccaatcactcgtctactcattccaatctccccagcagggctgtcccttcggttagcattcagcgagggaaattggtcggccgtggtgcgtttggcttcgttttcaccggaaggttggcatttgtgccaccgtcttcgccgtccgcattcagaaaaatgacaaccaacgaagctggaacattgagttcgtatagggaggatattatttaattgggaaattgagactttaaacggattgattgctatcgcaaattaacagacaatgaagcagcagcggtcgttgcgctgaagcaattcgaaccggtggacccgaacaacgaggacaacgaccacgggttggccatgtgcggggccagcgaacaagcggcgatccgcgcatttgcgctcaaatggcaaaacgacgcattggagcaggtcacgcgggcttattgtactgcccgacaggtgccgtgttcagcaaattgacaatggcatttctaaatcattggtccaaccgattcaaggagttgtgcatgttgtccgaacttcggcactcccactgcacgtcaatggtcgcattttgtccatctccgatgactttgctgatggaattggcaccgcatggatcgctgaacaaattgttggccgattatcgacaaaatggccaaaagctgcacttggacactgtgcagatgagctgtctgcaaattgcacgtgcgttggagtatttacatgtccaacagcacatcatttaccgggtgggcaattttcggatatttctgaatttttattttcaatttttcgattcctttcaaatttataggatttaaaaagtgaaaatgtgctcgtctggcgctttccgcctccctcagaattctccggtcgatctgccaaaaagccatccccgagggatgtgttggttaagcttggcgattacggcatttcgcgcttttcccatccgtttggcatgtgtaagggatacggtgggactgaggtgaaaagagaggaaggaattctggccaaaaaattgtgtgatttttaattccccttttaagggatttatggcaccggagataatgcgctacaacggcgagcaagaatactccgagaaggcggactgcttctcattcggcatgttaatctacgaactgctgacactgaaacagccgtacgagggacagcccgtgcaacagatgaaagaacgcattttggaggcgcaacggcccgcaatcggcgagaaggagctgctgttcggcacgaacatgtggggcgctttcctttgactcatttctctctccccttccctaattccttcggtttcgaaccctaataaaatattgctctaatttaaggcttgatttgatgatctcctgttgggaggagagggcggaacgacggccaagctccagtcaattagttgaaattgtaagtcaattgcccatttttcgtaaatcccgcttaagccgtaagcaaagggtggacaaaaattgtccattaaattcgcaaaatatttaatattttttaatttctgacgttttaatctcttttcccattttcctcttctgttcagtgttctgctcccgagttttcccaccttttggacgttgcgctgctccgagaagacgaaaatgggtccctttgtttggccatgccgtcaaattccggcgccgccttaaattatgccaatgaatggtcattttggattccaattgagagggacaatagcgacgaaaaacagccgcaaaaggggcaacaacaatcggacagcaaaaggcggactaattttgcccttctcaaatgcaacgaatttggatggacagagaaaaaggcgaggaccgattttaaattatataaaatgaatatagaaatttttaatttatatttaaacatatatatattactgcaaacaacaaagtccaaaaatataattaaaggaaaattttaaataaagtggaaaaaatatttaatgctttaataaactttaaatgctagtaaaatgaaattattaatataattttatctaaaagcatgaaaaataaaaaatatatatttatttaaataaacataaatattggacttgtgttttttacagcacattagcttccaaaacggtcaaacagaacaattttcaccctccaaaaaacaacgaatttttcaacaacagcagcaaagcccacggaagaagaacattacggtgcccaaaattacagtaatcgcacaaatttatgacgaatttgtgtggacgggcgacgaattgggcacactgagtatttttgagcaggatgaacaccaattgttgatggtcgaatttgaatttaataataaaattcattaaaatttaaaccatttagacgaattctgccgcccctctttataaaattgacaccatcgaaatgctggaagaaagcagtcaatcgaaaacagaaaaagtcggaaataaatggaaaatttaaaaaatatagaacaaaatgaaaattcaatgctttgtgtttaaggaaataccaaaaaatgcaatttttgccaattaaataattaatattcgtaatcccttcaggcttttgttcatccgccattaagtcgcttaatcacaattgcttcttccttgtcgtcatcttctgctgtccgtcacatcgtcgccttccgcgagcgtcggctgatcattgtcggactcactgtggcggtgcttttgtgccgttggcacgggcgggaaagtgtgccgcaactcatctgctgcatccctctaaatccaagtaggctgacccgaccatccgggtcatatgccctaaatgcttctccctcattcagtttttcgagactcttgtttatcctaataatatctccttttatcatttgtcaatctttctccgtctttctcgagactcccgactttcttaatcccaaaaatgcttttccccgccccgttcagttccatccctcggtgcttctgatgccagtgctgtacatttgttctccatggccgttctgcgctcgttgtccgactggcagttgtggaccgggcacgcggccggacacattttcatgcatttcatttcgtcagccaccgatcggctgaccttttccacctcggccaatcattatgccatggccgagaatgaggacttttaccaacagcagcagcagattaaaaagcatcaaactgcggcaccaccgatgagcagaagcaatgtggcatttctggcggcaagcaactgcacaaaggtgcaacaaatttgaggggggaggggtgattttgaaaaaataaaaaatatatttattgtgttttgtttttagaatttggtttggtctgccttgga

SEQ ID NO: 398 - DNA, 4274 bp, Heterodera glycines
  unsure (1)..(4274): unsure at all n locations
ttcattactgcgttggaagtgatggacttgagtactttcggcactgataaagaaagatggaggaacgaaaagggcgacgagggggaggaagaggagcaattattggttggcacaagcaacggagtggtgctaattgtacgcggaattgaggtaattgggttgatgattgttggattggcatgatccaactctgatgattagcgcattctcttctcagatgtctccgatcagtgcttttcgtcccttttgctccgttcagcggatcatttgctgtcctccgccatttggccaatcgtccagcagctgtcgcattctccaaaaggagctgcttcattcgtcaaccaaaaaagcgcccttgtcaacatcccaatcaaatgtaatatttaataaatgtgccattttgaaaatttaaattttattttccatgttcattcttaaatacaaatgctttaacaggagatgatatcgcctcattcaccgcccaacactgaaaggcattcctccaagaagcgatcactgctgatcgaaaaatcccgttcaataatgctcaaagcaactggtggtgctgtagccggaactgctgcaggaaacggcgaatgccaaggccaacggccaaaaatgagtgcttcaattccagcggaagaaggaaagcagcagcagcagcaggtgaagcaatagttaaacaattgagaagatgaatttataaaattatatgactagattttgtaatttttcagttaaaaaattattattttgctaatgaatgctttttcttgcaaattttaaattaatttgaaaaattattagctgatttttcgtataggtggctttcgatttactaaacgcgtcagtttcggcggtagacgaactgtgcgaaacggtgcggagcggaatgcgcggcatttttacgtccagtgaaagtgccgaagtgcgtggcacagtcgccgataaaggaggaggaggagaagcatatttcattagcattggcaaaggatataggtgagtaattaagcaaattttttaaatgattttttgattctattgaaacaatttctgaaaatatcgtttcttgtgaatgaagtttaatttaattatttcaaattgtgtttaaggcctcttctgagtcgatttgtaagctctgctgaactaaaagcattgccaaataaacacagcgaagaaaactgtgccattttctttcggtcaacgacagaatggacaacggatcagcagaagaactgattgaaaatgatgcttttcaaaaaagagcttgtaaataaatattattcaatatctcaacagatgctttttgcgcatatgtaaataaaagctaattaactgcgaaattaaatataataaatatatttatttttgttaagacaaaaaacacaaaaagaaaaccattcattaacaaggcaaatttttaaaaccgtcaagaggcttaaaaatgtcaaaaaaggcaacaaaatggcgaacataaacctaaaatggcaccgcgccgacccacatacctgcttaacttttattaattaactcagattcgtagttttttggccaatttgctaagaaattggggcaaaattaataaaaaatttatagttaattttttattgccaaaaaatttgggacagtccaaatttttgaattgaagtttttctcttatttttttttgcttgacttttcataaaattagttacattttttagtttttcgttgctggcgtctgtgccaaccaaccaaaagaagaagcagaagagccgtggtacatcaccatgatgagaggcagtaaagcgagaaagtgccagcgaatgaaaagcggctgatgtcgctgctggcaaatcacattcaaaaaaaatttttttttacgatttttggtcataacttttttgaaaagcaataaaattttcttgcattttgcagatagataaagaaggttaaatgctctcgaatgataccaagaatgttaaatttggtcgactttaacaaaagttatgacgattttttgtcgaaaaacagtacgagttggcctactacgagttgggtttcgtccgacagaaatatccatttccagcgagactcaagtgcccactgccaaaaagggaaataaattattcggcgctatacagtgtgttcaattagaataaggacgccctatttttgggagtttgaccacttcacatgaaccgatcgagctgaatttttaattatacgtagcaattctgaaaatattaagatcagggatggaatccgtccttgaatggcaaggacgtccttgaaaatgagcatttggaaaagtttaaaaaaaatcaaagaaatttgagaaatctttgtaattttcaacaatattttgattaaattatggcattatgtcatttaaaaatgtaatttttgagaatttttgaaattttatggcattaagtcactagtcactatttttcttaaaaaattagccaaaaatcgcaaattttggtcatttttggacaaaaatctgtaaacaactcgcattaaaaattacaaatttttccggacccccctatcctcaaaaaattttttaaaaagcgcgccgtaaaaaaacccattttataaacaaaaaaagtcgttgcatggcttaaaatcgcaaaaattaggcagtttttggtgaaaatctgttaacaaattgcattcaaattttcaaaatttccccccccctctgtcccacaaaatttttggaaaaaatattccctatgaccaacggctccaattttttaaattagctactcttgaaaaacgaagaaaaatttttgacctcctaactacttacaaaattttacatggttttacacatttggacccaaattctgtttaaaagaactaacctaaatactcgaaataagtcatttttccggttaaatgttaaattacaatctaaaaaatcttccaaatcttttgttaacagatcagtcaaggcctggaatgcccttgataaaacgttaatgtctagctccttaaacacctttaaaaaattattagaattgactcttgattctcaaagcaccaatgtataaagcaattattaacttttgaggcatttttttttttttgactttgacttccattttattttttcattattgtttgttttaacctgtgatctcactcgatatttattcacttactctgagactattttattgtgatcagtcatcagagtaagtggtctccgcccttctgatggcaatttttctttatcgataaataaataaataaaaaacaattccggtgaaaaatacaagccatttgaataaatattaaccattttgcattgcatataataaaaattttaaatgtccttgaatttcatgaattttccccactatgtccttgcaaatcggcatacccgtccttggaaacggagcatggacgatggcaaccctgtttaaaccattttggatcaaaaatctgaaactcgaaaaatttggattttcgaatttttgttcgaattcagatccggggttcgaaattcgtcgaaatagatgccggattcgtgatcagcggcgacaccgaaaaccctgggaaacttgctttcatgtcttttgaaaacaaaaaaaaattcttcaaaaaaggggggggtaccatcgaatgtattaccaaattctctacaaattcgagtttattggtcctttttagccaaaatgcaacaaggtctcaattgggcaacacgacaaattttgcgacacctcagcagagcctcacaatgactttttcaacgccgcagaacaacaacaatttcaacaatgagataaacacacagtgggaaacacgacgaacacacaacacttacaaatgtccgttttcagaaccgtcgtgaagaggacgaggacgcggcagcagacagtcacaatggaaagcagcagccaagtggcgactgaagttgacgcggtgttcagccaagtgctgaatgtaagcgaatgccgtgaaagatggcaccgcttttctgacaatgagggggtttcaattcgtatttttccaggccaccccccccccaccagaaaaccaaagaattgtacacctttcacgttttagatccctcacatggacaacccgatcgaggagctgaaacgacaaatgcagaaattattcattcaaaaagagtcggaatgggccttcaaattgaacgaggtgaaaaattgcaaaaattcattgaaaaaatttacaaggtaaaattgtcttttagtcgagagagaaagtttccganagaataggccctttgcaaaatcaaactgaactcaacgcaagcg

SEQ ID NO: 399 - DNA, 1831 bp, Heterodera glycines
ttattcctccttgacctcgatttctcctctctcgctcagccaattccatttcgatcagcgtgaatatcaatcgaacgaaaaatgaatgactgatggggaggcaaaggggtaaactaccatcgtcagcagcagaattggagccaccgctcttttccctatgcattcattgcctgtcaccctgctcattcacattccaccgctgattaggcattgagattgggaaagaatacataaaagagagtttcaccttttatttctttggcttttaatttaatattttataaatttataatatttctagtaatatccaacagtttattgcttttagaaaatccataagcaaaaaattctataattaacaacttccgacagtaaaacaattgatcgcaattgcaatttctaaatggcttcgaaagccgatattactcagctggtaagcgtacaaaatttttaaaaatctttggccaaaaattcagcctacgacatcgtccactgtccaatcgcctgctgcgcttccctccgccgagggtagtgtcaatccacgtcatgcttcgccttcctcacaaacgagattcgccgccaggaagaccaacaaattaaataaatccaataatggcgccaattcatcgcggcgacctcatcaacttgaaaatcaaaacacatccgagtcactggcattgtccgcgttcgtacagtcatcgtcatgttctgcgaatgaccaagataacaatttggatggtaggaacagcctgcatgaaaattacgacaactacgactctccatcagttggagcacctggaaatcgaatactaagcgaagtaacttgagacatccaatattcttctgttgtatatataacttttactccagaccaatctgtacattagaggactcgatgaggaatgcacggatgagagactgcggcagatgtgttcaagatttgggaaggtaaagatttacttaatgttgtctaactttccaaaaaccagaattttttctgggtctatcaaaaactccgggtttacttcctgacaaacgattcctgttttctttctttttacagattgtgtctacaaaagcaattctcgacaaagccaccaaaaaatgcaaaggctatggcttcgtcgattttgagtcttcagcttcggcacgagacgccatcgaagggctcgagaaagagggaatcagcgcacaaatggccaaggtggcgtacacacatctttcctgaacttatatacattttagcaacaagagcaagacccaaccaatttatatattgccaatttaccacctgaatataatgaagacaagcttactgatttgttgaaagaattcggcatggtgatcagttcacgggttctcaggtcacaaaatttaaaaaaaaattttacttaaatcaaatgttttagacacccagacgggtccagcaggggggtcggcttttgtcggatgggctgtaccgactcatgtgattctataattgcggtcagtttcttccgtgggagcctttagtaaaaagaaaagttttaccttaagaaatacaacggtcggaaattgcctaatgcacaagctcatttgatcgtcaaatttgcggacagcagcagtcggaaatttaagcggtctacgccctctttgaggtccgtctactcggagtcgtgctataaacccaaagggggtgttcctccgctgttgacaacaccgttcattgaaccggtaaacccacaaattcgaattttatatgttaactccgtttttagacctttaaccagactgggtaccaattcggtggaactctgccgaacccttctgctcactatggaccttcgtttta

SEQ ID NO: 400 - DNA, 2165 bp, Heterodera glycines
  unsure (1)..(2165): unsure at all n locations
atctaatctaattctcaacttattccaagctcttgctctcgaaagagccacatacaactgtccatgactaaaaacttcttttctcaaatcaacaccaacatgctcaagtgtttggccttgagccttgttgatcgtcattgcaaatgctaacaccaatgggaattgatgcctatgcaagtcaaatgggtactcctcggaacagcaaaatgtgatccgagggatatacaccacctgaccagccttatctccagtcaaaatcttacacacaaccaaattcggctgcatttcttccactttcattctcgaaccattacaaagacccatgtctatattcaaatttctcattaacaaaactatagcatttttctttaatctcaacttatgccgtggaaaccccgaagggtttaaggcattcaaatactcatccaaatactcatctactctttgcctattctcatcttgagctatatctatacttgtataaacgacttcttctccaggcaacatatccaaaactctattattcatttcactaacatcaacattatttggtgctaaaatggcactttttgccatttcattccaattctcagaaacgatgcaattgccgaagatctcttctgataaatctccattacaaatacaattctcgggcaaaatcaattcatcattttcattgttcaaatttccacatctaatttctaataaatctctcgcaaattcttgctctgatgcgagagctctcatgttctttgtcaatctatatctcttggctaatctccaatactcacttctttttatcggtcgaattgaccaactcagctctggtggcatcgtttctgaattggatgggtttgacgaaagtctcccgtccaaagcataactttgccgccaaaagcaattccattattcataatctctctcaatttctcatccaaagttcttagcgcccgtttattaatcataggcgcctcatcacaaataaacaaatctgtttctttcaattcttgcaaagctttggatcttggaccaatacttgaattactcatatctaatgtcaatccaaatctattgtgcaatgtcctcccggtaggcaacaaagttgccgctataccggtaaaagccattgtacaaacttttttcttctgacctctaagcatgtgtacaatagtgttgttcacatgcgtctttcctgttccgcccggtccacttagaaagtaaaacgcgggttcattgacagggttccaaattcttcgcataacatcatcagtaacttttctctgttcatcatacatcatagcataacttctttgtcctaaatctaattcttctgctaaatcaaacacttgttcaacgtcatcttcaacatttatctgttccatggttggaaaatcggcaagcgtttttccagccctcataatacaaagcacaatttctctataagctttggcatatgcaatttcttgcctaaatctccggctaaaatcttctgataatgcatctttaaacacgttccaaagttcctccggcttggccgggttacaatggactaaaatcaaagcaaaaaattctctcaatttccatggcatttcaaaagtctccgcttcttccaatgctcttttccattcttcatcatttctaatcaagcctctttccaaacaggcagctgaaaaactttcacaatctttaacagtgccattcaaatctataactattttcaaatgatcataggagcatgctcctctcacatttaacaacaatagcctcaggtggtatcgttccggctcagccggcgacactttcaccattctaccaattgtgttaaaatgtgtctttctctcagtccattttcctttcttgaaacaaaacttctctggtatctggtgatacaacagagtctttgctagggcatttgtcttattcagttcaaaataagccattaactcagaaccgtttgcaagacgttctctaatctcttcttcttccatattctcatcaaaatagcaaatctgttcaccttgcaagtgcacaggcaaagacataatgctatggcttcggtcatacatatgcaattcaaaaattctccatactgcttccctgcggcaaacataccgcgcatncataaattctttacttcatcatggtcatttttctctctaattcca

SEQ ID NO: 401 - DNA, 2296 bp, Heterodera glycines
ccttttggctcgcacaacatgggcatgcggtgagcaggcggcccgtcagttgcttcaatccgccaacctgccgctggatcggcccagctacggggtggcggaagctcaacgactccagcacacactcgactcgcggctcggcgcgcagcaagtgcgactggtcatcttcgagcgggagcacggctgtcgcgtgctgtggaaggccccgaatcgggcacacttcaacatttgcctgctgctgcaacggagtgcccactacggatacattcagcgtccacaacaactttttcgggtaaaaaattttctcatttcattttgtaaagaaacgaaacgcaaagcaacaaaacgcaatgaaaaaattcaaagaaagaacgatccgctaagaaacgaacaattaattaattaaatacgaaaagcaattcaacgcaaagtaaaaatttaaaaaataaacgatagtaaagccgcagtgggacatttgcggacggacatttgcggacggacatttgcggacggacatttgcggacggacatttgcggacggacatttgcggacggacatttgcggacggacatttgcggacggacatttgcggacaattcctgagaaaaaattaaatgaaaaaaattttttttgttataaaaatttctaatggaagagtgggcctcgtcagtgcggtgctcttccaaaagaaaacaaaaaataagaaaaaaagtgtgtttcggccctaccgcagacacacaaaactaaagaagcacacatcaacaaattaaaaaatacaagccaaaatatttttttaaaagccaaaacaaattaattcgtaattatttaaattttttattaggcttgctgaaggccccaacaacagcctatttttacaattatacaaaataattggcatgaactaaatgctaatatggcaaagagcataggatgttgcacttaaaaacagttcttctgtttgctgtgatagcatttgcacgtactacatccattgaatttgttctcagaagcatcataattgcaccgtcttcgtcttcaaagacatggactgataaaaatatatattttttaagtacttatataccagcatagcagcaagcaaatccactccgaccagatgattgttccattaaatcaaaaaattggtgtaagtcgccatcactattaaattcttcttcggtcagggtgaattcagatttcggccccttttaaaaatagtattaacaatttttatttaataaataaggatttgtttttagtcaaaaaaatcaggtaataattttttgaaacaactccaaatcaagcaaaaatgcgtttaggcatttgcctaataaatgaactcctattaataaaatacaaatatgagagtataaatgagcaaaattcaccttcactgttacaggataataggtcgggctagaaccatcgcttttaaataaattaacggccgtttccgcagcggcacccccaaccgccccgccgactaactgcgcaccaagagtttttgcagaacttttaactgtctgtcctagcgttttttttgctaccgctttcccgacatgtgaactagcaactgcaatttgtgctttttgaacagaatatctcccagttcttgcaaaaatgtgccgaaataatgccaaaatggaccgcaatatattggtgtcagaagaacttgtagcaatcagtatgaataataagaagaaacacaacttcattttttgattgtaaaaaagaatgaaaattgcctgattgaatttccttcgaaattgtttgtcagataagacaactgctcatacataacaaaatgaatttgcacctattgtctgacggaacacctgtcctctctcaaaattgttagcagatcacaagtctcagccaaagtgcaatatttcccacgaagcaatagccgataaaaattttaaaatattaaccagtaaagtatttttacttctaacaaaaccaacattaagaaaatgattttattattattgctattatagttcattcattaatgctgtcagaacgaccaaggggaaagatttaatcttttttgatggctttgaataccgcaaaaaaggaacatcggctgacggggaaaccaaattttggagctgtgtacaaaaaacatgtccaggccgtgcacatggtcccattaattctgaaattatatccaaaattgttacacaacacactcatcctcgtgtcatcactcaaaacacggtttttgtcatatagaaaatcgattaaaatacataaagtaattttataacccattccggattcctgaggtatagg

SEQ ID NO: 402 - DNA, 5197 bp, Heterodera glycines
attaataaaatacaaatatggagagtataaatgagcaaaattccaccttcactgggttacaggataataggtcgggctagaaccatcgtttttaaataaattaacggccgtttccgcagcggcacccccaaccgccccgccgactaactgcgcaccaagagtttttgcagaacttttaactgtctgtcctagcgttttttttgctaccgctttcccgacatgtgaactagcaactgcaatttgtgctttttgaacagaatatctcccagttcttgcaaaaatgtgccgaaataatgccaaaatggaccgcaatatattggtgtcagaagaacttgtagcaatcagtatgaataataagaagaaacacaacttcattttttgattgtaaaaaagaatgaaaattgcctgattgaatttccttcgaaattgtttgtcagataagacaactgctcatacataacaaaatgaatttgcacctattgtctgacggaacacctgtcctctctcaaaattgttagcagatcacaagtctcagccaaagtgcaatatttcccacgaagcaatagccgataaaattttaaaatattaaccagtaaagtatttttacttctaacaaaaccaacattaagaaaatgattttattattatttttattattattgccgcatagttcattcattaatgctgtcagaacgaccaaggggaaagatttaatcttttttgatggctttgataccgcaaaaaaggaacatcggctgacggggaaacccaattttggagctgtgtacaaaaaacatgtccaggccgtgcacatggtcccattaattctgaaattatatccaaaattgttacacaacacactcatcctcgtgtcatcactcaaaacacggtttttgtcatatagaaaatcgattaaaatacataaattaattttataacccattccggattcctgaggtataggatgtgaatttaattcaaaaatttttttacttttgtttacttttcatgatttttttagcatttttaatgactttttggcgtttttatgacttttatgtgagttttttgagatttttacgacttaaattcccatccatactggtcaattacgagcgaaaatttttttaaataggtccgagaaaaaactgagatgcttaaacacttatctgtgtcaaacccggttacccccgcacgtgaaattaatgttatcgctcgacaaggactaacagacgaacagttaatggccatgccaagtggtagctcagtccaacgtcaagtttctcgtcaaagagaaataccagaaagaaaaaatgttgatgcaagagctattcatgaaatagtgattgatgtaagcaagttttatttccaaatcaattagatgcggttctgattgctttgggattttagggggaatttgcaattgattatactggccaacgatttttattatatgactcacgtgttcatcaacccgatgaggtcgttttttttatatttgccacagaactgggactacaacgtctctcacactatcatcattggtcatcagatggaacatttaagttagactaataatgtacataaaaagttaaaaattttggggtcgtaccttcttccttcctgcaactttataccattaatatattgattgaacattcatcaatggcatgtgcctatattcttatggcaaacaaagctatgcaaacatatgagcgggcgttaactgtcctgctgacgcacattactcatagtccaagcagtattatgattgactttgaaagaagtttaatgaattattaaatgacatttattatgtttaatatcaggtgccaaaaatgcgttcattaatgtttggcctgatgtacaaatcagaatgtgcctttttcacttatcacaatcagtactacgattcgttcaagtaattaaaaacaaaagtaaattatgtatgtacaatttagaaaaatgggcatattcattcatatgaaaatgatgaaaattttcgtaaattcgtcagatctttaacggctttatcttttgttcggccaaatgaagtcgagggtttttacgatattttatttgcaagggcaccattagaagcctatccgatttttgagtattttcgaaggtaaatctaaaccagggctcggatctgtccttatttgtaagatttgtccttatttcggactattgttcttattttgttcttatttcttaaatatattcataattttgaaattttatggcagaatttcaatattttataaagaaaatataagattttttggccttgatgttcttactttgaaaaattttcgatccgagccctgatctaaacccatctttcatgcagaatccccggaaatgaaaaatttagaacctatataatcagagataatggtggggaagctttatttccagtcgacacctggaatcaccatcagtctgttatcgataatatgtgtaggacgaataatgcgcaggtaaaaaataggtttctgtatttaattgaactaaaacttgtacataaaaaaaaaaattaaatttaaggaggcatttcatctgaatttacgtcgaaaatttcatacaatgcatcctgcattgtccaagtaattcttatgaaattttgtcttaaaaatttcttaggctactacttgtcctgaaagaagaggaaagaattgcgcaagaccgactacgatcttatcatcttgacccaacattgggtttaagtatgcgtccaagaagcaaaacgtacaaaaataacgatgcggctattcgggctttagtagtgcaatttgatttagtacctaacccaacgccagagcaagtgattaatcacttaagggccctacaataccgattagcatctaatgggtttgatcagtggaattagctcatgccaattattttgtagaattgtaaaaataggctgttgttggggccttcagcaagcctaataaaaaatttaaataattacgaattaatttgttttggcttttaaaaaaatattttggcttgtattttttaatttgttgatgtgtgcttctttagttttgtgtgtctgcggtagggccgaaacacactttttttcttattttttgttttcttttggaagagcaccgcactgacgaggcccactcttccattagaaatttttataacaaaaaaaatttttttcatttaattttttctcaggaattgtccgcaaatgtccgtccgcaaatgtccgtccgcaaatgtccgtccgcaaatgtccgtccgcaaatgtccgtccgcaaatgtccgtccgcaaatgtccgtccgcaaatgtccgtccgcaaatgtcccactgcgccgagggataatcacacttcgggaggcgcgaatccgtctcccatcaccaccgccaccacccacttcagcgccagcacagcaaatgcttgttcttaccttaacttacctccccggaggtcgggagtaggggtgggggggggggtgatttgtggggggccaacaagctgatggacaaataaatatacacacaccctctccaccacaaatggagtgcaatttgtaatagattttgtccaaaaaggcgaccaaattttgatatttttagccaatttcttgaatttttattaacaaattttcagtaaaaaacaataattaataataaaatttatgacatagaaaatgaaattaaatgagtacaccagggaaattgaatgggacgtttgagcaccgccggcaatgggaagagattgtgtgctgtttgagtaccggagtgaaatgtgccattttgctgggactgattggatatgtacgaactataaatataccagggggaaaattgtactaccgaatgtgtcaaatacagtaaacaaagatataaactcactcgcaatctcagtccccacaacccaattgacaaggaattatttagtacggaattagcggacacatgtttgagttagctttcgccgctggacactgtaacggccaaagcttcttgacaaaaaattaggcaccaatcccagccggaggggacggtgtaaaaaaaagagacttaaggcgctgggggaagagggtgcaaaatgcacaatccatctccaacatatagcttaatcagtatgtcctccaacaacccttcctcatcctcttagttgttagtcttctctctctctctctctctctcacttttctcccgcgtccgtcaaaaagtcaagcagcataaaccaacaaatacatcataaacttagttgggtccgtaagcacttcggcttatcccctcttctccctccccttctgcatttggtggtgttcggtgagtcgcgcggattacctccctcgaaaatcccctctccgccgccgcttccctgccggaggggccaaattcgctccccaatcgcctcagccaatcccatttatccattcacagagtcattcacctgggatttggattaggatttctgcccgtgtggtggtggtggaggagttaagcgatgaatgccccaccgccccctcctccacccaatcgccaaatcagccaccgaattttttttgtttgactgactgatcttgtcagttcgtcatttatttggactgctttctgctgatcacttagctcccatcgtcagcggtatccaatcacagtcactcaaccattattcattcattgatcattcattcattcgcccaagaaaatttggcagtcggccccgcaggcgcgtttcacaaccgcgacgccgttaatgcgatttgcgaccgattaatgctcactccgccccgccctacccctctaatgggcccgcccgcatggcacaaccacttcactctccgcgtctcatcgcccgttgtcgctgctatcgcgtccccttattcagttgcgccccctgtccgccccgcccacccaaatactcctttatgcccgccgcccactgtctcgcacccacaaattaccgtatgcattatgcacataaaatttttgaaactaaaattttccttttgccaaaacccaaatttatggcaattgactttttaaatcttattttttgcctaaatttgccataaatttatgccaatttatgaatggaataatgcgcaattgagcgcctaaaattgtatgcaaaaaaaaaaatcggctttagcaaaaaataaatcgattaattaccattttttgtttttatggcattttaagtttttgaacagttttttgagg

SEQ ID NO: 403 - DNA, 1515 bp, Heterodera glycines
  unsure (1)..(1515): unsure at all n locations
ttttcctaaactttcgaaaatatacttttcttcatgaaaaattgaaaagcgtccttcttccannggattgtccttggaaaccggtaaagtttcaaaaanaatttctccggcagcttttatcgtttctgccgaccatcctttggctttttaattttttaaagccctttttgaaattatattcagttgaaatccgtttaatctatttccatttgttattattttaaattttatattttaaaatacttatttgatttcaaaaatgtagttcattttatgaattgtttggttcatttatctttttgtctttttccatttttaatttctttatttatttattttttgtattttacttcgtttttattttttatatccaaaaaatttgcttttaaactttaacaatttttcttttttacatgtttttaaatgtttaaaataaaattttaggtttttactttatcatagagcttggtcatttttataatttttttaattttcatttttgatatttttttttattctgccaatttttagacgattttcaaaagcgactttgaatttatagtttaaagcatttctcattttttcactgcctttctcccaattttcgaaattgtgaaatttcattccaaaaacttcttaaattgcaagaaaatgaacaatattagaatactgccaaagttaggatagacagaagcagcctaattgcattcaaaatatttcgggtgggtggcccataattgaggccaaaaaattatacagataagcgtgaccggcgagggaatggtctgctggagccatacggatttgaatgggaaatttattattactattattttttttataattattaagtcgcaaaaatatttggcaccaaatttgtccaacatttttccgtgcgcttatatcctttttgccctcgagcagtttttgtttggttgagtgtttatgcgtccttctattggtcttttttgcgctcaagaaatttaatttttgttatgaaattttcaatctctttcaattggtttagaaaggatggggtccgcttttgcttatgtcaacttccgcccccttaacagaaaaatattgtaattttttttgaaattaaatggtactttttttaaaaatgattattcaataaacatgcttagtttttatacctcgtgaaaaaaattcattggtcaatttttggaaaaaaccttttccaggctagaattttacgtactttctcgctctcccaatttagcctgactaattttggcagcattgatgatcgttggcacacaatattttctctctttggcattttggcgatagggaggggtggaccaccggaaccgtcagttgggcccccaagtttgggccccagcatgtttttttggctataacttttttctttgttaaaaaaagcttctaaacatgttaagctttcgaatgatacaaactatgttggagttggatggaaaagaaaaaagttattgtcaaaaaattggctggggcccaactgacgtagaccgt

SEQ ID NO: 404 - DNA, 982 bp, Heterodera glycines
ttatttcgaatgtttgtactcctataattgtactcctatagtatttcctcatgatcactttttttcattgcctacagtaatcgttaacattttcatttctcattaactaattaaatttgtcacatttatttgctttggatcgcatgaatttacaatatttgtgtaattgtactcctacagtatttcctcatcatcacttttttcattgcctacagtaatcgttaacattttcatttctcattaactaaataatttgccgtctttatttgaccacactgtaacccataaaaaatgtttgccatctttatttgatcaaacagtatcccataaaaaatgaattttcatgaacaaatcccaaatttcgaccgttttgatttattgaaggcaaaaaataataaaaaatgaaaataaatgtgaaaatgcataaaaaataaataaatgaaaatgcataaaaataaatgtgaaaatgcaaaaaaaaattattgttgttgtgatggtggagggggaggaggcgggaaggggaaattgaaaggcatcatcatgggaaatggcatcatcatcatcatcggaaacggcatattcagtgaagtaggcacagggtttgctgtagcagcaggtggtcgtggatgagtagcagatcgctccttcgctctgcgtttggctgcccccgaacgcggtttatgaaaaaaatttttttattaaaagattaatgcacaacagagcctacagccgtgcgcccaatcagggctccaaaagacaaaaggggcccaaacatgggcccacaccccaagggtgagcccacacctcaggggtaggcccaatcaggggcccgaaaacaaaaggggggccaacatgagcccacaccccaagggtgagcccaatctgggcccacacctcaggggtgagcccaatcagagcccaaaaaacaaaagggggcccaacataagcccacaccccagggggagcccaatttgggcccaca

SEQ ID NO: 405 - DNA, 2993 bp, Heterodera glycines
gagaaagaggaaaaaaagttgataataagcgatcggtgcaattggtgcttagagataggccaagtgttattcggagttaggggatgcggacatgtgtttagctgtccaccgtgctctattgcgataatggccgttgatgagccaaaatgtttgatttgtttccaaaaagtaactgatttgaaatacttaggatcataaatgtgtaccggatatttgatctggatcctaagtatttacaacatttgaactcctataattgtactccacattaatatatcattcatcttcttttttttacattgcctactgtaatcgttaatatttctctaatttcgttaaccaatgccacatttatttgctttggatcctaagtatttacattatttgtgtaattgtactccaacagtaatacctcatcatcagttttttttcattgcctacactaatcgttaatattttcatttctcattaaccaatcaaatttgccatctttatttgatcacagtatcccataaaaaatgaattttcctgaacaaatcccaaatttcgaccgttttgatttattgaaggcaaaaaataataaaaaatgaaaatgcataaaaataaatgtgaaaatgcataaaaaaataaacgtgaaaatacataaaaaataaatgtgaaatgcataaaataaattattgttgttgttgtgatggtggaagaggtggagggggaaatgggaaattgaacattggcatcatcattggcggcatcatcatcggaaacggcatgttcagtgaagtaggcacaggatttgcagtagcatcaggtggtcttggatgagcagcagatcgctccttggctcttcgctttgctgcccccgatctcggtttatgaaaaaaaaatttttatttaaggattaatgcacagcagggctcacagcccaaaaaaaagttgcgccccaaacatgggcccacaccctaagagagagcccaatctgggcccacacctcaggggtgggcccaatctggaccccaaaaaacaaaaggggcccaacatgggcccacaccccaagggtgagccaaatctgggcccacacctcaggggtgagcccaatcagggcccaaaaaacaaaagggggcccaacatgggcccacaccccaagggtgagcccaatctgggcccacacctcaggggtgagcccaaccagagcccaaaaaccaatggtgggccaatatgggcccacactccacaatcactcatcctgaactcaccctctttctctgttgctggttggcatttgcaccgtttgtcccattgtcggcattgccctccaatccgttgttctgtgccgtcgcagccttagatcaaaatgggaaaatgattaaaatttaaaaatttaattacaattgcttaccgtttcggtatttgtcccattgttggcatttgcaccgtttgtcccattgtcggcattgccctccaatccgttgttctgtgccgtcgccgccttagatcaaaatgggaaaatgattaaaatttaaaaatttaattacaattgcttaccgtttcggcatttgtcccattgttggcattggcaccgccgtcgctcatccccgctgctgccttaaatcaaaggggaaaattaatcaaaatttagaaattaatcacaattacttaccccttgacaattggtttcattgttggcattggcatcgccgtcgttcaccgccactgccaccttaaatcaaaatgggaaaattttttaaattcaaaacattaatcacaattacttaccgtttcggtatttgtcccagtgtcggcactggcacccccgtcgttcaccgccactgccaccttaaatcaaaatgggaaaattttttaaatttgaaaatttaaacaattacttaccccttcaccattggtccgattgttggcattggcgttggcactgatgttgatcacattgtccaattcctcaaaaaaaaaaaaaaaaaaaatttaattttgaatttaaaaaaaatttcaaaaaaaaaacccacttcgttggctgttcgatcagcttcattcatttcaacattgcctttcagcttgaacaccttaaatgtgagcgggaaattattaaaaatttaaaaaaaaaagaagaaaaaatacccttcgtttttgtcctcgtcgagcatttgctgccgctgttgtttctgtgcctcccggtgtataaaactgtaaaaaagcgaaattgaaagaaattttgaactaaaaaaaagttacattttttacaaggtggatggccacccgcgcagccattcttttttgatggcaaggcgcgccacctgtacgcctcgcaaagtttggcatgtcaaaaaaaaaacaatttagaaaaaaaaaaaagttaagcaattgatgggggggggggaggaaagtttgcattaaacggcaaatgcagaaggaatgtggtgcccgttgacccttgcaatgaaaacagtgcaagggaagggcttgggaatggattgacatatcgactcactcctccccaattttctctgcctgtctgctattctcatctcttcccctctctttcacactctccatctctctccgacccactcctccccaattttctctgcctgtctgctgtctcatctcttcccctccctttcgcactctccatctctctccctctcacactctctcttattttccactgtctgcctctctctctctcatttatctctgcctctctctttcatttattctctctccctctcactctcttttattttccactgtctgcctctccctctcttttattctcttctctcattttgttctttgcctgcataatatatgcacggccggcatcatcattcgccgctgacgccccccttccttcaacacacgcacacccccccccccatcatcaccaaattctgatcaacactctgatcaatgatcaacccccctcccccttgtactgatcaccccatcacccaccccctcaccgctcctcccaatttcgc

SEQ ID NO: 406 - DNA, 6143 bp, Heterodera glycines
tggctttttagcttgtataattcgtggctaatgaaaaattcttaattttaaacatttaccgaatttatattttttagggttttcccagttatagtttttagggaagccaattcttaaaagttatacaaaagcaaaagggaaatttaacaaaaatttttgaatttcaagataaaattattcttgaacattaaaatgaaatcaattattcactcattaaaagatgacaattttctataaagacaaaatttatgaagaaaaaaaaacataaacaaaatgctaagagaaaagtaaaatattgattcaaattagaaaatgaaaaacaaataatattttaaataatttgctaatcacaaaataatttatacatgcagaaaattcaaaattaatttcttttcgaaatattttggcctcaaaaaatgctgcaaattaattttgtgacatttttcttcatatttctaatcctattaagcatacaccgttaaggatcgactttttaggaattagtcatcggggtctaccttaatagtgtatatttttactttaatagaatagctttctacctttatatagttctatttttctttttttttctagaatgtgtttttgcaaatcataccgatgaacagggcagggcgcacatttaagagctagtttttagcacataaataaagaattttttagggtttgcatatatatatatatatatatatattgaaatccgtgaaaaaatgaaaataattagcaagtactcagttttttaatgcattaataatatctaattgccgatagtaaattaaccaaatttatataatgaatattaggacctaggaatgatttactgataaatagagaaatcgtgaaaaggttatttgccgaatttcttaatcaatctatagttttaagactatttttttaatttttcaacaattttttcgtttatccaacaattggtttcctttttcatttttaatattaaaatttttggctttatgtctcccattccctaagattattttgttgtaagaattgttattcaccatttttctttgtataattattctcgccactgtttttaaaagttgaaagaaataaatcaatttaaaaaatcatacgcagaaacagaagatgtcaaaatagaaaaaataattatataggcataatttttgctaaaatcaaattgattttggctttttttaataaatatttattattaaagaattttattgtataaattacatttttacgtttttacgaaatttttgctcaataattttatggaatatagaggcttttgcgcaaaagtgtgaagtttttggcaaaataatcttcattttgacaattctctttagattttggcaaaattaattttataactttttctttaattgatttataatttttagaaaatgctgaagcttaatttcataattattttcttcaacattttattatttataagcattttggcggttgatgatttagatttccttgatgatttattgaatgacctcaagacaacgacgacacaaaatttgttaaaaaaacaaaaatttgaagaaaataatggagggttcccatcagaacaaggattcaaagtacgtacttcgatttgagcttccgtgcttacaaattctaggtgtatttatttccaagaatgtatttgcaaaatcagtttaccgatgaacagggcagggcccagatttcagagatagtttttcaacacattaatttttttttttaaacctttgactgataaaatatattttgtgttttgcaaatataagggcgattttttaaaaaaaaattcattctttttttgtgaaaaaaattttctgtagagtgcagcggaaccgggaattttgggcataaccgggaccgggaccttttaaaaaaaccgggaatttttggctgggaaaaccgggacttcggtacccagttgtactcagctgtccgtgtttaggtcccggtcccgctgcactctagttttttggcattacaaattcttgtgtggtacttaattgaccttttgacttcttttatgttttgaattataattattattggcgttttgttatcttttttatggaccttaaaatattagtgagtcttttactttgctgttcggttttgtttttggttttttatcttgtcttctctggaattgttttgaatttcttttgatgctgacttcttctcaattgattgttgtggtctcgtctttttaattattattgttgcggtttaaaatttatcgtcgtaaattattttgttttgtttatttattaaagtgtttgcgaattcgttttgaaacaggtgctgacaagccgacagataattgtgtttgatccatttctgaaaagagacaacccatccccatccaaatttgttgattttgtacaacttggcgctcctggcgacaaaggtttggcttagttgcgactattcattaaaggataatatcggccataaaatttttgtgaaatcaagtgaacaaagtgatttctataccctcgtgttgggtttaaagcatcattcggcgtatttttgccgaccttacaactttctgctcgccgattaaaagcactcgtgttgtgctttacgaattaacgaattttgttaaaagctcgtgttgttttaaaactgatctttattgttttatctcgtgttgataaattctgatgattttccgctcaccaccactgacaaggcaaaggctcagaatgcaacaagccgctccagtccagcatctccaaaatgacagaaatgaacaaccacaaaatatagaaaatcggccgattaacaccgctaacactggggttgccgaaaattctgtaaacgatggcgaaattttagcacacaccatgaactccgaccaaattcttcacgccgttttgaatgttgggtcagcaaaccgacaaagtggacatggacaagatgaagaaaatgtggaaaatcaagatttggcaattcatccgaatttgacacagcaacatggaggtttgagaatgcgtttcagacgcttgccaaatttggaagaaaacagtgaaagggaattgtggcaagctgggaacgaaaacaatagtggtcatcacagtcatcacattctaaatcgaaattttctgcgcacatcaacgcctaataacgagcacattattcatgagttgcatattcagcacccgcgccaaaaccctcccaacattcaagcaaatcctaattttgtgcggcaaaatttgcaaaaaactgtgactgctaaccagcgccaggccaacccaaacgttctcattcctccacctcaagttattcaacaaccaattgcggtatatccgccagttcagccaccaattccggaaacttattggggatatcccgcaccttactatccacatcccccaccacctatgggttacccaaatcagcaaatgtttggaaatgcgaacactaaggtgccgcaaccgacccaaattcgacaaccatacaatcaccaaattccaactcaaataaatgcccagcaaacagctcttaacggcctcgaatgcgttttaattctggacaaattgccggacattaagggcaatgaaggaaatgacagcattaaatcttttttcaaaaaattttcacagtataccagcgattggccgaataaaaagcgcattgattccttggaatcgaaactcagtgggcgcgcagagcgagcatttaattcggctttggccaatgaaccgtttatatttgaaaacataaaaagacacattctccaacaacttgaggcgacggattgtcatgaaatggcagcatttgatgaattaatgcaaggcattcgccgaaagccaagagaagggctggatgatttggccgaccgaattgtgagcctggtgcgaagggcttatccgggactgacgcgaaatttggcggacgagtattcgattaaacacctaatccgcagtttcgataatgccgaacttgccttgagtttggagctaaatcgtcggccaggaatgagttttgatgagtttgtagctctagctgctcgtgccgaaacgacccaaaatgcggcgagaagggccaattcggacagaacgcaacaaaattttggccgtagccagccacacagacaatatgatggaccgatggccaaacaaagcacaaacgcatttgagccgaacaaattccagcgattcaatgaaaatcgaatcacgtgccaaagttgtggaagagagggacatgtggcgagaaattgttttaagcgttttgcagatcaggatcagcgtcgatattttggccaaaatcaaaatgcgaccggtgccaatagagcacaaatgccgacacattcaaatccgaatgtcagccaaaaatccgaacaaaatcagtttggacagcgccagcaacaccagcaatcacgaaattttctaaaacaaaatttcctggtcgaacagaacgaaaagcaagttgagtcttccaatgttcagtgtgccggtgttatcagcaatacacctgaaatgttggatttttttcgaaaattttggacaaaatgcaatgaaacggtggatgacggacaaaaagaagcatttccaatcggcaaaataatggcaataaaggtcaaaatctacgaccaatcagctgattcaatgatggatagcggggcccaaatttcgcttgtacaggcgagttttgtcaaacacctcctagagaactcaacactgcaagtcgaaaatctcaaaattttctccaaaacgcgaaatgtcgtggacatcaatggaaaaatcgttgagtgctatggcataatcatcctcccaatcactaggaaaggatgtgaagcagttgatgtcccatttcacataactgatgcaccgattggcctgccaatactttttggtaccaatgccatgggactgttgggttttaaactttttgactcacaaaatggtgagctgatcgaatttgaatgcgccgataataaatcggattatgtacgcattgtctacagtacactgatcgaacctcactcaacaaaatttgttgaactttctgtttcaccaaaatttagcggcaaagactttatcctttctccaaacgatgaaagaaacgacttaagggtcgaaccgtcgctaaacaaagagaggcgcggaaaaacaattgcagccataacaaatttttctcaaaatgcgttgacattaaaggagaatgaagaggttgcggttgtggaagcaattgaagatgttgctgatgtggaaaactgcttgggggattcatggcttttctcagaacccagtgaggttaaaatggagaaaccaaagcccgaaaatgaggagacaaatgcaaaatttggccttttgagcaaagagaattcggaaattcttgaaaatttgctaaataatttttcgagaatttttgcatttcatgactatgaattgacgcaaacagagatggtaaaacaccagattgacaccggcgaagcaataccggtcaaacaaaggatgaggccagtcccatatgcctatagagaaaaggttgccgcaatgatccaagaatatttgggaagaggaatcattcgacactcaatttcgccatgggctagccccattgtaattgtgcccaaaaaagacggatctttgcgcttttgtgttgattacagagggctaaatgcaatcacaagaaaggattgttttcctctcccaaatatagaacgtactcttctaatgctaggaggacgaaagttcttctcaactttggattttctctctggctattggcaaattaaaatggccaaaaattcaattgaaaaaacggcattttcaaccgaatttggcttacatgaatttactgtaatgccttttggtctatgcaacgcagtcgcaacgtttcaacgcttcatgtcacaattgtttgggagtaaattaaatgattttgtgtttgtgtacatcgatgatgtactagtggcttctgaatcttttgaacagcatttgatacatcttaaatttgtctttgaacaaatccaggaggctggattaaaaatcaaaatttcaaagtgtcagttttgcgctgaagaactcaaatttttgggacatattttgacgcgaaatggcataaaaatggacgcggaaaaacgaagccaattttggaattgccggtgccgaaatcgaaga

SEQ ID NO: 407 - DNA, 7569 bp, Heterodera glycines
  unsure (1)..(7569): unsure at all n locations
cgatggacaaacaaagcacaaaccncatttgtgccaaacatatttcagcgactcaatgaaaatcgaatcacgtgccaaaactgtggaagagaaggacatgtggcgagaaattgctttaagcgttttggagatcagaatcagcagcgatattttggccaaaaccaaaatgcgaccggtgccaatagagcacaaatgccgacacattcaaatccgaatgtcagccaaaaatccgaacaaaatcagtttggacagcgccagcaacaccagcaatcacgaaattttctaaaacaaaatttcctggtcgaacagaacgaaaagcaagttgagtcttccgatgttcagtgtgccggtgttatcagcaatacacctgaaatgttggattttttccgaaaattttggacaaaatgcaatgaaacggtggatgacggacaaaaagaagcatttccaatcggcaaaataatggcaataaaggtcaaaatctacgaccaatcagctgattcaatgatggatagcggggcccaaatttcgcttgtacaggcgagttttgtcaaacacctcctagagaactcaacactgcaagtcgaaaatctcaaaattttctccaaaacgcgaaatgtcgtggacatcaatggaaaaatcgttgagtgctatggcataatcatcctcccaatcactaggaaaggatgtgaagcagttgatgtcccatttcacataactgatgcaccgattggcctgccaatactttttggtaccaatgccatgggactgttgggttttaaactttttgactgacaaaatggtgagctgatcgaatttgaatgcgccgataataaacggattatgtacgcattgtctacagtacactgatcgaacctcactcaacaatttgttgaactttctgtttcaccaaaatttagcggcaaagactttatcctttctccaaacgatgaaagaaacgacttaagggtcgaaccgtcgctaaacaaagagaggcgcggaaaaacaattgcagccataacaaatttttctcaaaatgcgttgacattaaaggagaatgaagaggttgcggttgtggaagcaattgaagatgttgctgatgtggaaaactgcttgggggaatcatggcttttctcagaacccagtgaggttaaaatggagaaaccaaagcccgaaaatgaggaggcaaatgcaaaatttggccctttgagcaaagagaattcggaaattcttgaaaatttgctaaataatttttcgagaatttttgcatttcatgactatgaattgacgcaaacagagatggtcaaacaccaaattgacaccggtgaagcaataccggtcaaacaaaggatgaggccagtcccatatgcctatagagaaaaggttgccgcaatgatccaagactatttgggaagaggaatcattcgacactcaatttcgccatgggctagccccattgtaattgtgcccaaaaaagacggatctttgcgcttttgtgttgattacagagggctaaatgcaatcacaagaaaggattgttttcctctcccaaatatagaacgtactcttctaatgctaggaggacgaaagttcttctcaactttggattttctctctggctattggcaaattaaaatggccaaaaattcaattgaaaaaacggcattttcaaccgaatttggcttacatgaatttactgtaatgccttttggtctatgcaacgcagtcgcaacgtttcaacgcttcatgtcacaattgtttgggagtaaattgaatgattttgtgtttgtgtacatcgatgatgtacttgtggcttctgaatcttttgaacagcatttgatacatcttaaatttgtctttgaacaaatccaggaggctggattaaaaatcaaaatttcaaagtgtcagttttgcgctgaagaactcaaatttttgggacatattttgacgcgaaatggcataaaaatggacgcggaaaaaacgaagccaattttggaattgccggtgccgaaatcgaagaaagatcttcattctttccttggatttatgacatattatagaaaattcatatattcatttggttctgttgctgccccattgttcaaactcctaaaaaaggatgtgaaattccaaatgggagaggcagaaactcaggcagtttctacattgaaggaaaaaattttgtcagaagtcgtcctttatttccctgatttcaaagccgcaatggaaaatccatcgagaaaatttattataatgacagacgcatgtaaaacggggatttctgccgttctctgtcaatcggacaatgaaaatcggatccgtcccatatattttgcttctcgacagtgcaataattttgaatctcggtactgcccgacagaattagaagcattagctgtgagattcggcgtcaaaaaattttcacaatacataacaatgattcccaccaaagttctaaccgatcataaagcgttggttccgatgtttaaaagcaaaagtgaaaccggaaacgcacgtgtcgataaatggataatggaattgagtgcacgttttattttggaaattgagtataacccaggaaaggcaaacataattgcggatgtgctttcacgttctggcgcactgaagccacgtgaattggcggagaaaatttttagagttgagcaagtcgatggaaatataagtgcttctgtgccaaaaatggaaatgattgagtgggtcaacgcaattaaggaaagtgagctcggaaacctttaccaattcctggaaaaaaggaaattgcctgaagataagcgggaatgtcagcgactttttgacaccattcataaattcacactgattgagggattactgtatttccatgattcgaattacggtaatcttcgacttttcgtgccacaaaaattccgcaataaactgatcgaagaaaggcacgaaggcaaatgtgcgggacatttaagcggcaaaaagattttcgggcaattagcagaaagatatttttggccaaacatgcgggcggattgtgtaaatgcggtgttgaaatgtcggatctgcgcacacacccgaaatccaagggcaaatgcgccagaattaagaccagtgattacggcggaaccttttgagctaatatgcatggacattttatcaattggaatgtcagaacggggaaatcgatatgttttagtaatggtggaccattttacaaaatatttgatcactgcagcaattcccgataagagcgttgaatcagtcgcaaaggcttttgtcgaacaattggtgcttgtatttggcaagccaaaacgtattcattccgacaagggcgctgaatttgtgaataaaacaatggaagaaatcagccaaattcttggagttgaaaagagtacaacggcagggtacgacccaaatgccaacggacaagcagaacgggccaatcaaactattttaaatatgcttaaaaggtcaactgattcaaattggtcctgggatgaccggctgccttttgtcacatttgcttttaacattactccctctgaaaccaccggattttcgccttacaatttactctttggccggccagtaaattttccgtcgtctgataatgttaattttactgtaaatccttcttacacaatcgatgaagaaagttatctgcagctctttcgtgaaaatttgttaaaaattttggaaaatgcaaaaaataattcggacaaatcaagagaacgaatggagaaatggtttaattcgcagccaaaagtgactttgcagaagtaccaaaaaggcgaacgcgttatggttatttttccgggagctaacaaacgctcaacacataagaaattaaagtggaatatctttggaccctaccaaatcctcgaaatttccaaatcctcggcaaaagtaacgcctgctgataagaaaaatgctgatccaatttgcgtcccattagaacgtctgatcagagcaccggatggacttcctaatatttcaacaactccgcgcggcaaaaatgcttataaaaatgtgttaaatgtgatgactattttgatctttgaagaaaaaagcatggaatttgaacaggaaaattttttgggaaaaacaaaaacttcatcagggacgatgaatttttcagaggaggaggaaaatatggacattgccgaagcggagattaagtggacgatgacatgtgaaggcggcggacatgtgttgtgcaaaaaattgttggccggcgatctcgaccccgtgctcagcaaaacacaaggaatcggtgctatggttgtgcagactccattacaaggactcatcacactattcattttgcggtccaatgtttcaatgtctgcgtcgaaagatttgctgaaggtcgcaaaccaattggaaaaactgggtggaattgctaaattgcaggccattttgacttcggaccctgatttcgaactcttaaaatatgtcgaagaacgtggtgatgctgtgcgttcgggaagatgcccgggaatcgaagaagtcgaaatcatttggaaaaattgggtcagcgagttgcgcatctgcacacgaagcattgaaacgcacgggatttggccaaatatgcttagaagcaccaatttcgctttctgagctgccggaagccgacagaattggatgggaaaaagtctttaatgctggcacatgggcattggagaaagtccgcgcaaccgttgtttttggcaaaacaacattggtccatcagccgagagtgatcattggagactcaagtgctgcgcaactttgtggcgaagcaaataatcaaattgttgctcacttcatcggcaccgtacaagggacattgggcgacgtgatccgcgcattggacaaatcagtactgacatcaaaagtcacgtcggcactgatcatccttggaagagatgcactgatcaaagggcaaaccgtagcacaaattatggaagaatgtgaacgcatcaaatcaatttgcggacaatttgaacacgttcgatttgtgtagcgtgaaaagcacgcacagtacaacgaattgattcctggattggagcacattgccgcagaatggttcattgcgctgaccgagaatggcaggagtttgattgagatgtggagattcggagacactttcgacatgacacgggtgcgtgctgacggaaagattctgcctgaaggactgaaatgcctcagggcatggatattcactcaaatttctgtttttcccgatgacaatttccttggcattcgtcgttcttctcgctcactccattctgtacccgctcaattttccgaattgtcaattcatcgtcctcatcaattttctcggggtcatcgggtccatccatattctctccagccaagctcgagccgcaacactcaaagccgcagtgatggaaaagcgtacagtagccgcagccgtcgccattaagccataaatacctttgaccccgcctttcttttctcaattttcatatttattgttctaagacgaggggaccgtcttcttcagaggatggggatgtggtacttaattgaccttttgacttctttttatgttttgaattataattatttgttggcgttttgttttccttttttttatggaccttaaaatatttgtgagttttttactgttcggttcttgttttgttttcttgtcttctcttgaattgctttgaatttcttttgatgctgacttcttctcaattgattgttgtggtctcgtctttttaattattattgttgcggtttaaaatttatcgccgtaacttattttgttttgtttatttattaaagtgtttgcgaattcgttttgaaacaggtgctgacaagccgacagataattgtgtttgatccatttctgaaaagagacaacccatccccatccaaatttgttggttttgttcaactgcttccgtccaattggcagcaccctccagaggaattaattgattgactgaacgctcaaactctttaccattgctcagctttacttttgcgctgcgcggcttattagggggaaacagagagagaattcgcccgaggggccagtggttccgtgggagatccccctgttcaataaggacaatatctccaatttttggaggttcgggcgcaaaaactcttgggccggcatgggtgtctttggtcctacttcttaacagtaaaaggtaatccgtggtccaaattttccaaaatcgacggagcgattcgttggtggtataccacagatgggccaacttttcggatgaggatggctgaaagggttttcctggttcatccggctcgactatggcattttgagaatggggggaaaggaaatccactgggcgtagggggagaggaccgtctcccaaatcggaaacgaaggtaattggacggctgttcaaaatggcctcaatttcacaagttagtgtaaccaattgtacccatgttggggttagccttcccaaacttcggcggaacgctgttttgacaagccccaccattctttcgtatactcccccggcccacggactgtaggggggattaacttccactccaccggaaaatcgtagtaagccataagaatttgcctcccaaggaccaattgtgttccattgtcggaccagactcgttttgggggtgccctccgggacacaaagcggcggaaagccgagagaaaatcagtggtgctcagagagccccactatttcaaatgcaccgctctacaactaagacagctgaagagtaagacccaagcctttttgtgtccctccgggggattaaacaaagtgggacctaagtaatccaaccccattaaatgtgaacggcgggcttgggttggtccgtgcgtgagggagcgggggcatagacgggagggagaattaatggctttgtcctttttacaaactacacactccctcagaatgcctttgatcaagcggcgcgcccgaatgcaccaaaattcacccaaaaatttggccattgtgtagtctaccccggcatgtgctagtgaactatgagccttcagaatgagtagccgagtaacccacgaatcgcggggaagcactatcgggtttttaaaatcgaccgattgatgagcataagtgagacgggtgcggaggcggattagcccgtcatttcccacataagtgtcacccccaggggacatggatgcctattccctttctatgatccaattttttgccactgttctggccgctaatgacgacggctcggccccctcaagtttagaaaaaagtaaaatttttgcttagctgcttcacttttaccaaaaaacttaaacaagagaaataaaacaaaagttgtggacgctaaaaactttgaccagctcccaaagtcccggggattaagaacggaaggacccctgggtggctctaaaatggggacggcaatttggacaagttcggtctcctcgttcgtggtctcctcgggtggcagaattatttcccggtactcgtttggccattccctttctgggcgtttaagccattctggaccatagtgccacaaatcacagtgattcagttcactgggagagagcccccgggttcccaagtcggcagggttatccgtagacct

SEQ ID NO: 408 - DNA, 1779 bp, Heterodera glycines
taaaaactggtgcctggcaattgacgagcccgtcaatgtcccgccgcagatgggtgatggaattgttggacaagttcaggctggacaaccgagtgaggttgacaaacgatttgggaaaactcgaaaaaagaaaattcactttaaaaaacggcgaaaattttggaaaaaacggaggcctacccggtcacaatgtttgtgcttatgtccaaataggcaccgatttcttcaggcacttcgacaatttctggggaaaaaaggattgggataaattagagagaaaaattgggataaattagtggatggatttttgaaaaaattgaattttaggaaaataaaagcctcctagaggaggggtcagagttttacgtttgaccaattttctgtttttttggtgaaaataagcacaaacttagaaataagtgttcacattttggggaaactggaatatgccaagttcgtgacgatttgaaaaaagatttggcccaaaattattcaatttttaacggatattttatttgattttacgatataagaaaattcactaatttaccattatacataaacctaaaaaaacatgttggctatgacattttagaatgtgataaaaatagttgaaaaatgaaaaatgctaaaaaatgaaaattaattccaaattatttaccgtatcaaatatttaaaaaaatgcttaaaaattaaaattttttccaatttttttaccgtgtcaaatatttaaaaaaattgaaattattttccgtaataaatagtctaaaaaaattcttaaaaatgaaatattatttccgcatttggcactaattagccaattaattaattgcccacattcaatttgccaatttccattggcaactcgctgagaatttcttaaaaaataaatattattttataaatgtaaagcaaaaaattttaaatattattataggtatatggggaaaaaaagaaaaagaaatatttggaaaaataaaataaaaaatggcgtgcgttcgagcggactcgaacttaatgtatttaattgagagcagcaacgctaacgactgcgttatgcacgacaacagcaaacgatttaatttccttttcaatattccaaaaaaacttttgtatatggaatttgagagaaaacaaaggactaaaatcgactaattggattggcgccgaaaagtctcgatattgcgccgagaaaggtttacggggtgtgatcttcgagctctgagggccaaaaaaatgtaaaatttgaagtcatgaaaccgacattggaatttttgaaagaaaaataaaatacaaaattcaatatttgaatattgatactcgagagtctcgaccctcgtgatgtctttttctctatgattatgtgccacgccatacaaatgttccctctcaatctctcaataaacacacacactcgtcatgtctttgtttctctgtccatcaaatataatttggtatatctcacatatctttgtttctctgtttacataaactctagcactctctatatcttctttttgcgtccctctcctgtctggtgccattgaatttagtagaaaatgagcagatgaggggagagggcaaaaaagatgtttggaaagcgggcacggtcgattttggccatttggctggagggggggggcaaagggtgatgaatgtgagtagaaatatgttggcacaaaatgccagaatggacgcggaacatttattggagacagaatgtgaatggcactcggtggcgatgttcgtttcccgtcagcggcccggcaaaatgagagg

SEQ ID NO: 409 - DNA, 1051 bp, Heterodera glycines
acgactgcgctatgcacgacaaaaggtaaagatttattatttccttttcaatattccaaaaaaagttttgtacatggaatttgagagaaaacaaaggactaaaatcgactaattggattggcgccgaaaagtctcgatattgcgccgagaaaggtttacggggtatgaccttcgagctctgagggccaaaaaatgtaaaaatttgaagtcttgaaaccgacattggaatttttgaaagaaaaataaaatacaaaattcaatatttgaatattgatactcgagagtctcgaccctcgtgatgtctttttctctatgattatgtgccacgccatacaaatgttccctatcaatctctcaataaacacacacactcgtcatgtctttgtttctctgtccatcaacataatttggtatatctcacatatctttgtttctctgtttacataaactctagcactctctatatctctctttttgcgtccctctcctgtctggtgccattgaatttagtagaaaatgagcagatgaggagagggcaaaaaagatgtttggaaagcgggcgcggtcgattttggccatttggccggaggggagggggggcaaagggtgatgaatgtgagtagaaatatgttggcacaaaatgccagaatggacgcggaacatttattggagacagaatgtgaatggcactcggtggcgatgttcgtttcccgtcagcggccacggcaaaatgagagggcggagggggggggggatgtatattttaaatgaatttttgaacattgaaattttaaataaaaagtttaaaacaaaaaataaatacatataataattttttttataaattctattaaattttgtattaataataattttggaagaaatctgaaatatttttattaattaaacagacaaatgcattaaaaaaagaatccctcactggacgcaactttgaatatatattttccgggattaaattacagaattcataatgatttatattcacgtaaaacatatatatagccctacaaaatctgctctttcaaatgta

SEQ ID NO: 410 - DNA, 1689 bp, Heterodera glycines
gggggggggcacagcactcaaaccaacacacttttggctgtttctgtttctgttggtggtgggggatgaggccaaagttagtgacgacgacaacgccggcgggcaagggggaaaggagagaaagtgcgtgcgatgatatatttgtggaaaatgcaattacgcctctcttctgctggaggagaagggggaaaaagtgggggaaagaaagaggagagagagagagaagagagagagagagagagagagaagagagagagagggagaaaagaggcggaaaagaggagagagagaaaggggagagagagagaaaaaggggagagagagagagaataagaaaaagagtaaacatggaagatttacttatttattaaagacataggaaaaaatgtattacaaagaaaaaaaaaatgaaggagaaatgaacgaaccttatgctgtcgcggaataggtcaataattaatgttaatgaggggggggggcataaaataattaacggcaaaacgatgacccaaccaaaagaaatataacagacacatttttgaattgaattttttcatttctaatgttttttatttgggaaaaaaattctggcacaggaaaataatttttgcaataaaattggcaaatgctccactcccgggccaagaaaacaaaataaatttctgttttggttagtgctgctttgtaatgatttaccccctccccctgctgttcatcagcttttccaattttccgcttgtccataaataggcaaccgaaaagcccacaaaatcactcattttgcaaaaaacattcgggtcaaaactttgtgaaccggagcaagagaatcctgaaacccaggatttttaatcccgaaaaccggtccgggtcaaaattttcttatacttatccggaagtttcaaaagtccgggctctcctcaactgcgatataatccaaatttttaataaaataaattatatttcaattgagaattcaaaaaaggatcgatcatttctcaaataattcattccgctgatcactgcttggcaccgctgggctcgagaacagtttttcgttgcttttattggtctgagacaatggcctaatttaattacaatttaatttggtgaaaaggaaaatttagggttcttatcctttttgtccccccgttgaatttttttttttaaataattttttctagactaattttatacgctgaacacgaatctagcaatcgttttggccgattccgaaccctgacccgaactcgaacaaaagtcgaaattcaaatttttaaaaatttacttttatgttagaatctgtacagaataaccagtattgatgtttcaatgaattgtgactaatttatatctagtattaatcaattttcgagcaatggtgaaaaattttaaaaatttgaattttcaactttttcttcgaattcgggttcggaattaatatgaatggatgtcagattcgtgatcagcgacctctaaaaaccccagggaatgtgtcttcatgattttttaaatttttattatttttttcgaaaaatggggggggggacaaagtacattttttaccgacgaaattctgtagttgactaaaataaacgtcatatatgtgttcagcgcataaaatttccctagaaaaaattatttttaaaaaaaattcaagggggggggtaacaaaagggataagaaccaaat

SEQ ID NO: 411 - DNA, 3001 bp, Heterodera glycines
  unsure (1)..(3001): unsure at all n locations
aatttgaataaatagcttttttatatgcatttacctccttttcttttgcccctcctctttttctttccccatttttttgggtcatcattttgncgtccatcccacagannaatcgaggaggaggagatgacaaaataaataaatgtgggtcatttcgtttcaccattttatgttcagcagaacttttattagacaaattacggaacattttatttattttttaaataaaaattggaaaataaataaatttntaagcctattcttaaaaatcataaaatttgaaaaccttggtggaattcccggattaaaaagagaattttcgcaaaaaaaaagcatattttagagaaattttgccaaaattttaaaaaatttaatattttaaatgatttaaccttgattagagttaattaacacagattttaaactatttttaatatttaaatatgcagaagtttaaactgaaaaaatattgcatattttaaattaaaaaatgtcatcatcatcttctgattcggattcatcaaatgaagcttttacaccagcagcagataaagatcagggtaataaaaaataaataaaaattaaatttggcaaatggcagaaaatttaatggcaactttctaatattgaaaaaggcatttatgtagtagatttagggggccggcaaaaataaatttacaaaaaaattttcttcatcaaagccatctaaaaaggtgtaaatttaatgaacgaaatgaaaaaatttgaaattttttaaaattcataagaaattaccaacaaaaaacttatgacaaatttttagaaatgagtgatgacgaaatcattgttcttgacaagaatggacctgctaaagcgactcggcaacagtttaaggtgaaaaaagctgaatagaaacaacgaaaattgacatttaaaatttggaaaaaaaattttgtttgaaatttaattaaaattatttatagagttttcatgaaaatttcattatttttcattaaatttccaatgtttttctatagaattttcgtgaaagatttatcaaaatggagatggagctgaaggagacaaagaatctgcacatgatcaccaagctggagcttgagaatgtgagtttggcttaattactaaaaaaataaaatttacaaaaataaaaaataaagatttaaaataaaaaatatatatttttaatttaattattttttcaatttttaggtggcacttcgagaaaggatgaagcaccagaaaatcatggtcaaactgaacacactgcaggcgaagatgctcaaaatggagcaggacaaacagcaaacggaaatggagaaaaatggtagggaaattttaaaaaaaaaattaaattaattatgcattcaaaaatttttaataatttttggtgggtttagaattattttttttcaataattcggaaaaatttgaatttttattttctcaacttttacatttctccggggatccatccttaaaaagttgaaaaatgttttaatttttttcctgtgcttttggtcaatgtaattttcgattttttgacaccttcgttatatatggaaaaaattttaatttaaataaaaataattaaattaaattttgttttaatgtttaagcttcggtcgaccaaatcaaaaagttgaacactgagcagcaaaggcttttccagaggatcagcacattggagaagattaatcagcaacaaaatgtgaataaatttatggggaggggggaggagaaaaatttttcgtaaattttttaaaattttataaaaattacgcacacattttcaaaccaggttaaaaaaaaattgtgtcataacaattattgggttcaattacagaaatccttagcccataattacgcatttccataaatgacatttatttacggcagagttcccaagtttttttttttcaaaataagacaaaatggcctaaaaactaagattctgaccccaaaaataagatttttctaaaactaatatttgcgtgaaggaaacgcaataaaaacatgaaaaattgacttaaaacaatattttattagcgtaaaaacgaaggcctgtcaactgaaaattttgtaaatcagcattttgaaaaattttattcaaaatttaaaaactaataatgtttttgcggcgtgctttttccaaaaaacttttgggaattggggggccggcggtgccgataggcgccgccgggaaaatttttgaaattttgtatgtgatttgttaacagaatttcaccaaaaaaatgaacaattttgagattttgagcccatttttatgaaaaaatatgcagacgacacaaagggcaaattcttcgccttttcgactttgctttatatgccggaattcttttgcgtagctttccaaataaacatgtttacgttttggtggcattttgtgaatttcactcaaaaaatgaaataaaatgtaattttttttaaatcaaattaattcaaatattcgcttcagaaaaaaatgaaaaatcaaaatagtcattcaaatttttcattttttattttcaaatccaaaaataagcacaaaataagcacgtaacgctgaaataagcacaaatcttagaaataagcacatttttactttctaagatccgacccctcaaaataagcacaaatcttagaaataagcacatttttactttctaagatccgacccctcaaaataagcacaaatcttagaaataagcacatttttactttctaagatccgacccctcaaaataagcacaaatcttagaaataagcacatttttactttctaagatccgacccctcaaaataagcacaaatcttagaaataagcacatttttactttctaagatccgacccctcaaaataagcacaaatcttagaaataagcacatttttactttctaagatccgacccctcaaaataagcacaaatcttagaaataagcacatttttactttctaagatccgacccctcaaaataagcacaaatcttagaaataagcaca

SEQ ID NO: 412 - DNA, 5858 bp, Heterodera glycines
  unsure (1)..(5858): unsure at all n locations
gaaaaaaaatttgttgaaatttattaaaatattatagagtttcatgaaatttcattattttcatttaattttcaatgtttttctatagaattttcgtgaaagatttatcaaaatggagatggagctgaaggagacaaagaatctgcacatgatcaccaagctggagcttgagaatgtgagttgggcttaattactaaaaaaataaattacaaaanataaagatttaaaataaaaatatatattttanatttaattattttttcaatttttaggtggcacttcgagaaaggatgaagcaccagaaaatcatggtcaaactgaacacactgcaggcgaagatgctcaaaatggagcaggacaaacagcaaacggaaatggagaaaaacggtagggaaaaattttcgaaaaaaattaatgatgcatttttctatttttttcaaaaattcggaaattcgaatttttatttgctcaacttttacatttctccgggggtccatccttaaaaagttgaaaaatgttttaatttttttcctgtgcttttggtcaatgtaattttcgattttttgacaccttcgttatatatggaaaaaattttaatttaaataaaaataattaaattaaattttgttttaatgtttaagcttcggtcgaccaaatcaaaaagttgaacactgagcagcaaaggcttttccagaggatcagcacattggagaagattaatcagcaacaaaatgtgaataaatttatggggaggggggaggagaaaaatttttcgtaaattttttaaaattttataaaaattacgcacacattttcaaaccaggttaaaaaaaaattgtgtcataacaattattgggttcaattacagaaatccttagcccataattacgcatttccataaatgacatttatttacggaaatgcgtaattacgggagtcaaaaaggcagtcattaacccgtaattagtaattgcttcctgccttaaccacaacaacgcacacagaagtgtattatattttttttaacttgaatttcaccataaaaattccaattttttttttttgtattttcgaaacttttttaaaaactaaaaaaatttccacccattaactcttagaaattgtcataaaatttaatggaaatttttggaatttttcattttaatgaaaatttcaatcttttttcaacttctcattaaaaaattataatttatcaatattattaaaaatttcagttgttttacaatttccaacaaaattattgggatgccaattcgtgtaacggtggtcagctcgcaattacggatgacaattgtttgacagtgcattacaataaatatgacatatgtaaaattttaaaaataatattttatatgcctcaaaaaattatttatgtaaaatttaaaaaataatattttatatgccaaaaaaattatttatgtaaaatttaaaaaataatattttatatgccaaaaaaattatttatgtaaaattaaaaaaaatatatttaatttatttacctcaaaaaaattttttgttttgtttttctccacagatttccgttccatcttcgcaaaatatccggttttgctgaacatcggatccaccgacactttttactttgaaatttcgatcataaacatggaacggtatgggtgggcttttttaattatttgaaattttccgttttttttaaatttatttcgagaaactctttttttggatgtttttttaattctcggcttcggctccctgtttccattttcgactctcgggctcaattaaagtttcttcatgagtgtcggtctcgagtctgtcgcatttttactagggtattgaaggctcaatccccggcttggcagaagattctcgaattccctggctcaattataagctcccgagtctgatcagttctacatctcgatttccgggtcaatggcttagccagcagggaggggacccgaaattgaaaagttggaaatttttgaaaaagtataccattttccttagaaattatacgcccttgtccggggtcaaattctcggtctcgaatctctggcaccgattcttggctcagctggtcaattaacgcttccgagtctcgattaattaattctccgtctcctcttcctgatccagaaaaactcgattctcgagtatctcaattttactaatttttaaaaatatttagctatgccgatttcggctttgccgtcaaccaatcggatggcgcaattcgaatgcgcaagggcacttacgcatactcaaacagtggcgctttttgcattaacaatgtgttgaaactcagttatgcaaaatatgcatacggtgctggtgatacggtgggatgtggcgtcgatttggccagccgacgcatttttctcacaaaaaatggcacatttttgggttcgtaaaatattcgtgagacgtattttgaaacatttagggccagccagaatttggtaattgcacgcctcgaccgggttttagagtttaaaaccctgccctttttggaccctgtctggttgagattagagatcggaattttacgattgtacggatcatggatggcattccgatgcctcaaaaattttcggaaatcggaattccgagtgctcaaaaaatttatcggaattaattaggttttatatcggtcaagagtcgagaatttctctgcctttttagaaggggtcttgaaatttcggagcgccgtttctcagtgataaatttttggtatttttttggcccgagaattgctttggggttttcgggacactgaataaagctcgatttataaaagtaatttatgatttttttaaagaatccttcgatttggttcttccttctaatgatcttccgctgatcccattcgtcactttgtggagctatgatgacaaaattgaggccaattttggaccgaaatttgaattcaatttggccactctctgacgcacatttttttgttcattgtttttttatgtttttaatttttgactttttcattgatttaaaatgtcgttaaaatgttctcagttatgtttttttgttttttgggtccaaacatttaggcacgaaaaattttcaaataggcactaaaaaattggaaaaaacaacaaatttccgcttcaattaacaaattccaatggatataattaaaacttcgaattccgttgtgaaatccatcaaatctaattatttatttatgggaatttctgctttaactgacatgagacgtctgatcatattatcggtccaatgcttgcaattgctgacaattaaattgtagtccttccacatgccatcaaacacgcgctgaatgccatcaaaatccgtggtgcgaatgccaacgatgggctcatctccgtacgttgtcatgtaacggccccatctgtcactcgtttcgtcttcacacacaatttcgtaagttttgtaggcaatttcgagacaaagtatgcattcgtagtgcacctccaaagcggtgtgggtaatgtctgtgatgaaggaaggaacagtggatgaacgaacagcaatggataaagcaaatccattttcaaaatgccaatttttttttatcaaaatttcgacttaaaatcttggagtaaaattgttccctttatgaaatcgaaccatttatttatacagtactttgatctcaccatatatgatcattgatcaatttgacaattattgcctaaggacaaaaaagtccgctaatttaaaaaaattgccgagactttcccttataaaaaggaagagccgatctcgagttaaaaactagacagctaaaaaataaactgtgattcgatcaaggtgatcaaaatatgggcctatgcaaaatttcaagaaaattaaacaataggaaaaatttttttacaatagcaaaaattttacaaaatggcattcattttcaaggttgcatagaatgacttatttttgctgttaaaattgcctgtgatttttttcaattagttttaatcaattttagaagaaaagtgcgaaatcgaaaatttgaaaaatgcgaaaattggcttaattcttttcgttattaagtagggctaacactagttcacgcatggaatggaatcaaagcacgtacttaaaacccaagtgcagaaaaaaaattgatgggatgaaggaatggagggattcggggatggcacggcaccactcggggactgggaacaggggtgtgtgaaaatcataaaaaaaaaattttcgaatacgaaaacaaaacgaaacgaaaatccaaaaatttaaaaaccgaaaacgaaacgaaaaacaaaattttgaaaaccgaaaccgaaaaaactttggcggacgaaaacgaaactcaaaaaggtgccgaaaatgtaggacgaaacgaaaacgaaatttcgtccagccctgacggggaatttatccccaaaaaatgctaaaatgaaacacctcatatgttctttatcattaattaattacctagtccgctgagcgcagtatccgataagaaagcatccaaaacaattttggtagtgcggtccatgaagtcacaatcaacctttaacaaaattgtgaaaaactcaatttatttgtgttcaatttgtttgtttgttttagcgaaattactcggtagaatttcttggcacgcagatacgaacaatggcaggcacatggcttctcctcatattgccaatttccgtaggtgtccgggtctttctcgtgctcgtccattgccaaaaattatcaaatacgaaaacaaaacctaaatgggggggggggggggcacaaggcctaagtaagcttcattaggcaaacggatcagtgaaatttttgtattttggtttaaatttgaaataacgtatttaatttaccgtatttcctgaattagtacccccgggggttctatttttcaacccccctcaaaaggggagttgtaattcaggaaatacggtattttgcaattaaaaataatttgtgaataaaaaattatttaaatgatgatttgattttgttttcataatatatttatgctaattaaattattctaaagcaaaaatcatttctgatcattcgtaattaattgctcgggggacggaggagaacaacgaaatgggaaaatggaaataaatgcaaaaagaatggcgggggggggggggggcggatggatcactcactcatcggcaatgtcaaaatctttaatctttgtttatgtgttgatgattggatgctacacatacctatttatgtaaaataaaataaagtcattgggaaaatggaaataaatggttagccgacatttgcggaccgacattttgtggctaaggtggctggacatttcgacaatgaccgtttcgacaataccttttcgacaatgccgtttcgacaatgaccatttacgactatatcatatcgccaaaatttaaaatatcaaattaaatataataaaatgaatataaaaaataataaattaattaaaaaaatattgatgaaatttaaagagaaaaatttaattaggtagttatattttttaaatttaatgaatgcattcattatctatcgcctattgtgtatgattattaatagtgaagaaagaagaaaaatgagacggacctataatataaatccaaaatgaaaccatttatttaacttaatgtatgtcctctttttacccaggcggcaatcctgaagaatgattgtccctaattttcattttttttaaattttgtgctcaaaaccagtttttaagagggtgctgataacggatcttaactcgggtttgcccaattccgaactccagacccgaattcgaacaaaaaaaaattgtttttttaatcaagaaaaagttttttcagggtaaaagcttctaattcattatcaactat

SEQ ID NO: 413 - DNA, 3792 bp, Heterodera glycines
ttcacctttctctctccgtctctctctctctctcttcttttcccctctctctctctcttctcgctctctctctgtctctccccctctctctcttccgctctctctctcttctctctttgccctctctctctccccctttctctttctcctctctctctctcttctctctctcttcctctctctctctctctctctctctctttcccttttctctctccctctctctccttctctctctctctcacctccttctctctctctctccctctctccccctttctctttctcctctctctctttctcctttatctctccgtctctctctctctctctcttctattcccctctctctctctctcttctctctctctcttcctctctccccctttctctttctcccctctctctttcccctctatctctctctttctctctctctccctatctctctcccttccttctctctttctcctctctctctcactctctctctctcattctcgctctctctttctctcttccccgctctcaccctctccctttcacttctctctctttgcccctctaactctctttttctttctctcaccccaactctttttccttgccctcctccactatctacttcctttctctcttctcttccctttcctttgtctgttctcactattctcttatctttttctttcctttctctctctctctctctttattctctcccaacttctctctatgttttgtgctttctttcatctcccctcacaataaaataatttcataacaaaatctttcgtgtcgataaatattccatttttccgttcaaaaaacgcaaaaattttaggaatgacatacccaaataatataatagatcataggaaaatgagggaaaatattgatgagtagggattggatttatgtttttacttattttttctgcggctttaactcgacgagaaatgcacgaaaacaattttttttttgttcgaaaattttgcgttttatcgcccttaatcgaccttaaaaatccttattttagatgttcgctcttaaaataagtttttgcctatattttaacgtttcgtccctattttcgcccttatgtcgcgatttttgaatttttttcatgtaaaatcagggttcgcaagtgtccttttttggaggggccggatctttaaaatatcctttttttaaagattgtcttttattttaggcttccacaaactttttaaattttttgtgcttaatgatatattttgctgatatttatttattttattttcgttttaatactattttctcttcctctctttccctctcaccataactttttgttttttttgtgtacacaacctattgtcagacgcttcagaaagagggagcgcttttttggtgctgaccttggcttagcaaaagtggaacagcatgcaagttaaacttattttttatgtattttacgcgaccgttttggattattcggacaaatggtttaatctctttgacgatgttagcgaagccaatcaaattctcaattcaatcccaaaggacgaattgcagaagctcaactcagaacagaaatggatgaagttatttgaagccgatttaccgcacttgtacaagttggtcagcattgtactttccgtgccggtctcaaatgcatttgtcgagtgttttcgctttgcggctcacaatggactgatgttcggaatctgttgaaagttgaaaccgtgaaggagctggttcagacgaaaataaattttgatctcacttgcccagaaatgtatcagatgctcatttccaatcacaaactgttggatcagatcggtggatgggaaaaatactttgaatgacacttttttgaaaaaaatattattttcaataataaaaccgttgtaattgtgccaattggttgtattttgcttttataaaagccaataatgcttttaactgtttttacaaggtaaaaatccattttttcaaaaaatctttattttggggtcaaaatcttagttttagcctcgtttatcctttttttgaaaaaaaaacttgcgaaccctgtgtaaaattcaccaattctttaataaaaatgcaatgaaaaattttttgacgcgatcactttttggcgacttgttcaaaaactttcaaaaaactttccacgaaatttattattttttttttggtggtcgaacatttcttcgtcaatgaacctttcgtcactaaacttttcgtcactaaaataaaataaagtattttaaaaaggaaaaaattaaaataaaaaattaataatatatgtaatatgcatttgaaaaaatataaatctaatacagggctcccattcgtccttggatgccaaggacgtccttggaaatgagcatttggaaaagtttaaaaatgaaagaaatttgataagtttttgtaattttcaacaatatttggattaaattatgcattatgtaattaaaatgcaaatttaattgcccaaaatctcaaaatttggtcatttttagacaaaatctgctaacaaacactgccggaccgcccccccctgttccccgaaattttttggaacaaagcgcgccacagcatatgcggtgaaatgaggaaaaatcagtgaaatcaaaaaaatgtagaaaaaaatccattccggtgaaaaatgcaagcctttgagtaaattattaaccatttttctttcatacatataataaaaatttaaatgtccttggttttcatgaattttccccactatgttcttgcaaatcggcatacccgtccttggaaacggagcatggacgatggtaaccctgatctaaaaaatatccattctttaaacaactagcggtagtacggttgtgccaaccctcggcatttcatcactggatctccggcatacacatacactcatcggaactctatttcagcaattcctctacatcccaatcgccgggactcaattctccggcattccaatggccgggactcaacccaccagcattccaaagcactggaactcaactctccggaaatccaatcatgttaagcgaatgtttaaagaatttttgaacgctggcacattgttgccgatcaaggacattttttattttcaagaaagagggcccaatttcaaggatgtccttgccattcaaggacgaatgagaaccctgcataatagaaagtccatttatattcagctcaacaatttgtaataaatctttgctggattaaacaaccttcgtgagaagcaagacctattgaaaatttattcaaaaaacaaaattttctaacgcccatatcttttttataactcatcaattcggttagcattttacatagaaaaagcttcttcacatcaaatcttccgaatgataccaagattttcaatctttttgccaaaaaaaacaagtttccttggcttttcgaggtcactgatcacgaatcctgcatccatttcggccaattccgaaacccggacccgaattcgaacaaaaagtggaaactttaaattttagaattttgcatttttagtctaactgattaaagatattttattgcagaattgattgttttcagtttgttttcgtatgtttaaaccgattttgaaccaaaaatgcgaaatttggaatttcgattttttgtttgaattggacccaggtttcggaattggccgaaatggatgccggatgtgataagaatgtttaatttggatgcttcttaaaaaagttatagtgaactaaagttgcgaaaaatttttgttttgtgtgaactccaatagagcccaattttcacgtatttaggctt

SEQ ID NO: 414 - DNA, 1528 bp, Heterodera glycines
caataaaagcaaaaagtgcgagggcggcgacacccaaaggaaaatcatcgccaatcatcaaaggtcaatgtgtggaagggaccaaaaattataacggaaattgaccgatgatgttgttaattcccaattaattaataattagtcgctaattactttctaattttaaatgtccgtgagtgagggagaaagaaatctacacaggttcttttaatattgttaaaaaagtaagactaggtatctctgctactgaagggctttaattgtgtgatatcttccgaaaattctcgtcctagaatatgttcatgtaattaattggaaaattacagaatgatatcatgcatattttggaagaaatgaaacgcaattatcatgtgtagtgtaagagatttttttttgcaaacagtggcaagggataataattttcacatggtaaatgttattggacgcataaaactttgattggacgcataaaaagcgattggacgcataaaagtcgattggacgcataaaaaacgattggacgcataaactggagtagagccaaaggaatcccctgacaagtgataagcaacggcggacgcgctgtactgaagaaaaaggaaaacaaaaattgaaattggcatttttaattattttacattgctttttccatcttttccgcttcttttggattgtcagacattttgttgggcaaaattattaaagacagatttcgatggattttaaatagcttagaaaaaacgaaaaattacggtctacgtcagttgggcgctcatcggttgggcgctcacgtttgtgcgccagcatgtttttccactataagtttctataacttttttctatgtcgtccaaatccaacatttttgatatcactcgaaagcataatgtatttagaagctttttctaagctattgcttcacgattagacaaataacaaaaaacgtatacatgaaaattgcgaaaaactcgaaattttgaagttttttcttaataaaaatttttccaggcttgaaaatctatccgctttttgtaaggctaatagagcatgttaagagctttcgaatgataccaagattgttggatttgaataacaaataaaaaagctaaattggaaaaacgtgctggcgcccaaccgtgagcgcccaactgacgggttccgaaaaattatgatcaaaaatgttctaaaaatcaagtttttttttcattgttttctgccataaatcataaaaatggccaaaaagtcacaataccttaaatttccatccccaatcattagattatctaaaagttatattaaaaaaacactcaatattcaaaaaacttatagagccaaaaaggtgtgaaaaagcgaatttttttatgcataaatcgtacgaatgaaagaaaataggaaagtagggagggcttttataggaccgtttagtaaaatgatgaaaaaattggcaacaaccaaaaaaattagtacatataaaagcggttgctcctccgtcacttttcgtttatccattcgccatttatccatttgaat

SEQ ID NO: 415 - DNA, 1116 bp, Heterodera glycines
accagtagtaattttttttattaatccgtaaaagtatatttaatacattttggcaaattttgaatttcgatttttttgttagtcatggattttgtataggtcgaaatgaaaattatattcgtgatcactgatcagcgaccccaaaatcccctgagagatgtttttacaaattattaacatttaaaaattttgatcaacaaagatgtggtaccactataaattttccaaactcaaatgctgtaataaaatgtatttttggctattttttttgaaagcctattaaaaattttattatttttggatttatcatcaatcgatatgtttacagcaagcaatcagcggtgcagccgatcaagcaagtgaattgttttcgcagacacccggctatcccgaacattgtcgacacccaccacattcttgtgtcgcgttctccgcatggctttacagaagggtcttcggtgtctgcgggttcatttgccgcctttttttcactcatgatcaaccgttgctttcgaatggacgacgtggccttttcgggacaaatcggactcgaaagacaagtgcagtatgtccagcaaaattgtggagaaagttgtaggcatgagtgacttcgggttacgcaaggtcatcgtgcctgacggtaatcgtgatggatccttcgccacatttgctgcttatttgccgcaacagatgtcttaaaaaagtcaatttttattacaaaaactaaaaaatttgtacgatattgaactgtgtttagttttttaaaatacacttcgttaaacctaggaaataattttttttttgtcgaatttcgttatttttttgcgaattgaattttgtttttcaatttcctaaattttaacaaaatgtcactcattttcaatctcctggctttttaaacaacaaccaaagaagcaggcttgaaaaagcttccagaatttaaatcaaaaaaatcggcttcaattaagtcgttaatctataattgaggtgtagctggacgaattcgttttcgtcgccttccccccgtacattgccgccgaagctgtgcttttaactggctcaacaagtgccgaattttatgccgccattttttataagtgagtaaaattttttttc

SEQ ID NO: 416 - DNA, 9257 bp, Heterodera glycines
tttttcaagaaagttcttggttaaataaaaaaccggacaatccattcaaaattcgccgaacagtttggcattttcagcaaacgtccgtttccgggcccgtcctccaaaatcgagttttccaaaaaaaaatcttactaaattttgaaaaaatttatttagcaactgcaaagtcggctgtgcaaacgagaggattcattttgcgcggacttggtacttttgatgacagaaaataaggaaaacatgtgaaattagttttaaaacctgaaaaattattatattttctataaaaatatttgaaaaaccaatttaattttataaaaacatctgttagttttctacactcaaaaaaccctccttttttaaggatatcctgtcgccatttgtgtcaaaatgtcaacagttgtgaacttggcccccggagaactttcattcgctgctggccaatttgacccattaacgcaggtaattttgttgatttatttattcttttttttaattaatcataagaattttttaaatttaatatgcttattcttattactttgaaccaatttcttactatttgtcatttaattcttgcaattatataaatttgacctttttaatctatttaaattttaatgttttatctattttttcaaagttttgcttcccttttcaaggtcgaccttctgtccatcaattgtcatgagcgtatgattcgtcgttcggcagcgtttggctcattggtgcggaatgctccgagtcggtgttggaacggttgaactcattgctggaaccaaaatgtgccattatgttgaccatttcgggagcgcatcaaagcgtcgacatttggcaccatgccacattggttgtggtggtggtgaaacagtgacagcggccaacgagtttccaaatgccaaccggtaatcgtaatgaaatctttcgccatgagcacggagaggacttgaggacttcagagggattggaaaaatcctttaaagtgatcgattgttgtttttttcacttgaaaatttccgttatgaatttttttctttgaaaaacatttataaatgaacatatatacttgtgccttttttaaattagatgagaaatggaagcagcagcataacatatattgaatcaataccgtattaaatttgataaaacaatgacaaaaaaacaaaacaaataattgtggaattaagagaaaataaaaagaatttatagtgataaactttagattttaaaacctaaaaaataaaaaaaacatattttgacgcgttttgctcaaaatttattaaccaaaatacaataaaaaattaaaaatacaccgttaagggcccaaagtttatagaaaaataccctaagcttatcaaaaataaacaccctaagaaatgaaaagttttctcaaaaataaatctccaaaattgtttatttattttcttgactttgaggctttttagtgcctgtttttggtgttttttatgacctaaaacctaaaagttttggctgtcttcccccccccccccgttcaaaaaaattgcaaaatttttttttcttaaattaaagtcattttaagggttttcacggtcggagaatccgattcttacatctgtttcgacccaattcgaatcttgaacccaaattcgaacaaaaagtcgaaacttcaaatttttttctagtttcgcacttttggttcaaaaccgacgtaaatacatataaagaaacaaattaaaagccatcaatgatgttttttgatgaggttttacgaaatttttgcctttattccgcctagttaaatttgttatttttaaatttttcacgtaaaatttcacgtaactcacgtaaaatacgttatagctaaaaataagtgtcagattcgtgatcagcataaaaaattaggctagaaaaaatacttagaaaaaaattttcaggggggtggcaaaacccggaagtaccataagtgattgattgagtgagtaaatcatttggtttttcattttgtttctcccatcgtcgcccctttttttattaatgtattttattaaagttagggttagtaaacaacaattttccttttttaaaaaaggacaaatgaatagtaaatcgagcagagctgtcaagctgtaatttaattttacatttattgttttaaattgattcatttgttttccatcattaggcactccgttgggccgacgaaaagtgctgtcaaaatgccatcgaatgttccgctgagaatcgtcgtgctgcgcttggcccggcactcttcaaaattcgtttccctcatcctattggttgcatttgtgaaagaaatcggtagaaattcaactattatttatcgacattaccctctttttgcagttccttctggcatttttacaaacgatgaatttgtctgcgtttatcaattcaatttctacctaattcatggtgtgccggggctttacccgttgaaatttccaattcaaaatcgaatttctttttggaacattgccaaagccaacagagggactcttgcgatggaaattgagaaattttctgaatttgcgcgagaagtgggacgaatgcaattcagcgatgccgtgggcataaatggctttcagtgggaaatatttgcaggaataaacacaaagaaaaaaagcacggagaaatgcctgggctttggccttttgttcactactgtttcggaaaaaagtgaaaacaatgttaatgtgtgtttaatatttaaattagagtgcgccgggaccgggacctggacacggacaactgagtaccaaggtcccggttttgaccgggaccgggactagtcccggttttttcccggttttcccagccaaaaattcccgggttttcaacccaaaaaggtcccggtcccggttaagcccaaaattcccggtcccggcgcactctaatttaaatggattaattaaggtgtaaaatggagttgcaaatgttcggcgacctttcaaattgtttcactaaaaagcggtacggaaaatcccgttggaaaaatttgtgatggaaattgacaaattttcagaatttgcgcaagaaatcattggtagtgaacggagcagtgaaactgtttttgtaaagggattccgttgaaaatatctgtacaaacagacactgatgaacgcaatgaaaagagtttggcctttgccctcgagtgttcccctcaaaatgaatttcatttttgtcgaatgcattcttttcatttttcgtttaattataatttttttttaattttgacagtgaaaatttatttatagagtttaatattataatattaaagcaataataagaattttaatgaatatttaactttaaattttctttaaaaatcagtaaaacagtgagataattaactttaaattttcatttccttatgctatagtaacaagtgactcaaaatgtacggtaatgttggtgccctgtcagttcccatcactttttttatcgcttttgctattggcggcattttgccattctgaggaccgtacctttggtggtgaagagcctgaggaaaatcaaaacaattttaaatgcgttttccgtataaaatttgtgtaaaatttccgccggtgtgtcacaatgtttgttgataaatcctcctttgaaatgagaggaaagagaattttaaacagctaagcgcagcacggcgatttccagaggaacaatcgatgccattttgacggcatttttcgtcggcccaatggagtgccaaaaaacagaaacaaatagcaaataaatttgccacgcaattacttttattgtataaaatttccaaaaaaataaaaccaaaacaaaatgagtgattagattatgtgcttattcatcggttagtttgcgctttgtccatttttttcttccaccgtaaaatcaatggccaatgtcactttatccttatctttgtcatacaatgctaagctttgatccatcagattttttataaattatgggcactcaattatgaaaagatttttttaaattttcactaacagcttacaaaagccttgatattttttggcgctaaaaataagttttctcatcaaatttatgcgtaaagtcctccgttccactcttttgtgtaaagaatgcgaggtgttgcagaacattcgcagctccaattcgggtctaaaaatggtaaaacaataattttatattatctttttatttttgcacctttttgaggggaacactcaagggcaaaggccaaactcttttcattacgttcatcagtgtctgtttgtaccagggatgtgccgagccagacaaaatccgattccgattaaatcgccgattccgattatggccaaaaatccgatacggttttaaaaccgattacgattatggcccaaaatccgattaattgcgattccgattacgattccgatttttttaaaataattttttcccaaaaattttattcataatcaaaatcataaattttaagattgtgatgcaaaaataaaagtttgtccacattctcaggcaataaacgttttctcagatctgtcacaatcaacccagcggtggagaaaagccgttcgctttcagttgatgtagctggggctgagaaatatttttttgatagcttagtcaaaagaggccatttcaattcgtttgcgccagaccaataagaaattggatcttcattgatatttatttttttggctcggagatattcattgacttcaacctgtataaaaaatagtttgttatttaatttctggtttatttagttcgcctctgatttttgtcgggcgttcaaaacggcgggacttggaattggcgaggccaacaaaaaattatccaaattcatttcttgttcaaattcagtgaacaaattgtttgatctggatccaaatagtttgacaatttgaaccgcgggtccaaaatggttggtaatacaaggtctttgttgttatgccacgcggttctcttcacagtcccatttgcatcaaccttatctcccatttttttttcaacccatctattattgaaattctgacatttcttaggtcttcccccttttctaaggcaaaaatgatgacacggaacactggaattgttactgaaactttggtagtccttttttggagttgatttgtagcatgaaaaatgggcgccaaaatcttaagacacagataattcaattaacatgcattcggtactacttgtttcaatgctgaaattatacgccaatcatccgctgagaaattcggaaacgaaatgtcctctgcacacagaagcccaacaactgttttgttttgcaaaaaacgatcaagcatttggaaggtggatgaccaacgcacctgataggaaaattgcaattaattcttaggggtgtaataatcggatttcaaggcaaaatccgattacgattatccgattccaattatggcccaaaatccgattaattgcgattccgattacgattacgattccgattcggcacatccctggtgcaggccatctgagcgccagctgttgggtgcctgtcagggccatctgagcgccaggccaactgaggctaattttttttttttattattttaaattattttacttttattaattttttgtttttttattaagaataattctgccgcaggcaggcggactcgaatttttggtctgccaccaacccaacacactaccactcggccatgcgaccaattgccataaaaaggataattgtcaactatatattgcaaagatgatgacgtcattactgcgaggggttatctttggttttctttaccacaaccattccccagcctaatgttcctattatcactcccaatgtaaccctcggatttctgcccctccagccgtttttcgctttcacatcgcctttcgccctgcaacgatgaatttcccttatcgtcgaacgttcagcttttccccgtccccctccttttttatcatgtgaatatgtgtgtccagttatgattatgtgccaatccctttgaattccgttttttccttttactcccatcttcgcccttatcgagaagcaaatcgtcaaataaagttgttgtgttattctcttggttgaatttgagtaataaaggaagttcaaatttggaagggaagaacaggaaagaaaaaatctggggaaaaacaatcatttcaattcgcgtttgtcccattattcggttccaaagtgaaaggaaaggaggtgcgagttgcgacacaacggccgggaaacgaacttcctatcgtatccctgttgtcctaactattttttcaattaattttcattccttcttttattatgtctgcacattttctagttcaaattaaattggcatttgacgttttgagagtcaattgtgaattgttacacaatttttgatcggtaaatgacatttttggcgatttttatggcaaatttagtgcatatttgggcattttatgggtttttaggtttgtttagatcaattttatttaaaaaaagtatttttttattaaagattttttaaattatttttaaatacattatttttaattaaattttccaattttataagatttgcataattctattgatgatctaacaagttttaggaataactcctttagtaataaaataaaggaggttcttccaactttttattttttgcactctgagaaattacccatttattttcataaagatatttgcatattttttacggttttatgggaaattttacgattttatgtgcatgtaataaacatctactactagctatgaataaataaagaaatccaaaaacgatgaacaatgatgattggaaaatcaattaaaacgtattgtttatcgatttataatattttatttctccggcaatagcaaataataatttcacatttttattaaaaatattataatatattcatattactctttgcttaagaattatcattaaaattatattattactttctaagtaaaattaataaaaaaaaaattattttgacaagatataattaattttctgagcacaattagcatttttttttaaatgacaaatatttttttaaattagaagaaggaaaatttttctagtttttattttatttttgacatacaaaaaattattttcattaatttccaacgaccaaaaataaaatgattaaataattctttctttttaagacattgcccaaaaaatcaaatattttttttcttttaaatgaaaattttttaaaaaattgtattaaatttccgaaattttcggagggtccttctggcaaacacgggtgctaacttttacatttgtttgtcttaatttttggttttctaaattaaagaccaacaattttattttactcagattttttccaaaatccctggacgacacattaaaagtgcaaaaaccaaaactcacttttcccattacacaatcttggtatcatacgatagcccttgaatttcgttattagcttgttaaatttcaaaaaattttattcactttttcaaaagttatgacaatttttccagctttttggcttaaacttttgaaaaacttaataaaattttttgaaatttagtaagataataatgcaattcaagggctattcgtatgatatcaaccaatattgtgcaatttagtttcgtctaagaaaagttatgagttgatttagtcaaatagcaaattttgcactttttgccccttgacatagcaccttgtgttcatagcagtgtattttaagtgccatactattttaaaatttgaattaacaaatattgaactacaggtctcaagaccattttgcgcataataaatttgaagaaaaaagcctaagcctagacttagccaggcaaacctaagcgttgctctaatttcttattttttaatatttatataaagaaaacaagattaagaaaattatattgttgatcaatgtcatcattttaaattattgcatcattatttaatataatataaaaactacattaaactaataagggatgttggataattcaattgatgtcactaatttaaatttttataaggctgcatgattttcaatttttaattttaattataattttacttaaattgacaatactttttttataaaaatagaaaatagaattttaattaatttcttaataaaaaattgtttttaattaattttttatgtaaaaatattaaataataatcaatgtgcatttatgcttcattaaatcattcaatttatttaatttaagaaaacataatgttttgttctttttcgaaaactccttttcatattatcattcatttttttctaattcaaatttcgaatgcaatttcatcagtgagttaattaacagttaattaattggtcgaatcattttttaattagggagacgacaaaatgctaattgcatttgtgagaaatgagcagaaaatgcaaatcagtgaatattcaatggaaaaatatgagatacactttggcattttgtattatatgagaaagaattggaaatgttcaaaaatttcggaggaatttgaagaatacgaatggacagaatgccaaaaatatcgcaaatattttgacattttatacgaatatttgtgcagagaatacgttggaattcccacagtaaagccaaagtttgtatttgaagaccgaattgaaattgaagggccaataatttatgcggtgaattgtttggccagaatttcgcgattttattttaattcggatgagttttataaattaaacagattattcaaatgggtttataattttgaaccaaaattgttaaatgaggagagattgaattttggaataaaattggaaaatgaaccaaaattgccaattaatgaaatgattttgcaattggcaattgacacagcgaatgaatggcaaacaaatgaaagtttagaaggaataattcgacaaaattttgacaataaattggaggaaatgtacaaaaaagcggaagaaagggcaaaagaatacggtccttggggtgccaatgaaataaatgatgataagcatatgataattgcgtattcgaaattcgatgatcaaaggacatgggtaagacttaacgttcaatgataatttaataaattcaaaatttagactgatgatgctttcttttcggaatttgtcaaaggattaacgacaaattcaaagaaattttttaaaatggcaaaagaatattcgaattatttacgtctaaagaaagagaaaggaaattatattttaactgatgaaagaccaatgattctttgggttaaaggaattgagaacagaaaaagtatttgatgcaaaaatat

SEQ ID NO: 417 - DNA, 8482 bp, Heterodera glycines
tttacattggcttcacattgttgccaattatttttgatcatataaacgtaaccaagataatattcatattgttgcatcaaatgctccgctttaactttttcaaaaatgtcgtttcctttgattaatttaataaatttcgcaaaatctatcgcagcatatcctttcacgaattcaaaaaataatgcgtcatcaatctaaataagcataaattaatataaaatgcatttaaaattaaaaatttttttctcagatttcacccaaatcgatgaatcatcgaattccgcagcattaattattgtatttaaatcataatattcttcttcttttccattttcgtccacttttttaaacatttcttctaatttattttcaaaattttgttttattattccttcggcactttcatttatttgccatccattcgctgtgtcaattgccaattgcaaaatcatttcattaattggcaatttactttttaatttaaattcataattcaatctgttctcattcaacaattttggttgaaaaagccgatcaatcgaattgaacaatttgtttaatttatattcattaaactcactctcttccgaattaaaataaaattgcgaaattttggccagacaattcaccgcataaattattggtccttcaatttcaattctttggattcattttccaatttcaaaattcataatttaatctcttttcattcaacaattttggtggtttaaaacgatgagaaaaatttgtttaatttatatttgtaataattactcgaaaatgaattaaaataaaagtacgaaatattgatcagacaattcaccacataaattattggcccattaatttcaattttgtttttaaatacaaattttggcttcactgttggaattccgacgtactctctgaacaaatattcgtacaaaatgtccaaatatttgcgatatttttggcattctgtccgttcatattcttcaaattcattcgcaattttctcacattgccaattcattctcataaaatgcataatgccaagatgaacttcgtatttctgcttcgaatattcactaatttgaatttcttgctgacctttcgcaaaatcaattagcattttgtcatcagcctaattaaaatagattttaataaataaaattttaaaaagtcaaaattcaccgatggattttcatttgaaattgaaaatgaaaaatggaggaaaataattataaagaatatagcagaaactgggttgaacattctcttatttttcataaatattaaaaaatttatgagagaataataatatatccgacaatttttgctgttttattgtcgctaataatatagttcgcattaaaatatatgatttgtctagtatcaaatatttggatattaaaaatgaaaatttatatgcattttgtagtttgtatcaaatatttgtttaaaataaaaaatttattatacatattcaaaatatacaattaaaaaaaataattatttttaatattttatacaaactacaaagtgccaataaaatataatatttgatacaaataattagtggcaataaaatataataaattttcatttttaatatcacaaatattttaatacaacttcacaagtgccatgttgtataataaagtgaatttgttttaaagaaaaattgaaataatttaattttaagtaatttaattgcatcgttttttaattacaatttgaaataaccgtttgcaccgaacacttcgccataggaaaacttgttctaactactttataaattagtgaaaaaatttaaatttaaaacaagaccagtagtaacccccccgtgaccttcgccgcttgacgctaattagatgtgacagctggcggggaggggtgtcaattagtcactaattgactgaccggggtactaattggtcagcggtcaagagggcactaattggtcagccgtagggtgtggggtagcaattaattaattaattggggggacccaaacctattgaacggtttcaaattgtcttgtacttttttttgacataaaatttgattgatttaaaaagtgacagccgagggggaggggtgaaattttttgattgatttaaaaagtgacagccgatgggggaggggtgaaattttttgattgatttaaaaagtgacagatgaggggaaattggaatttgattggtcagcgaagtgacagatgagggatgaaattcaaatttctgatgggcggggggacgggaattttgattggtcaacgaagtgacagtttttgatattattaaattattcaaatgaagtgaaataatttgttttgcactcggtctttatcaaacttgttatgaatgtgcaaatttgcaatttgttgacgatttcgcgcaatgtttcgaccgaaattaaattgtttgtcacttataaaataggtcaatttgtgaatatttaaggtttccaaaatggaattcattgtaattgctacatttgttccatacttttcttccaaaaattttccaacactttcccttgtttacccaaaatggcaccacgtgatgactccagtaacaataccaatggtcagccagtcattcaatttgatcaacaaattcgccaggaccctggactaaatgccgtttttgactttgttcgggaacagggcgcgcgggtaatttgtcacaacaaattaattttttcatttttttgattttgtttagcatggctttttcaacacgcccgccgaaatcgtcaatgttcttcagcaaatggcacagcatcgactgaatgagcgcagagcggggaataattgagagaatgaagttgagagaaaatgaagagcgaaagttgagaacaaattgatgaaacaatacaaagatgatggaaattctgaattattttttttttcttacatgacttaatttgttagcaatgctaaaacaataaataaaaatggaaaataaattgacaaattggtttaatgttagttgactccggtcccctcctcttccccctttgtatttttctctggttgtctcccttgttgacgcactatttcactgcccccaaagtgtataaatagcgcgagttttcgtctgccaccctcacttttcaaatcattcgaaaaaatttcaacaaaaaatggcgctcaatatgcaggacaaaaagggtctcctccaccaaattcttggcgaagcagacatcacggtgactacgagcggcatcacgatcagcggtccccatctctcctccccccgttttattccctttgatgaggccggccgctgccgctcatgtcgtggcaccgaggtggaactggacacaatggtcaccaaggagggcatcaccatttggtgtacacgtatcgaccgggtgcaatttgtccctttcgacatcatttacgacttgcccggtcactgcttcttccgggtgaagaacaaggcccgcgtgttcaacattccctacggggacctgcctgccatcacattcccaaaccatcaagaacaacagcagcagctgcaacagcaacaacaacagaacgatttgcgccaaaaagctaacacggcgatggatttggtggagagtggactgctagctgattcgttgcgtgaagaaggcgtgcagagggctgagctaaagcggaaggcgaaagtcgcgctcgatctgattgatgccggtttgaccggcgatgcactgcatgaggagggacaacgttggaagaaggccaaaactgcactcagcgttctcggaaacatgttgttggccgattcgttgccggaaaagaagactgcggagctcccgcttccgccagccgaaaaaattgaatcactgccacttccaccactcgaaaaaatgaaaacacccccacttccacctgccgacaaaatgccttcgccgctcccaccatcatcaaaagtggaaagtgatgagcaacaattctacgacagcatttctgcggctaccactatgatggacagcgcctcaatgcagcagcaggcgccgctgaagagaaaacagctgactccaaaaggcaaaagcaacaatggtatgaagaaggcagctgagccgcagcatcatcacaatgtgggggacatggacaagactcttgacgaattctttgagagcgttagcgcagcgacgaccaatttgtctatataaattgttgtttcatgcaattgtattgaattttaattaatttattaacacgaaatgcttaattctttctccaataaagatatttgctttaaattaccatttggactaattatttccggtccctcctcctccggtaaaacccaattcctattgaaatttgttgccgaatgcgatgaactaattacaccaaaacccgtctccaccctttactgttttggtgaaatgaatcccgctgtacccattctccaaaagtcgggggttgatgtttattcgggtgttcctccggaagagctgatcaaacgcatgccaaagccccttttgctgatcctcgacgacttgatgctgtccattgatgagcactatttgtccgacttgttcaccaaaaagtcccaccaccaccaatttgctgtcgtgttcgttacgcagaatttgtttgagcgaaagatcaaagtggcccgtctgtccgcccagtacctggtactgatgcgggcacccaactcgctgttgtccatccgtaacattggcgtacagcttttcccgcgtcaactcgacttctttcttgacgcctatcgtaaagcgaccgctcgcccatacggctatttactaattgacatgcacgcctcatctgaccccgtgctgcgcctacgcacaaatatatttaaggacgagcaagaggaggatcaaggcttagttgtgtttgtaccaaagaatggagtccaatagtcaggaggaacaagttaaaattagtcaactcatccacgacaattccaaatggctttgtgcgctggccagaacgaggtccgcgaaaaagtgttgcaagctgatacggaaagcgaacgctgatcaactgctagcgctggtggaaatttgtttgaacattgtcgcatctcgatttcgcttgaacaaacgtcagaagaacaggctgatgccctacgcagattttgttcgctgcctgagcagagtgagaagtgaacgaggcgcgagacgtatgattgttcagaaaggagcaggggttggcggactgttcgctgcactcctaacacccgtgttaattgaagttgccaaatcatttgtgagcaaaaatgtataaataccgtaaaaaaattgttgttatttcattcatttgtttcataaaatggcaaataaatttgtgcttgtaccacaagaaatttaccggggtctcacctctgcggcggacacgggtgacatcaatttggatgctgtacgacacgatttgacgcgtgccagggctgaacgaacaaacccttcagctaaaaatgtcagctacaatcaacagcttaggcgctacttgcaaatgagacgggaagtcgcggacaaaccagcacgggttgagctagtcaagggattgagtgttctgatgaggcgaggcggtgcggatgatgaagcagaagttgtagatacaccaccccgccctcctcgtcctcctcctccaccaccgcctcctggtcagcatcctcctcgtcgtccaccaagccctccaggcccaggtccgtccccgccggggagtcctccgccgcgtccacagcgtcctccgagaccacctagagctgctgcgccgccctctcggagagatgggcgtgtggaggaatggcgaaaaaagagaaacgacatacaacaacggcagccggttgtgcgggaccttcttgctgaagcagctgctgctccgctacccgaaagtgacgaagaggatgactacatgttggagagcggattcgctctgccagcaccatcacaatattatggcgatttgcccgttctgcctgacaacgcggacgcaattgaggagatggacactgcacagcacaggattgcaaccagaagaaagttaaagaaagcagatgacgatgatggcgatgacgattttcatcgcaaaaaataccgggtctattatcctcctcccccttctcgcccacccccgtctcgtccacagccaaaaattgaaacacctcgacctccaccgcgtcctagcctcaagaaagaaccacaaccactgctcgatcctcggccatccacatcacaacaagttgatcgcaaacctaaaagggagccaaagttcgatctggatccgcgaccatccacatcacggcaagccgggtacaacccccctgcggaaccaaaacatgagcagaaaccgtcaaaaaagccacctcctcgcgccacaccctatcatattccgaaaagagagccaaaaattgaagaaacactgccgcggcagcaaccttctcctgctgccccacaagtgccgcctgttccgccacctaggagagggaccaaacgtcgccaccccccggaaaatggtgatgagagtggtgagctgcgcatacgtaaacgagtgaggcaagcgcgaagagtacgagtgtattactcaccagagccgggtccatcaacatcagcacaaagcgaagaacaacaacaacaacaacaacgtgaactgtttgccattccgtcaaatcagctgaccatggcacagagaattgagctaatatacatcaaatgcaaccgttatgccgatcgtatgggtgtccggggaaacgcaattatcaacactcaaaatgctcaaccattggtgcgaagcaatttgcgaacggccatcaggtatataattgacagaagagcgggtcgacctaccattagaccaccgggagcggaccaattggaggagcggcttaggcaggacccaattttgtattcattgacggctccaccaaagagaccatcgcagagcacaagcagcaggacgtcaataaagaaggaatttcagccgaaaaaatggaaatgatcaacaccactcttgacaagctgtacaacgatccatcctctcctgctgcgtttgccggtgttagtacactgtggaaggaggcgcggaaaaagctaaagcatttacgcaaaaaggatgtacaacactatttggagggacaccgcacgtacaccctgatgcgccccaggcgggtacgatttccgagagcaaaaactgttgcagctggcttcatgaccgacgtccaagtggatttggctgactttcaagcgctttctcgtcacaatcgcggtcaccgatacctgctggttgcggttgatgttctctcaaaatgcctgtttgtcgttccactcaaaaataagaaggccgaggagatgctggatgcattcaaagagcttgtcaagcaaatgccaatggtcccacaccgcattttctccgacaaaggcactgaattcaaaaacaaattgctgaaggaattctttgtggagcaggagattgagaaacatgagcccgtgcattcgtcagtgaaagcgtcagttgctgagcgggcaatccgaaatgtgaagcagcgactgtacagatactttgccgaaagggagacgctgaattgggttgatgttgtacaacaaatagtggatggaattaacagcactccgtcacgggttcacggaatgcgaccaattgatgtcaattttgaaaatgctcagaaggtgtggaagcgaatttatgaatcaccgcaaaaacgcaagaagccacgtttccgtaaagatgaatttgtacgcatgagcagagagaagggacagttcgagaaggggtattactacaatgtacgagtactttgattatcgatttttttcaatccatattttcggaccccccccccgccccatacctattggatgatctttgatcccttcaaccgaaacctattggatggacttgtgcgcgagaatttaattaatttaaattaaaattaattaatttaaatgagcgagagctgcgcgactttttccgataaattgtggaaaatcaaaaacatggtcgcggtctcgaaccgttgagagtggaagcgaggagcttaaccacttggccacaggggcagttgaaaggtatgggataattgttgactttatgatgaaaattccgaaaaattgtgaaaaatcaaaaacatggtagtggactcgaaccgttgagagtggaagcgaggagcttaaccacttggccccccccccccccgcccttcaaaattttgaaaaataaataaaataataggagactcagaattttgaaaattttttataaaaactgatgacaagctaatgtgataaaacaggttaattcttttcctttcagtatccctgcaaagtttggggcgcttctgataagtttctgaaaaaaaagataagcctaaactttttggcctgtttaaaaaggaattaaaaatttttaaaaatttattcatctccctttttgatagaaaaagcatcagagtgcctaaactagcatgtaaataaaatggggtgcgtttcagagcattttgtgaaaaaaatatttatgaattaa

SEQ ID NO: 418 - DNA, 2871 bp, Heterodera glycines
  unsure (1)..(2871): unsure at all n locations
agccctgctcactacactgtagtgcttctcgagagtctcgagtcctaactcgagaaaagtcattgtttntggtctcggtctcttgagcttggtaaattttcgatctaaagcagtactataaccacagtggcaaatgagtccaaccctcgtccctttgtggtttttgagttttccaacatgaaaattattgtgacaaattttttgtccgataacaatatgggaaaccttggatttgtttttttccaaaattaatccctttccgccatctaatttttgaaattgggacgggagcagccgtttccacgccgccgtttctcctctcctgaaaattaaaaaaactttttcaaaccgaaatttttcgagaaaaaaccttatgttaggaattttttaaaagaaaattcagaaaaaatattaaaaaaatttttaaagctttttcaaattttatgttgaattactaagttttttgtttcaatttccacaaaacggctaaatttagaattttttattaaaaattttctaagattttttcttggaaaatttatgggtagtgaacgatacgagggggggggggggcgggggatggcatacccgcggcactccccaaaactatcgttgaatttgtttggcttccaataatcatcaacctattaattaaaaacatattcccaaaagatggttggacggttcgctccccgcggattggaaattccattggctgccctttggtgggctcggcccgcgccattgtgttggccttccgctggccaaccaagtgatggaaatggcaatttcccaactgtttcgccgcttccacttcacctcggcaactgacacttcgacagaggtgcccttaggcatatttaattgcgcttaattgcctcataatttaaaaaggaaattcgtttggtcggttcggacgttttgtggccggaggaagtgctgattcgtgcagaaagcgttaatgattagtcatcagtcagcaaacagacaaaatcactaagtgacacttttttggcaattaacattttaaacaattaaaacagagaaagaccgaccggacaataatcagtcgggcggggtcattaaaataatgattaaaaccggacaagaacaagtataattgacatgtttccgaggatgggatttggcttaaaccacggttttagcgaaaaatcttttaagatttagagggatcaattaaattgagctattaaaaaactgattcaactcgctgttctctgcgcattgaccggtcgatctgtctctgtgattaatcacttttatttacaccccatgttcctccttccatccatattggattttcctattcatgggtttttacttactgtatattctttcttactgtattttttcttatttgttagtcactattgtatccgaatgtgcttgaattgttcataatttactcccccatattcccttcggcctttcattttctggcaaatgttttgcctaattatcaaccattattaaataccaaccattataaagccaaattctcgagcagataaagccgagccaaaacaaaaatcaaagtttatgtaattttaggcttagtaaggtacataaataaaacttcatttagtccatttaaattatgaatgcactaaaaacgggatgacaatgctaaatctaaactcaatatagcaatttaagctcctggggcgtcataaaatcgttttcagtttttcgatttttgaaaaagaaagttgcattgaacggttttcccgggatgtacacacaaatgatgatgatgatgataataatgatgacgatgatgatggtgagtagtgaattttagccctgtgttgtgttgccagatttgggggggggggggggtaagccgggtcctcctcgcctttaaataatttaaaaaagcattttttggaattatatttatcaaaaattatcggaattattcacacaaaaaatttatgaattggattggaagcacaaaaaatttgataatattcactaaaacaggcaattaattacatgttttttttggagctatacctgatgaacttttttctcgttttcactaaaaatgtgtaattttttggaattttgcaagaattgttggaaactctctaaagttacaactcaaaaaaacaaatgaaaatataattgaatgcttccaaaccaatattgtggtttctcggctttattaggtcatgagtcataacagacaaaaaaagcatttttttacatataatatgaccccatggaataagaatatttaaatttttgatttattaattattccaaataattaaacaaataaggtaaattaaaataaacgaagccaatgcttctttcctaaagcagtgaaagcccccacttggcacattgccgttttgtacgcctcgcgctgccgcagccgtttcattgccgggtcgacagcggtgcagaacagagaagaacggcgacgactaaatgtggcaaaccgaattaattaattaattaagattaattaggttttaacttactttgcgaggacaggattgatgtattgggtgaggtcattggttgacgcgttcttggccaaaagcgaacgtttggccatggaaaatggttgcgcctgaggcgtcgagagcggaaactacacacaaaagggtaattaattaattaggtagtaattaccatttcgggaaagtttgcctccgggaatgattcgttgtatttttttctgaaaaaacagaaaacaattgttttttggcattttaacaaagtgtgaaaatgaaaatgccattacattaaagcagcagtggccgccgcttccttactctgctcataattttgaatggaattattgtcaattttttctttgcatttttttattcttttttt

SEQ ID NO: 419 - DNA, 3585 bp, Heterodera glycines
cccccccccccctaaaatccgatccaattttgacagctttcaaatttcacaaaatgaaacaatctctcgtaagccgcccaaaaaaaactaatttacccattgcatttgggtacagccaaaaaagcctttccttcggtgaacaattctatttgataattaaaattattttattttgttttaaaatgattaattttttatttattaatttttgttcatttcgaaatcctttatcactcgagaaattatttttcttaaagttttgtttaattgtaataatttttttcaattctttattactattttttaaaattatattttcattaaactataaaacgaagggttaaatcgattaagaaataatttacgtgaatattagaaattaataaatgcagttgtttgtgcttcttgtgagaaagtgcatctcctcaacaatgagtgaatgaatgactttggcacgtggtccaattttaaatgccaaaaaggaaaatgtgccgttgtttgattttgtggggtttgaataatttcgcccttttaatgcccttttgtgcttattgtaaattcatttttggcaaaatcatttgctcattgtcagcctaggctttgccgaatgttttgcccaaatgaatgtgggcaaatcggagagtgccatttctgtacaacgaaaaatgcataataatattaaacaattgtatcatttaattgcgaaatattcctgctcaaataatttttttacgaaataattagaataaaattatatttcaaatttaacttttatttttttaattatatttaacgatatttaaactttaaattattaattaggagaagattatttttaatttctaaattcttttaacaaaattcgcgcactctgcgccttcccaaatcaattttatggtggtataataaaaaaaagggaaacataaaattgccattaaatttttgagttgacaagaataaatgaattgttttgctcattttcagtttattttatcggaaaagagacaattaccaaagcattatattttttaggcttttttacattattaaaaatttaattaaattttccaaaattcaataaaattcattaagccattcatactgatgtgagtgacttctgcggtgcgttcttatttttattttttaggcttttttacattattaaaaatataattaaatttaccaaaattcaataaaattcattaagccattcgtactgatgtgacttttgcggtccatttttcctctggccccccccaacctaagcgaccattaattacttaattgaccaccagctcttttctctcacgcaaatattaatgccatcaataattttgcactcctcctggcttcccccattttggcattgattgtttcgccatttttttcattttttcaaatccgttgccacggcaaatgcgcaaagaaatgccgcagcaggggaggagaaggtttaagaaatatgatgaatgccatttgtgatggctttaagtggcatcacaacgccaagcaaatgcagagaaaaaacaattggggcaaaatttgaaattggcacattcaaaaaattatggtggcattgatgccaccgttgaaaattgagtccatcacattcatttaattttcccatctgccagtggttttcagtgtctgtcttcataatataagtgtgaattctaactgtttaaattgaatgtcagttttaagtatgtaatgtaacaatgatttatatacatcatttattttttcatataatgaaaattgaggtaccactaatgggtgatatgtttagacaaaatatttgccaatatgcctaatgaggtacaaaagtgagtaaaaatacagtaagttaaaagccatgaatagttaaacaaaaacccatgaataggaaaatcgacaaatatatggaaggattatggggtgtataaaagtgattaattaatccacagagacagagagcgaccggcccatgcagagaacagcgacttgagtcagtttctaattgcttatttgaatgtaagctctttaaatctcaatgattcttcgagatgaaccgtggtttaagcgtgtcataaacataaatttctgaccccgcccgactaattagtgcccggtcggtctttctctgttgaattgtttaaacagtgaattaccaatgccacaattagtggttgcctgtttgctgctgatggccaacgtgttcatcttcatattcatcaacaatttctgcacgaatcagcacttcctccggccacaaaacatccgaaccgaccagacgaatttcctttttttaaattagggcataattaagcgtaattaattatgcctaagggcacctctgtcgaagtgtcagctgccgaggtgaagtggaggcggcgaaaaagctttgaaattgccgtttccaatactttgttggcgagcggaaggccaacacaatggcgcgggccaaacccaccaaagggcagccaattcaattgccaatccgcggggagggaaccgtcgtccaaccatctttcgggaatatggttttaattagtaattaaaattgttgcaagccaaacaaattcagcgacagttttggggagtgtcgcggggtcgcccccccggggcactacgttcccctcgccccgccccccgccccggtatccttcaccacccacaccaaaaaatttcaaacccagaaattttccaataaaaagtcttaaattttttaagaaaatttcaagaaaaaaaattggaaaaattttgcggttttgttggatgaaaaaaaaatttagaaatcatcataaaacttgaaatctttaaaacaaattttaaattaaaatttctgaattttctttcaaaaaaattttttttagatggcggaaagggattatattttgaagaaaaaaaatccaaatgtttcccaagtggaccttaccggcctcagtggattttttacacagggacgagggaatggggaggtccgttggactcatttgtcagtgtggtcaagccgaaaagcacaataagtaaacagcaggtaaagcagggaatcggtcgttttggcgccgccgttttggcgccagcctcagtttttttattataactttttttcttgttgaccaaatctaacaatcttggtatcattcgaaagccattcacaaactctattagccttgcaaaaaacaaacaaaaattttagcttctaaaaaagttattaggaaaaaacctcaaaattttcgacttttttgcaatttcatgttataacttttttggtaattgtctaatcgcgaagcaatagcttagaaatatcttctaaacatgttaagctttcgaatgataccaagatgactagatttgccaatcaattatatgcacatgcatatttttttcctggactctgagaggcctgaaacgcacgaaaaacatgtttttagcttgttttgaagcttctaggatgacttttcatatgcatatttgcatattttggcatttcgtgcatattatatgtgcatattttggcatttttccaaaaaacctctaatagaacgtcccccaacagacaaattggcttttttgacctcaaaaaccggaaaattttccaaa

SEQ ID NO: 420 - DNA, 1592 bp, Heterodera glycines
tagcgtgcaaaatttaaaaaaaaaattttaattctcaaaaaagttaaggccaaaaatgttcgaaaaatcaagtttgtctaggtttttaggccttaatttttttgagaattaacaatttttttttaaatttgcagacaaatataggatacttagggctttcgaatgctattaaattcattcattttggacaactatgaaatatagttataccccaaaatcagggctcgagcccagttggttggcgcccagtcgacccccataagcctaagcctaagcctataccggtaagagcaaaataaaaataaaataaaattgtattatgcgcacaatgaaacaattgggcacaaacgaagcgtctccttgatgacggccttcaccagcttcacatcatcaccgacaacactcgccgtcagctcttcgcggagtcggtgctgaacagacggacgatgggccatgaaatggacgacgagcgcaagacaatggccaattgtgtcaatgctaatgatgggagagaaataataattaagaattttcggcactgaccccacacttttcatggcattttccaaaaagaagtttcccaaagtgcaagcaaacagatggcaatcctcatcataagcatcatcatcaccagggctgttgttctgctcaaaaaatgttttgtgaattatcggactttttaattaattattggattttatttttattaaatattttttattaaattaattaattagtattgttaattaattacgtgcgctatctatcattacgttttgctgttgctgcttctgtccgtccttcttctgcatttccagctccaaaatctgcttgtacagctccgtgaacacgtcgaagttggcgccgttttgcccaattttcgccggaggcaatgcgcgagaaaggcgcgctttttccttcagcagcaacaactgctcggcataggcggtgtacgtgtcgcaaaactgtgccgtatgatcaagctgatgggcacggcaaaatgcgatgcgtgccaaaatggcggcgaccaaatgcagcgaagtgctaaaaagttgggggggggggaagaaacaatcgactcaactattcttagctggattaaattcgtggtaagccaaagtgacaaaagtatctatgcggggtgattggaagagaggggtcgttttagtacggaaaattattttaataaataataatttaattgataatttattaatatatttatgcatttggctctattgcggtttaaataaccataaaaaaagacacaaccataaaataatttgacaatattaatgtgcacataacagcatccaaattacacataggattcgataaatagcctcaagagttctctattagactacaagatttcaacaaatttcggtgtgtggccagaaaacttcaaaaattgttttctaaacatttctggccataattttttttttaaaaaacataatgaaaaataaatgaaattttttgaaatttgtagtctaatagaggactcttgagtctgtcgaatggttatgaaattatcaattaaaataattcatttatttgttaaaaattttccgaactgaaccccccccccc

SEQ ID NO: 421 - DNA, 6178 bp, Heterodera glycines
agcaaaaattaaaaaattaaatttttgcgcacaatgaaacaattgggcacaaacgaagcgtctccttgatgacggccttcaccagcttcacatcatcaccgacaacactcgccgtcagctcttcgcggagtcggtgctgaacagacggacgatgggccatgaaatggacgacgagcgcaaggcaatggccaattgtgtcgatgctaatgatgggagggaaattgaaatcagaatttaataatttcggcactgaccccacactcttcatggcattttccaaaaagaagttccccaaagtgcaagcaaacagatggcaatcctcatcataagcatcatcatcaccggggctgttgttttgctcaagaaaattaaaattttttaaaataattagttattggacttattttactattaatcaatcaattaattactattattaattaattacgtgttccatcattccgtttttctgttgcttcttctgttcgtgattcttctgcaattccatcctcaaaatgtgcttgtacagctccgtgaacatgtcgaagttggcgccgttttgttgctgcgcattttgcccaattttcgccgagggcaatgcgcgaaaaaggcgcgcattttccttcagcagtagcaactgctcggcgtaagcggtgtacgtgtcgcaaaactgtgccggatgatcacgctgatggacacagcaaaatgcgatgcgtgccaaaatggccgcgaccaaatgcagcgaagtgctaatgatagggagaaaaaaagtaaatcgactaattatggccggattaattagtgaacttcaaggaaatgatggaagaaatggacaaaaaggtttggtctcgaatggaatcgaacccacgcctccacccacagtcgagggcaacgattaaccactgagctaacaaataagcgggcattcactactttccgcattatacctactcatagcttttttccttacatttatttcaggaaaatgcgagaaaatctcgagtttgagaagagtcgcataacattagatatgtaatttaaaaaaaaaatgcgactcacttgtgaaaatcaattgctttgccctcattcgctgcaattgtgcgcagcattgagtccacggcagcatttagcaacggagtgagctgagaagaaaacgccatctttcaatttatatttgtgcactaattactcccccccccctccctttattatgtgccgctctccaaaaaatccacgccccttttgagtgaaaagaatgtctacggtagccccattagagcaattacgataactgtgtaacggagaaaaaactcaccgccttcacttttgtgtttgagaagacggacacgttgtgcctcaacttcttccaatggtcgccggaagcgatgaacacgtggccagttttggaagaaaagtccttaaattcgacaattttttaaaaatgatcaaaaaataataaaaaaatccttttcgttttttacctttctgtcgctaaaattttgaaattttgccacgaatatttcgttggccactgccgggtccgatgtgacgaattgcgtgccgccctcaccatttttcggtgccaacgtaaaaaatttgccaaattctgcagacatttgttgaagttcaatgtggcgaacatgttgagagacggacaatgtgatcggttcgaagaggctactgaaaatgaaaatggggcaaaatttgggccaattggcccgaaaatttaaatgaattgcttagaaaattttgatttagttgaaagtgatttgttaaatattttaaattaatgtaatttcattttaattactttgatttttgctatttttttttcgaattttacatatttctcaccgttggccttttttaaagtgtcggataatgagaaagacgagagcaaaaagcataatgaacaaggcaacaatcatattgaattgacgattgaataaattaaaaaaaattgtcagtaaatcaaattaaaattatcctttttatataaaatacggaatagtttccgattgttcgacacccccctcccccatccaccaaaaacaaatttaatcaaaaaatgtggacaaaaattcagggatatgcttttgtcgccacatatgtattaccgtatttgtgtaatagagcacccggggcttatttttcaaccccggggggggctttatttcggggagggcagctctattcagggggggggctttatttcggggagagcagctctattcagggggggggctttatttcgtggagggcagctctattcagggggggggggctttatttcggggagggcagctctattcagggggggggggctttatttcgtggagggcagctctattcagggggggggctttatttcggggagggcagctctattcaggggggggggctatattcataaatactttgtatatgtaaagtatgaagcagatatcatgatcatacatagatagatcactttaaattgccttataataaatgagattttggaggaaatgtcgcaacaaaaaaaaaccaaaatgattatgcagaagtgctcatcacattcggctttttgcaaatatgtttgtacatgatgatgatgatgatgatgatgttgttttgctcccaaatacataacaaaacaaattgtaaaattataagtaaataaatgactaaaaaaacatgccccgcggggatgcggcgactttcgccgaacggcgcgcacaattggcccatgtcaaggacaaacgaaccgacagggaaaattgctggaaaagggtggggggacagcagcctaaactgatgacaacaacaatttggcaatatgtagtatcaacaaaaacaatgatgggacagaagaagaagcaaaggatgacaacaacaaatgtccttaaaactaatgactgatgagtagggctatacattgtatggattaacatattttttctgtgcatatgctatgaagaaaggggctcaaaaatagcatttctatgttaaaattttttgatttggtgaaggtttttggtgcatataaaagcatattttgggggttttcgagaaaaatgcatatttggccatttttgggcttttagagcatattttggtcatttttggcaaatttcataagaaaaatgcgaaaaaagcgaaaaatacacccctaaggatgacttttttgaaattaaaaaaaaatacacccttataaatcgaaaaatttaaatttttgtaagaacttttggaaaaaaaatttatttatataaaatgtaatttgttttagcatataataaaaatttaaaaatttggaaattcaatatatttgaaaattgtctaaaaatgctcattagcccttgttttggtgttttcaaagtcaattcttaatttatagacaatttttggcatttttttgagggttaaagccatttttgacagtttttaaggcatatttgggcattttttgggtttttagggcatatttggcggatttttttgtgcatattttatgcgcatatttggcattttttagtgcatacaacttcgaaccctactgatgaatgatggcgttcaacagattttggaaatcattttgtgaaagcggaagtcgtccagcagggacgtgtcgaacagagacattcaattaagtaccgtatatgctctttttatccgccatatccactaatcacccactctccaattataccccagtctcggtgggcgttgaaaaataatcccccagtctccatttatccctgaggcgaataaatgaaatttttattttttcgaaaaaataatttatttttaaaattttaataaacattaattattccaattatgaaactcgttaaatgtttgataaatagggttataaatcaattatgcactaaaaatccccaaatatgccctaaaatatgccataaaaactgaaaaaatgtcttttaacctcaaaaaaaaaatgctaaaatgtgtaaaaatacagaacttaaaaacaccaaaacaatggctaaggagcattttttagacaatttcaaaaaatttaggtttccaaaatctgtttatgcaatttctaatttttaaatttttatcatggcaattaacatttttttaaaattttctctgaggaggttgaaaaataatccccatgggggataaaaagagcatatacggcattattcgaacaatggacatttcgacagacatttggacagtgtaagtcatttggacagaagagggcgcaataaaaatgagggtttttatgtactatgaccacaatttaaatgaaaaaatttaataacaattaattatcaatgttagacgttcataggcggaactggcaaatccatgccggatgttacgggatccaaatccacaatcctgcatttttaaggtgggggggcgggatttgattggacaagaatttcgaatttcaactctaggaaatggacccgcaaatatggtttttttgggggcttcggcttaattcacgatgtttttatgaaaattgcaaggaaattatgccatattaaacccatttatatgggttattagcagtttaaaaggatcggtgtgaaattacggactcctctttttagacatttgccagtgcgtcttcttctttcaatggcatattattaaaaacaaaagaattgttgaataataatatttaataattattttaacaaaaaaatgtgaaataaaatagaagaatatcacttaagagcattttcatagatcattcatatccccatggttaacacttcacataggttattgtagcatctaaaatgattaagatgaaaattaatgccaattttgtttttgctttttcacttttcgccactcccaccgatccgccgcccggctccaaccaattgaacgcctcctccgacaaatccacgtggtctttcgcgcactcggaacatttgttgttgatcggaacagtcaaactaattaagccaaattgagtcaattgaacaattaattaaaccccaaatttcaatgtttacgtgttccctttgtattcgattttgacgcatcggttaatgcacaccaaatcgttgagcaagtaacgcgcgtccggcaaacacgactcaacccacgcggcgtcggagttgaaaagtgtgccggagccagcggcagattttgtgggctaaaattgggcggaaaattcaaatttgtgacctttccaatgttaaaattgatgtacttttgaagaaataaattataagcaccaattgtttctatgtaattgcattaattaagcaaaaaggcacgtaaagtttgctaattacggtaataattgtcaaatttgttgccccaaatgcctgtctctgatcacttttcggtgtctatttttgatcagtcaattcacaattttgtccgatcatcgtccataccgtggcaatgtccaacccgcacgcgccttgtccgccgattccgtaaaaagtgaattggcccccgctgatcggtttgttcagctgcgcactgatcgaatcgctggcactcgactcggaaaggcacgtgtctttggtggtgtaagcgggagcaacagaaagcgaagcggagaaggagcagggcaaaaaggagagcaattggacggagaggaggaggaaaagcattggcagaaaagaaggcattttgtaattcggaaaacagagaaaattaaattattttgaatgaatttccatttttggcatgccttttaaagggcttttttacggagaaaattcgcttaatcagcacaaataatcaatcatttgaatggaatctttggccttttagcacaattaccgtaatttgtgggccgataaaagtcaaatgccatttaattacccaaataatttgcaaatgatcacatgcgtttccgatttgtgaccttcactaatcacttttattaacacagtttttccgcacgaagcaaattcaattgggcatcaatctttgaccattttatttacacaaaatcatcaaaaatattttaaaaaatcttatcagtttaaccaaatttattctagtcagaaggtttggaacatcaaagtatttttgttaaatgtttgcttacttttattaagcacatttcagcagttttggttacttttttttgtcagtgtttaattaattaattgggccaaatgagcaaaaatagaaaattagaaacaataaattaattaattttaatttggccaaatcccaa

SEQ ID NO: 422 - DNA, 2663 bp, Heterodera glycines
acttggcaaggtgtgctttttgctgtttcgatgtcctcggggaggaattcggcacaaattgggcctaagcccaaagaaggaaaaaattacggcgggagaaaaggaagcgaagaaaagagagtcgatcgatggataaattttgtgaaagaccgcctcggggggcgggggggctaatggaatgaacgggcggacgccggggggggggggggggagcgacggagtttggaaagactgatcacagattgtaaaatagttttgatgattttgcggaggagtaatggtctccgtttgctgaccgattgaatcagctaccagcctcagaactgtgttaataaaagtgattagtgtggggcatccatcggacacgcatgtgttcgtttgcaaattatttgggtatttagctggcatttgtcttttatcgcgccacaaattacggtaattgtgttaaaaggccaaagattccattctaatgagtgattatctgtgctgattaaccgaattttctccgtaaaaaagtcctttaaatggcatgccaaaaatggaaattcattccaaataatgtaattttctctggtttccgaattacaaaatgccttcttttctgccaatgcttatcctcctcctctccgtccaattgctctcctttttgccctgctccttctccgcttcgctttctgttgctcccgcttacaccaccaaagacacgtgcctttccgagtcgagtgccagcgattcgatcagtgcgcagctgaacaaaccgatcagcgggggccaattcactttttacggaatcggcggccgaggcgcgtgcgggttggacattgccacggtatggacgacgatcggacaaaattgtgaattgactgatcaaaaatagacaccgaaaagtgatcagagacaggcatttggggcaacaaatttgacaattattaccgtaattagcaaactttacgtgcctttttgcttaattaatgcaattacatagaaacaattggtgcttataatttatttcttcaaaagtacatcaattttaacattggaaaggtcacaaatttgaattttccgcccaattttagcccacaaaatctgccgctggctccggcacacttttcaactccgacgccgcgtgggttgagtcgtgtttgccggacgcgcgttacttgctcaacgatttggtgtgcattaaccgatgcgtcaaaatcgaatacaaagggaacacgtaaacattgaaatttggggtttaattaattgttcaattaactcaatttggcttaattagtttgactgttccgatcaacaacaaatgttccgagtgcgcgaaagaccacgtggatttgtcggaggaggcgttcaattggttggagccgggcggcggatcggtgggagtggcgaaaagtgaaaaagcaaaaacaaaattggcattaattttcatcttaatcattttagatgctacaataacctatgtgaagtgttaaccatggggatatgaatgatctatgaaaatgctcttaagtgatattcttctattttatttcacatttttttgttaaaataattattaaatattattattcaacaattttcttatttttattataattgcttaatttaattatgaatggttagttagtcttttttttagtcttttatttattcgtgaataaaaagtcatcagaagggcaaaaaccacttactctgacgactgttcagatagtatgtcgtagagtaagtgatataatatatatggatgatcaaaaaataaaatcaaaatatatgaataaaatgaggtcaaagtcaattgagatcgataacacaaatgtcaaatcacttaaaaaattaattctgtttttgcttttccggttattaccctaatgaatttttaagttttgttttaaattgatttaaagaatttgtttttattagttctttatcaagttgattccataattttgttaccctcccggcaaagggaatgaattttttgcctattttatattttgtgttaaatctgtaaaaggggatgttaaagcgtgtcgatggattaaaaattgaaaatagtttcagatctgttcggccataaacaattttatgcgccatgaacagatcaaatagctttcgcctattctcaagtgtcggcagttgcaggtattctaatcgattttggtatggaattggtggaaggctgcatttaaaaaatacccgtttggtgaaatatttttgacacttttctatttttttaatatttttttgaagagacggattccaaacctccggagcgtattccaataaaggcctaatataagttttatataacgtaatccaaatcttagatgatttggatttaattattcgaaacaaggaacgcatacgtaaatacgcattccttgttattttgtttacatgatcggaaaattgtaatttattatcaatgtttactcctaaatccctaattgtatccacagcatttattgtatttccatcaaatttatatgtttcttttgggttttttgaacccaaatataatacaaaagttttttgaactgaaactcttatttgccatttatttgcccattcgaataaattatgcaatgctttatgcataatttctgtatctgctcttgctttatagcatatatacaatttaacatcatcagcatataatt

SEQ ID NO: 423 - DNA, 4931 bp, Heterodera glycines
tcttttggtcctttggcgtaccgcagaaccgctcgcttgaacgtatcaaaatgtagaagacgacatgcgtcgccgctaatatgccgcgcactttgaccaccgtctgctccttaccagtttgacggtggcgcattctcagtgcatattgtttacacccccctgacacgaattcgagcagctcattatccggccattcatctgacaagtctccaaggtggggtccaatatccagcggacacccgtcctcttcccgatgggcaaaacagacactgtccgtgtctgtgtatatcagctctgtgttttctgcacgcacaactcgttgcatcaattttagaagatggaggcgtgctgccgatgttgtccataaggagagaacaatgttggagcaatcgtgctcatcggtccattcctttttagcggtgtatgtaatcagcacacactgttcatttaatgggtccacagagctaacttccagctgaggattgtcgaggtacgcacgtagttctgatggcgaatcagtaaccacagtctttgatagaccgttacgtagtgagaaccgtccccaaagggaattgttgcatagcttggctatagtccgcttcgccttattgtgttgcatgcgcgccgggtcaatgaccataccaaagcgctcctcacactctgtgatgaatttttcgcgttcctcctccccatttcccacctcttccggaaacccgctagcatgtgttttcattgtcataaattctgcaacgtaaccgcgaaaaacacgctcactccattgttcctgtgtccattctatggatcgataataggcggtgcagcggtacccattgcgtaatgcctctgccagttcgatcgatgtaaccgtagaaacccaaccgcgctgctcatcgctgtgcgtgcatcgataagaagcggagacgcctccctctggatgaaggcgtgcgcatgttccgcaaagtgggaacagcaaacgctgatcaaatttaaccggtagaactggcacatccacttgtcgtggtggtaccacaaatacctttagaataccgcgaaccggaatctgttctggatgtcgccagtccactgcgcggttcgcaccctccatgatgtccacacagcgggggtgaccagtcgggtattccgttatggcattagtgtacggataaagtgaacggacgtcaaagtatcgcatacgccacccttccgggacctgatagtgaaggcgttgcggaccaactcgaccaccatgatagcaatcccttagattaataggtccgctgtttcgataggaagagaacgcctgccgcatgtcgggttcccgtcttagccgttcctcaatatcacattcccagaatatactaacagttccacgaatttgtgagcgaatgaaagccattcttcgcgcatcgtcctcccgaattctagcagctgtctttccgctcggcattacagtgtcagctttaaatcggtgtcgttggtggtcatgcgcatgccagcagcacccgttcacctcaattacgctatccgtctcatgtatataaccgtccactgtatagcggccaatgcggtgctctccgcccgaggaatgggcggtctgaatttgcagcccattctcctctgcgtaccattccatgaatttgagcgcgagcaagctctgattgtttgccgtgtcatatccgctctctgggacgattgcgagctgatcactccgtaaatgattgaggcggaagtgtttcattgatgcgctcgcaatggtcagcgcgtcccaagtgatgtcgatccctccgtttccgtcatctccaagctcaattcctccagcgtcttcctcttcctcctcctctacctctccttcatcctccgtcagacggtgttgttcatccgggttcgtgaccatcaaaaattcggttctgaaggcgactagcgcctcaataagtatgcgactgtcatttacacagtatgatgccaattgctcgcacaaattgaaaggttcgtgctggtgcgctgcgtaccactcatcgaatcgtcgctgtcgctccggaatcattcctccatataggtactgttcccgaggcggtagcgagggcagcactctgtcatagttgtcttccacattggccaaatgagggaaaaattctttgtcctgcactctgagtccaaatgcaccgggaagcgctcctaacggaacaggcattaggttccaactgtcgcgcactttaatctccggattgtctttagcgcgcagcaccttcatctcataaagtttattaccccgtctgatcattttcggacacagtcccctgttgaaaaattgtcggaacagaatcacattgtcgaaccgaccaccaaaatgtgcgaatacattaataggatatttaatgtgtggttttattttactgttgctttcattgttgttattgatggtgttgttgtttctgttgttatgcgatcctaagagcaaccagtcagtgaacgccgacataggatcatcgcatacatgttgaaaatccacttctgttcctgtgaagggtcgatgagagaaagttagggtgcgatatgggccacatatttcacacgagggaactacattcagcagggagttgcgccatgcgccaatttgaatgcattttgtacaagtaacgaatgcggacacaaagttcactatgtgtacccgccgttgctgagcctctggcgcaccgattacatgacaattctgcgttgtctcacaatcgtatactaccaatcgataagttttagggcgccgcggtttgagttgccgaataaagcatccacgttcacggttatgaaaggcaccacatgttctgcaaaagcgctcgtcgcacacatgcccagctcgtcccttccctttgttatttctcacgttccatatcaccccacattttttacatttatgcgatttgtggcaaaagttgctcgacaagtgatgatggtaacagtcaacgttcatgaatgttttgtcacatcccacgcactcacacttaaatccatcatccctgcatggccgccccgcaccaattcgaccacattccttacaattcagaatgcatgaacttttgtgagtgtccgcatttttaaagggcaattcgcatgcaaagcagtagtagtcgcgaccaaaaattgctgttccaactccacaacggatgccatcaaaatgatcgttgttgtaatagagcgatattggtgtcaggaattcttctggtccatatttatatttaggtctgtactgacccgttgtgccgaagatgaatactttaaattttagctccgggtatactgcgttccaatggtccactacacgtggtacccacacttcggcgtcatacctttcttggtttagtggaattcctgcatcgagcattaggcgctcagcgtcttgttgttgttgtgaatgcattttgttaatataattactgaaagtttgttttggcatcaccatgcagtgatagattctgctgatctccaacgcgtagaataggcaataggaattattattattacgaatcctcagcagatttttctcttttatgatgtgatgcgctccttttagcgttcggtgttcggatccgcgaccagtaattgtgtcccgctgcggtagattgacagtgtccagagtggttactattacactgaagggtgcaccccacagtgaaccttcccgcgactttgattgtgccacatctaagaagcgattcaaaattgtgtccactgtgtttggagttatctgacggatcggaatccaaatgtcagggtccaataactgtgaagtaattgttgccccaagtcgactcggttcaattccacgtctctgagcttcatctaatgacgattgtatgcaatgtccaaaaatgactcgcaaaagcgactcaggatttgatggtagagtctggatcatgaatgtacttttagcattcattagtctgaattttttgttgaacgctacgtcggtgttcagcgcgcgtacatagtgccgaaaattgcgtcttttgccattgttgttgttgttgttgttgttgcttccacttttgaggatgtttggcattcttcggcgcttcggtgggctaggttcattgtttgatcgattgctcatgatgatttttggaattggccaataaatgaggttgtattgaatttttcacttaatttataccccgtactagcagtaatttccataaaattatgaatgaatcgtttcgatactcaatacctctctttttacgatactcaatgcctctttttctctaataaattaaggactaaaatgctagacagctgacgcatcaaaatgagatagacacaggagaaatgtgtcagctgacgccttttgaccccaatgcccagagactggcactagctggtatatttttaaatcatgattcggaatcatccacctttactaattgaaggctccccccaagaagataaaacaaaattttattcacgtagtttttaattgcaatgtcacaattataatccacacaatacaatttcagttgtttcaaaatttcatcatataacattccggttgaagccaaataaataaaaaatatgcaatagtgcccacaaacgtctgaggtgggagattgaaatgccattttgtttttactgacatgagggaagtgggacagaaatttctgtacgttaaaagcaacaggaagggccaaactatcaaaataccatatggtgttcaaacgcggaatatacagtgcaacccaatgcgcaccctcttggcgagcctcatccgtgttgatgatcagagatgcgggaaagggtcggtgacgctgttgtaattctatcattttggggatccgatccacgggaaaacatcctctgaagcactctcttgttgtctgacaagtggaaagcatcctctctatttggatgttgttcatttccgttattattgttgttgttgt

SEQ ID NO: 424 - DNA, 8098 bp, Heterodera glycines
  unsure (1)..(8098): unsure at all n locations
gtcactgtataacaactgaatggttggtttcacggtatttgtagactgtcctaatattgcagacaacgatgaccttgatatagatgtagtcgttggagaagaagaggaggcggaggctaaccgtctcatatactctttaaactcgagtagggtggtaggagtgattgtaacggtagtgaaatcggtttcataatcatcatcatcagtgtcaagagaatgaatgtcaataaacattttattaagcaaaaagtttttcaataaagcgaatgtaaaatgaacaatctaagcaaagaagtgtctttttatacttgaacatctgtagcgaccgaacgattcttgtacagcataataagtgaatcgatttctgccattgctattagcactattcctcgtgcaggcactggtgtgttgaaagaaattcgtatcgcggttgtgccttttcggataaggtcgaacgtatcagcggaactctccgccgatggtgttagattgaatacgaaaaagcattggcccccctcagcgtaacgcttcaccgaaattccattgctttccaccgtaccagcatatccgatagcctcatgcatgtcgtgataggcgcgagcaaatcgtccattgggaaagtccaatgaatagggcgcttgggggtagttccgtccgtttgcgcaaatgctgatgtcgcgcacatcgaagggttggaagttgaacggagaggtgccaatggtgcccacgtagctttcattggatacaagtccgagcaccacacgcttgggaacctgatctgaccaaaggttggcagtgaactctgtacggttttcactgatgaacagcgccttcaaagacgtctttcgcagaggatagcgtgctggacggagctccaaacgcttgctgatgtcaagcgccaggctgtccatcacctcggccttcttcacatacagcttacagctgattacctccagatgataacgacgaacctggtccggtggcgcttgtggagcattcggtgccagtagaacaaattgagaggagttgggcagaagttcgatgtccacttcgcattgattaacgatatagcgcggctgattgcaggggtcaacgtccagtcgagccatgaactgagcggtgcggctcaacgccaacagttgacgccgggcagtgtagccgtcgcctgccaactggctattttcatcgtctgcgtagtaaccggcaacgttcagataggagcgcttcacagtgtcagggtaggtcagctcatagtccatcacgctcttgtatgccatcaaatcgtttccctcgaacacttgagtgccgttgattgacatgcgacagttcttccatagagtatgtccgatcaactggcaacagctgacatcatctgctgcaagcagattcttcatttctccgccctgttcttttcgaatgcgtaactcggtaaacacataacacttgctgagatctatgtagtcggaacttgcgtgtattttgaagtgatagggcgtgatgttcaccgggttgagcgttaggcactctaccacagaggaatgcgatagactgacatcagtgtccgggatttcgaagaacgctaatgctgaggatactgcattacccgagtctcggtcgattttatggaatggagcagcttgcattagtagaatccgaatgtgtcagatcgtttgcgtcgtttctttgagttctgatgtaatgatgatggtggtggtagtggcgggactcttcctatcagggtttgatgagattccaatggtgatgctgataatgatggtttgcgcttgctatctgatggtgttgtttcaatcttaggatgaaagcgtactcgttttctcatcctatttatattgatgtttccgctcccaaattgtttaggtagtccatgcttctccagcatcgaatcaattgaccgtttcccctcactaatggttgcctgcttcaaattctctccctgttgtaccttgtccagtatgcgttcaccggtctcaagagcttgtcgcccaacagatgttcctgctcttctcactactgggagaagaagacgccaaagaccacgtagcacgtctcctatgccagcacctcgctgaaagggtctacctccatagcccctttggtagggtggagcgccgcggaaatagtgctggaaatgctgtgacccttcaccgttgctaccatcgctcgttgttccaaagtctcctcccccggcaccgtattggtgtggtaaatgttcagcgtatcccactgttcgagtgtcgaacggaatgtgtaccatttgctattttggtcgtatatgaatagtttattcaataaaaggatatatatatatatatattcttacactaatagtaaaaataaaataaaaacaataaacgagggaattcggggaatcaaaagttgatcacttttttaaatacaagcgtcacaagtacggtaccataatcgaattgaaccagttgtccattcatcatacgtaattcgacttgaagttcgttgatctctcttgggtgtacagggatgaacatcggattatcataaatacgctccaccacctgtccatactcgccctcggtagatacaatgcggaggagcgagcttagcgaattccccaaaatcacactgcgtgtaagtcccgtggcataaacggcaaagctagtaaaacccccacgtaggtccaccccatatttcgcggtctcgccctgcaccacgcgttccttgttcggaaaccctagcacataggcaatctgtgagctcatgctcaaatagtcgatttccgggtcggagatcatcagatggaaacgatcaatgtcagtcctatagttaaagtggacgtcagcaggagcggacagcgctgtacgctcattttgtatttcttttattctatcggtcagcacttttccatgtgtcctcgcctctgtcaatcgtttctccgtctcttccattttttttcgactttcttccaataacttggccaatgcatccccgtgtgtcttctctacctttagttgcttgtccttttgcccgctttcctcgcgtattttttctatctgagccctcagcgtatcccctttcgttttggtcacacttagctcttgttctcttttctcgccttcctgacgtatcttctttaattcctcacgtagcaaatccccgtgggtcttcgcttcatgcagctgcctttcgttttgcattctttcatcttgtaccacttccacacgtgaacgaagctgctctccatgcgtccttgcggactgtggttctctgtcactttgctcctttggccttattgtgggttctattgatgtttgaccatcgtttgaggaggatttttgcagtggggcttgtatgcttacatctccgtgtattgtagaaagacggtcttttaacacatctgcgtgcgttttcgattggtccttagcatcactgaactgagtctgagcttccaatgattcgtttactggtgatttttgttgagattgaacttcattttcagtttttcttaatcgctgccccagctgttcgccacgtgtaagagcttgggctcgaggttcatcgtgttgttgttgtcgttgtgctgaggggtttgatgggggtgttatttctgaatttttcaatgttgtatcagatgctgatgtttttgtatctatgactgcttctccatctttgccatcatttttattatcgttttccgtaacaatcggctttatgcgcttacacttggtcagccttcctatcttacggcactctaccgcattattgtcttgatgcactctttcaccttcatcattagatgaatcgtcatctttatgtaggtccttactgctactctcttgattctgttcttcctcaggtgcaattggtgtaatccgcttgcatttggtcagcttcccaatctttatactctactccacggttatcttgtggtactctttcgccttcatcatttatctccatagtaccagttttgctttctttttccgtctcttcgcgtgattgctgttttccttgatccacgcttcttttggaccgtttaatggaaggagtttgaccatcttcagtgcttttgcggcttagagcggtcgttagtgtaccgttcaaatggcgctgtagtccttctgtgttctgttgtgatgattttggtagatgaagacgtagcaatcttccatcaatgtaatgaatgtcaatccattgatcctccacagttccgattgtagaagcccatgagtgagggtactgtattgagtacagtccacagacccatgagccacggaattgaactggtttcggtaggtgcacacgatattttgacgtggtgttgtccacgtaatcagtaacattgctaggcaatacaacaaagaagtagttgttgttagagtcatcagccatttttaatatgcagtttattgttccgtgaaaagtaaaactgataatatacaaatttgtgaaaaggtggtctatttatacaaattctgtctcatcaatccaacggggtttttctgggtcatcgaggtattttacataatatctcttcgtcccatccttctgtctcttagtgcgtaacacgtgtacgcgatatgtcgtttttgcgtctttgcgcacgcgtgccaaatccggttcatagaaacatccctcaaacatctcaccgtgctcgtctttcaccttatagcgaacaggcgttgtgttgggtttcacctctgcaatttgtagaatttcgtccgaccatgagggaaggtacccgcgtgcgaacgtccctttgtttttgctcatcctcacaaaatctccctcacgaaagcgtggtgctctacgtccctcgtcatccgcatatagttccgggtgtatgaatcgttccgccaaaaaaatatgtgcggacggatttttgcggacggacatttgcggacggacatttgcggacggacttttgcggacggacatttgcggacggtttctgaataaaaaaaattatttttttagaaaattttttggaagagtgggcctcgtcagtacggtctcttccggttaaaaagcaactaattacgtgtgtttcggcccaaccgtagacacactaacttaaaaagcgcacaccaacaaacaaaaaaaagcaaagcaaataaattttttgattaattaatattttaaatttattaatcgataaaatcttttttaaagaaaatgaattttataaatgaataaatttttttcctctgctcataattcgttattatttcctgggaataaatattaattttgtttaacaaaaattaaattaatccttatgaaataataagtcctttgtgataaacaaaaaatgctttctctaattattttcatctccataattaacattaaattactcttctaccaaacataattaaagttgctgttgtccatattgtgtggtggtgccattccccacataattcattcattcattcattcattgtgccatcccccgccaccctccgccccacgccgagccgccgctttccggcacacggaattggaattaatatttgcacacaaaaggcactcactcactcattccacgcgggaaagggtggcgcgtgggtggatgatgaaaagtcaaaaaattccattagcagcaaaatgagagggagaggaaaagggtcaaccgaagcgaacccaacccaattttgaggagaaaagcgaagcatttccttatgaataaatgcacattcaaatctgatatgaattttcaaaaataatttaagtaaaacagaagcaaacaaaaaaaattaataaataggctaaaaatattaatcataaggctaaaataataatataattgagctaaaaatattaattattaggctaaattttttattacgtaattttaaaattttttgaatattaatttaattcttaactgtttactcatttccacaacattttttttttgattactttaaattttgttatcatttcatacaatcaaatctaaacaaatttattattatcttcagtccttttttcctttttgattttttttgtctcaaatatttttctgttttttttatttttgccaatattttttatttttgcattaattatttgattgttttcctctatttttaagggatttctgtcggaaaaggttcttccgtcggcatttctgggaacagtgattgcgtcaacagcaccaattgtcagcagccgttgtcgagcggcggacgtcggccaaaactttcggagaaaatgaaatcattgtcattggactgcgcagaaatgccggacccggtgcaaaatgggatggccaacagacagcagcaatacagtaagagttttgggaaattttcaaaacttacagtaagaaaattgggaaatttattttgccaaaaattttcatgctcaacttttttttttgaatgttttaaaactctcttctattcatttttgttttattcactatttaaattatatgccaaaacattttcacaattttatgtgattttgctgagttttgagtcatttcagatgcataggaaattatattgaattaaataaaaaatatttttgtttttatttatttgtttattttataatttttcagagtctaagcccattcggtcggcgcgtggaggtcttgcatcggtgcaacaaagttttgacaaaagtgcatcgccaaatggtcgacaacaaactgggccattgggagcaattcagttagcggtaagtaaaaagattatggcacaaaattggtagttttttataatgtcatcgcttaaggtgcataaatttcgggctaagtgggcgggggaggatttttggataattgggttcgggctaactgatttttttattccaatttgttaatagatttacaccgaagagcaccaattttatgggttcatagagtatcttactttaaaaattaacgaaatttgaggcctgatattgcttgaatgaaaagcagaagaaggaaataagcctcgcagacgctttaaaatttgtaaaataatttgcatctaaaatatttgtttggtttgaagttagtcttcgcttaaattttgcttaattaaaacaaattgggttttgtttaagccccataaacaacggcgccttccgccggtgccgtccgctgcgccgcaacagcaagcagtgattgtgccgcaacaacaacagcataacaacaataacagcaacatcatgcatatcatcatccacgagtacagctcggccgactgtgtgcttcgtccgggcgaccgtgtggtggtggtggacaacggtgacccggactggaagcatggcttcaaggtggggaattgtcgggtgctggtccaatcgaagggccccgtttttggataaatttcattcaaacatttttttagaaaaaacaggagagttaaaagcagaaaataccaattgcttccactcctctcgtaaaaaataattgtcaatttttggaaatattcattaagataaaccaaattattaaaattaattaaaattctaacaaacaaaatccactaaaataattgaaactttttatagaaatgaatgttatttaattaaagaaattaagtaagaatttttttaaatttcagtttaatgattgtctggagcatttgctgacattcccgagcagttgtgtggctgcctatcacatggaggaacagccgatgaaactgttgcaaagctgcaatttggtggagcaaaaaattcgtctctacagggaccaggtaaaaaacacggaattttaaaataaaaaaatttatctttcaaatttttaattctcatacttatttttaaaaagtgcattttattgagtcgattaatattaaattatctgcctcatttatcacttatcagcattatccattttcggtaatatccccgtcaaaccccaattttttaaacttctgactgatttctcgtctcagattgtattcgcgcaaccgaatggcctcagcgaagacggtcgtctgttgttggtccgaaatgaacacagcaaattggcacactgtccacttcatttcctgactttaacatgaacaagtttccaatttgttcctctttttgtaatttcaattatagaaaggttacgaattattatctcganttttgcttttctgaaaagaat

SEQ ID NO: 425 - DNA, 1059 bp, Heterodera glycines
tttttcttccttgatggggtctagattagaaataaatttatttgttttgaatttaggtgtattttccattgtgtttgcgtcgtccattagttgtacttgtgacagatccattttgtctgtccgtatcatcccatctgttgctttctctcccacatttaattcatccgtccgattggtaagttctgctttctcatcttcgccatttttcgtagtaatgtcgcgcgagtctgagtcaaatctcgcttttttccgctcaacattgtcgatgagagggttttcagtcgttgatgtaacagttgacgacattgccttttctagtggagaatccgagaaaatatagggtactttaaatattcggcgcgaccgtacgcgaaacgcacaaaaacgcggcaggtcatacactcgatcgaatggtacaaatttttcggtgccttttagtcggctcgaatgaatgtagacgccatccttactgatcagatagtccaaatccatattatatcggcattgtctgcaaatggtaccatcatcattgaaaaacactacacgcggagtgtccaatcggtcactgtgaacagtcactccctgagttgtgaccaaaaaattgactgtaggaagtagttgacttgtgagagttttattctccattttttgggtcaatactttagaaatgatccattaaaatgacgagaatctaacattatactgtccctaataatgggcggggcttaaatacataatttacacactcgtagtatcatcattatttaaatttagtgcactcatatacatccgatgcacactgacgaggttctgtctgacgacggcactgaatcatatacatttcgctctctgatttactacgaaaagaaacaatgctccaaatgtaagaagcttcgtaagtggtacatcgtggaatttcacatgccaaatccgatcattacaaattggggactgtgtcgctatttaatagacgaagcctgtttagacaatgtatgaaacatttaaaaagtaatataaattctcatattacagtccggattcgctcttggaatttatggg

SEQ ID NO: 426 - DNA, 10843 bp, Heterodera glycines
accacgcgcagctggtggatgcccagtgtgatgctctgtgtgtgttggatgcgccgcaaaacgcgtgccgccattttatttgcgctgtttgggtggggtactccggtgaggaccacacgcgccgattggaagaccagagcagccacagttttgcccgttgttgtacggattcgcatgatgatagcgtggaagcgccgtgcgttgtactccgtgtttgcgccacgttgcgcaattgccaaaaattgctctcgagttaagggttcaacatttattttaaaaacaacagtacaattggaaattgaacacatctacaaaacaatggacaaaatttcaagagggaaaaaagttttgtgatctccgcctccaaattcaacgacacacggtaaattagggtggcgcaagcggatgccgtgttttatgtagtagtgcatcctaacctttaaattgcttggtaccgacaaacaaaacaaatttaaaaaaccgttatgccgaggtagcctcggtaagctggggcggagtgggtgtccaggatggacaggtcattacagcggaccggaaaattgcgcactgacgggcggaggtgtgcagtgcgtaactgaacggagcgcaaatgctccacaatgtcccggcgtttctctaggcttttgaaaagcacatgcagctcgtgggcgctgcatttgaaccgtttgcagaggtggtcgacgagcgggacggggcgacggcgttcggcgcaaccacatttttttggagtgcctaatttaaaattgtaatgtcaaatgaaaaccaaaagcaaaacttgttgatggtgcctcctcaccaattggagcgagtggctcgcgcttcatctcctcatcaatgaggctgatccagctgggatcctccgcctcctcctcttgctttttcgttggctctttgttctctttgttggcgtcctgtaagtccatttcgggataagcgttgtttatccaatcggtggcaagaattaaatccatttaaaatctatgaaaatgaaaaactataaataaaaagaaaattccattaaaaaaaagtaaaatggacgctttccaacaatttaaaagggaggatggacaatttcgtcatccattcacaatgattgtgtctgggagcacaggcagtgggaagtcagagtggataatgcgtctgttgcgaaatgtggataaaatgatctctacccctgttgaacgcgttatttatagctatggggagctgaacagaaatgtgatgaatctgcagcgcgccggcaaaattggcaatgtgccagtcactgtccatagcggtgttccacgcgcagagcaagttcgggagtgcgccaaaaaagaaaaaaccttgctggtgctggatgatttggtggtgggtatgagtcaacaatatttggacgcactcttcacccgtggctcacacaattggggcgtcagcgtaattttggtgactcagcacctgttcagcaaagagttgcgtgtggcgcgcactaattctcactatttagttttaatgcgtaatcctgcgggggcgttgcagatacgcaccatcgccacccacctcttcccgtcaaggactgcccattttattgagacctatcgtgacgcatgcgcaaaaaattttggctaccttctcgtggacatgcacccagagagtccggaagagattcgccttagaacaaatatatatgaacaaaaacaaatagtttacctaccaaaatgaaagggtcacaattagtttcaagaaacgaatcctttttggagacattgtgtaatgccaaaaaggcgaatgcccttattcgagatgcatcagatgagcaacttttgtgcctcgtcgaaatctgcctaaacattctaaagtgccgagtccctttgcgtccccggcatttgaataagctaaaagctcatgcacaggtgcttcgccgtctcgcccgcacccgctgctcgcgctctgccaaaaaggttttgctacaacacggagatggccttcccgctattgtggggctcattgcgtcaattgctcttccgcttattgcggatgtcattgaaaaatataaatagtttccaaaaaattaaaaacaagaaaaaatgcagcatacaaagcgctatttgcttgtccccgaagaaatttatcagagtttggcagcaccgccaccggctgacggaacatcaattgggctggtacgtaacagaattaaacaaatcaaaaacgatgacggcataaatgaggcggaacgggcaatcaaatatgagcaggaacttaagcgtctcaacaagctcacaaaggacgaagatgaacgtcccgtgggtgttaaattagaaaatttgagtgatgtggttgacgccatgccaaaaccagtcaacgttacaaggccaattgttgtttctacgcgtcgccatcttaaaattgggcgtgcgcgaaaagaaaatgttgaacaattagaagatactgatgatgatgatgattatcaaaacccacggtcgtcaagttcaaataaacgacaacccacacaaacggaaatcttaaaattaatttataaaaacgcccaatctctaggggtgtcggggaagggcaagttttgagagccggtgggcgtccatttataaccagcagtgttgatgacattgttagtcacctgttgaacaaggacaagcgtggccaaaataaagagccaacggcattcaaagaatttgttgaaagggcaaagcagaatccgctcttgagtaggcatttatttcccgaaggccaatccggcaaaggaatttataaaaacaccacacttaagtttaagccatcattatggatttgaaaaagcttcgcttgctcgagtttttgtacaaggacctaagttcgcctgtcacattcacgagcgttgaaccgctgctgagagaggcgcggaaaagtcaaccaaaaatcaatcgaaacgatgtccaaaattatttgaccagccaacgtacatacacactgcatcgccagtcgaagcggcgctaccgccgattgccaacattggcgcccggcttgcatactgaatggcaggccgatttagctatttttgaccgacttggtaaacaaaatcgtggcttcaagtacttattagtctgtattgatacccttagtcgacaggtgtttgttgagcccgtaaagaccaagacgagcactaacatgatcattgcctttgatcgtatattcaaaagatcaaaatatatcccgtggaaggtgttaacagatcagggaaaggaattcactgcccgggcagtacagcagttcttccgcacaaaagacgttgaacacttttgtatgctcacttctccccaatttcatgccggaatggcagaacgtgcgaatcgtagcatcaaagagcgcctttaccgctacttcacggagcgcaacacgtacaaatggattgatgttgtgcaagacattgtttgcgcaattaaccactcgacaaattcgagcattggaatgcgcccagtagacgtgaactttaaaaacgcagaagcattgcgacaaaaattacatgatgcagctgaaaatgttgtacgacgcaagcaaaaataccgcgtgggagatcgcgtgcgcattgaaaagtacaagcacgtgttccaaaagggttacctcccacgcttcaccaatgaacttttcacggtggcagaggtacactctgagcgttcgccagttgtttatcggttacgtgatgacaataatgaaattattagtggttggttttacgcaaatgatttatgcaaaacgctagaagacaaacagcaaaaaatgtatgaaattgaaaagattttgaagaaaaagaggcagaacggtgtggattatgcgtatgtgaaatggaaagggtattgcactcgctttaatagttggattcccgtaaattcaattagcgagaaaaatatataaaaagcactatttgtcaaaatttaacaaaaatgccttcaaattctttttatgttgttcttccgtcaaacactaatattgaaggaaataggacaaattctttccgagtgcgtttaccgcgcaaattgcaattcaattcggaatgggaggtgggtcttgccgttattgtatacccccactcttggccttccataggcaccgtggagcaacaatttgttcagattgagtggcagacggggaatacggtacgtatcgaagttccaccatcaaatgtcacaaacccccatgagcttagcaaaaatttatacaggctactgggtgagggaagtgatccgttggcaaaaaaggtacgatcaacacagaattctttcatgcttttgataaacaaggctcggcgatgggccagagaagaatacattaagcgaaagactaaagaaaaacggagcgtccgtgacgaagagctgctcctacaggccatgttgacagatactggaacattggttgatctcaacagcgtagcccaaggctttctgacacgtgaaaagagtgctgcaacgagtaatgtaccgttgagaatgccagctgatgataccaattcgtaccaagaaaaattgtatgagtacttttcaaaattaagtgacaaaaatttgaacatttttgatgaattgggcatgacaaaattgaacgccgaaatcaaaaatttaacagaagaggaacgcgtgatccttgaagccacaaaggaaatgggaacggaagcatggattcaggcgtaccgtgagatacgtcttgtttgccaatttaactatgacgtccatagaaatcgttttgtcctgaacatcgacccacggtacgttaaaaaggtcaaagtctcgcttcaactcgcttacattctcggtttcaacaacacggagtttattcaatctgaaaacgaggcaagattcatgccggacatgagcggtggtgtgtcatcattccacgtttacacgccggatcttattgaaccaatgatgattggagatgtcacggccccagtgttgcgcatagtgaccatacgcggaaaccccgaccaagtagttgaagaacaattttttgccatacagtatcataaacttttattaaaggagttttctgaaattctgattgagatacgtaccaatagcggcatcttgatgccattccaatacggaacatgtacattaacattacactttagaaaaatgtcctatttttaaatgatgaacacgttggaaattgacaaaacattgacaagaaacaacgtgactcgccactactatattggctgttttgcagcagatcaaatacccgccggtgcaattgtcaaatttccccactgtatggtggttaatcttgaccccagcacatcacatggttctcattgggtgggcatatattgcgcttctcctttgcatttggagtattatgactcattggggttgtggccaccgcccagtgttcacattgtgaatcatttgtcacgctacaaacaaattgaatataattctcttccacttcagtctcccaactcaagtgcgtgtggtcgacatgtcattttctttttgtactgtcgatgtgttggaatgacctttgaaaaaattgtcagctttttacactttggaaagctgcaacctgataagctcgtaaacaattttataaaaagcataattttcaaagaatataaataataacaaacagcgaaagtatcaattaaagatgcatgttgattttgatccaatacaagtggattggtccacattctcgtccgagtgtgtgcaatttggtggatacaacatttatcgggggttgccctatcagcgtggagcgggagttggcgcagtgttcagaagtcttatgagatatttgctgccgattggaaagcaaattggctccgcaattggacgtcagggaatggaaagcggaaatcgagtactcaccaatgtgctggagggaaaagacctcagagagtctctcgttagtgagagtaaggcaggactaaagaatcttctcgaaaaagcagccaacaaacataaacactcagaagggtcaaggttttgattttaagcgatacaaaaaagactcggctccaaaaattggaaaaataaggcgaaaaaatataaataaacttcaatcgtcaatcggtccaccaatggttgatgagaccaaaaataaacgtctgcgtgttgactcattaggaacctattaaaaatgacttgcctacaaaaaatcagcgacagcagtcctctagcaattaacagtggcctaaacattttctcagttccaccgaccaatgtgtccgttgttcgctcattctttcgtcaggtgcttccactcgcaacaataacgcaagaatcgccttatctatttcgtctttacagtgacaatttgtggactgatttgtctcgggtttatctttatctcgaagtgtccattgaaaaaccaggagcaaacgataaatgggttgcgatagaggacggggatactcatgtctctgccattcaagggattggtcaaacatttgtccagcaactaaaagttacggttggcaacacggaagtatacgatagcggaaacctatacccattcaaggcctatatcaccaatgagttaagctttccaataaatgccaagaaaaattttcttggttcaacagggtattatcacaccgtaaaccaagatgactcaacagacgaggggttcaaagagcgttgtaaaatttttaagggtggaaaaaatgcgcaattcctctcccgtctcgactttgatttgggaaaccaagagctttatctcttaaataatttggacttgctcttcacaatttacaaggccaaagatgtctttcttttgcaaacattaaaagcaaatgattccaccaaatatcgtttgacagttcacgatgtcaagatttatgccaaaatggttgaggtccaaccctcactaaacatgagcctttacaaaacccttgaaaaacaacccgccacatacgcagtacgcaagaccgaaatcaagtcttcattcatcagtgttggtcgatacgaatttgagtacaatgtattcagcgcaaccattcctcgacgtgtgacaatagcgttggttggcaattcagcatttcatggtgactacaaactgagtcccttcatgtttgaaccgtttgatttgcgtgagatttcggtacatgctggtggcgtagtttacccagctgttccttataaactaaatttttcaaatgatcactttgtcacagcctttgttgacatgtatgaggcactcggaatggctaactctgaacgttcatttgacatttcaatggcccagttcaaaaaagggtggaccttttttgtcattccaatgacatccacgcttgacgacagctgtggatttgagctgttgagaagcggtacgacaaacgtacgagcaacattcaattcaccaattccgcttggtggtgtagagatgattgtcttgggtgaattcgaccaaatgattatggttgattataaccggcacattgttaccgattcaaagcttggataaattataaataaataaaaatattattgtgtaatgttaaaatgaataacaccaacacaacaaaacacgacatacaaattttgaattccccagaagagcctaatgaaactcttttgcatgtactgcttttttctcattatcttcttgcatttcctgtgtttttgcttttttggttcgttttaattcggtggcttaaaagtcacggtcacctctcgcccagcgaggccgagacagtaatggaagagatgaaaaatatcccccgacacccaccaatattttttgcagcaaaatgatgcaagattagagaaaactgacactgaactctctcttcagtatgacaaaatcgataatgactcatgctgatggagcattctcaaagctactcattctttttcatcattcattttacaaaaatgtctccaaatgaatgttctgaccgtccctttcaacaacccgacaatgtacaacagccgcatcaacaaccagatgaagacgccgagttgcgcgcacaaattgaagacgcggaagaggatttgctcttgaattggtggcgtgaagatccgacaattgtaagcttgtttttcaatttagcatttttaatttcttcacgtttcagattcgttttctttttggacatggtcgagcccctgccatagaagccgcgcttcttcaacgcgccgaacgtgaggcagaaattttgcgccaatatgccgagaatcaacaacaatgagaaggggccattcagatatcatgtcgtatgttatttttcttattttttttttattatgatgataaaaaattttacaatgcagaactgcggaggagaatggaaatggatgatgggggggggggggactaaaactcgcgcacccttgaccgatttacttcaaattttactagccgtcaactcacacccccttaagctgaacggcgaaagaatttcgcctctagcacaattttgagcagtactttcccgacgccccgcccctcccccatcccgagacttgcgcagcaaaactgtggtggtaagaggaagttcatgccgttgaagaggaggtccgcggcgacggagagaggggggtccgcggcgacggagagagggggtccgcggaagagagggggccccgatccgacggagagagggggtccacggcgatggtgagagggggtccgcggcaatggaaagagaggtccgcggaagataggggggtccgatccgacggagagagggggtccgcggcgatggtgagagggggtccgtagaaaagagggggtccgcggaagagagggggtccgcgctgcccaacgaaatggcggaggcgaccagcggggaggcggccgagctatttaacgcaaaatatcgctggtggccgactggttaacgcgtcgacccaccaccatctcgggttcaatcccgcgcggcgaaactcccgcgcatttaacacccacagcccaaaatctcgcgcaaaccccatcccacacccccaaatcccgaccccacaccgtcccgcgcaccaaccaccatcccgaacccacatttcccgacacccccccccaccccctccccgcgcaccacacgtcagagacgcagacacaaccacccattaggcacgggcacgcccgctcatactctctgcgctcagcggagaaaatcaatcgatatttaaagtaggcaccctatgtagtaatcgggaaaattcgcacgtcggcaaagagagggtggccatcatcccccaccttggctacgagaagcgtgggaagcagagtgccatcgcacgaaaatacctcaagtggcgtgccgaggaagagatgcgcgacaacggatggactcttcgccatgtggaaagccctggcggcgagtacaaacatggcaacttcctcttggacggcatgctcgagaggatcggcgaggacatgaatttggcgattgaagtgaacgggtaaagaaacacttgccaaacttatgctaatttttctcccttcaggtgttattggcacgcgtgcccgcactgtttccctgaagacgacgcaattgttggcggcggagagacggccggtgccattcgagcgagggatgagaagaggatccggcaaattgcgcgggacttcgaggtggagatcgtgtgggagtgccagctcggccgaatgctggaagtggacccaccgatgaaggcattctcgacaacacgcccgactccggcccgattgacttccatgacgcctttttcggaggtcatttcccccaattttggttaaaatatgcaaaatttgtttacaggtcggactggccccgagtggctcggagcatccatcatcccggacaaagaaggacaggctgggcggaccattaaagtgaaggacttcaacagtctgtacccgtccaggtagaaaataaattaaataatcacaaataatcaataattaaggaacatgttcaccaactaccccgtcggtcatccaaaggtcatccaaatggacaaggacgtcaactggactgcgaaggaacacattgtggacgacgacggcgtgaaaatggagggcatcatcaagtgcttcgttgtcccgcctcggcactgcctctacgacattccggtcatcccaatgcggcgtaacaacaggaccctcttcccactctgccggaaatgcgcggagatgtacccaaagggtctggtcgaccctgagtacaactgccctcactttgaggacgctgagaggggtaaccaatggctttattttccaatgattttatttttccttcgcaggattctcaacgaccatcccacacatcgagctcgaggcggcgctgcgatccggctacagagttacccatgtctaccgggcgtacgtttggccgctgtattgtgattggagcaacggcctcttccactcctacctcaacaaattcctgcgcataaaatttgagggtaattttatcagcaatcaaaactaaattaatcaataataatttagcgagtggattccctgctgattgtgccgttgatgacattgacgaggaggagagggaacgccgaaagcagcagtacattgacaacccatggaagggctgtacggtgcggctcgacgccaacaacatcaagccgaatcccggcatgcggtacctttcgaagctgtgcctcaactcgctgtggggccgctttgccttgcgcaatcggcttacgaagacggagatcatcgactgccacgctgatttggccaagcttctgaacgacgtcaaaatcgacatcagcagcatcgaccaactgacggagaaattctggatggtgtgctacaaggcgaaagatgagcacgtggtggagcacgacaccagcaacgtcgccattgccctatggactacggcagcggcccgtgtgcacttgctcaactcactgcaatt

SEQ ID NO: 427 - DNA, 1724 bp, Heterodera glycines
ataagtttcgtcgattttcagctgggcccagggcttacgcttttgggctgtgtaacaacgcatccggcgaggacgagtacaagctgaagctgcgaggcatcatgctggactcgaacgcctgcacgcgcatcaactttgagaagatgaaagaaatggtgctggagaagtggggcacgcccggcaaccatgtgcggttcgactaccctacgaagaacttccgcatcacgaagcagggcgacattctgacggtgcccatcaccaagcagttcaatcccaccgtgaataaaggggtgctccgggaccgtggacttaaggttgtcccctttgggtatagctcatgggagtactgtaaggcccataacccctacgattgtttctgtaagcgcgaataatttattcattttgtacttttatttttcaaaatcctcatctgtgacccaatatttttccggaaatccgataaatttcaccaatatttccttttttccatccctcattcgttctttgtattttttctcgatcctatacattgtgttttcgtccacttgtacttttgttagctctggcaaataaaactttctattcatttttgtgccataatagtccttgagcaaatagtgctggggtttggttgcgcgtgccgcatcaacggtgtacacatggtcagaatagttgggaatatagccttaagcacaagaaaaatacagaaaaaaatggaggagtcactgtacccttctcgaatatgtgcttgggctcggggattctgacagtctcccccgctttgatctttggtctcttctccgctggtacaagtccttcgccatagaccctcttccacacctctctcgcattgacgtcactgatttcgtttggcctaagtcccgttgcgcggcacacagaattgttaatcgcagacaaaaacttgggcaacacatccacccacgcagaggtgtttttggcagagaaatatttgtacagccgagtcttcagcgtacggatggctctctctgcgacggcagccttcttctttgagctggtctcatacttcttaatgccattctcagcgaagaactccttcatgggcttggccacaaactccagcccacggtccgtgtacagtgtttccggaagctttggcatttggccaaacacctcctcaaatgcccttttaacgtccgccggcctcttactctttacgggtgagccgaacatacgccgcgacaacacatccaccgccaacagtaggtaccgatagtttttgtttctggttccgtgtcaaacagaaggacccgttcagaaggtttaggcaaatctccaccagagccaacagctcttcacaacctgcactgctcaacaaatgacgcctcttcttgtgagatgtcgtcctcccaagggacttcagatactcgtagttgtccaacacccgctgtccaaccatttgcttcttaaccatttttgggtacaaagacaatcttttcttcgtcgtctgggaaaatgtttgtcctcagtcgtaagaggttgtctgtgtttgcgtgtagtgtcaccaacagatacccgtacggatcggcacacgcctgcttgtacgcgtccatcagaaatccttgctcgcgaggaaacatttggctggacaaattacgaatgctcagcatatcgctgggcgcacgcatcaggaaaatgtactgcgcattggaccttggcactctcatcgcctttcgaacaggttt

SEQ ID NO: 428 - DNA, 4691 bp, Heterodera glycines
gtttccggcaccggtgcgccgcgagcggcggggacgaacgtgcggagcgcaaggtgcgcgggctggagctcacctacaccgccagccaactgctcccgttcgagcgcatgcgtcagctggtgctcaacttcttcggccggtgagcacgagggggtgggtgggataacaatggaatgtgtgtgtgtgtgtgtgtgtatgctacccccgatcaggatgcctgacgcggagcagcgagtgcccgtcccctgcacccgcttcgtgcgtacgaagcgtgccgaggtgttcacgcgccgcggcaccaagctgtaccagcccgtgtacaccaaagggctggtcgttgcgcttgacgagagggaggctggcggcggcgccggaaatgcctacttcaccagaccgtttggctggtacgacgacgacgacgacgctgaccgtgacgatgctgaggaggaggaagccgaagatggggaactcttggacgaaagcgacactgatgatgatgatgatgatgatgatgttgattttttggtacttggatgattttttaaatgtatgcgcaaaaatatatgtgaaagtgtggtcgcactttatggggggaaggggtggaagatttcgactatcgcctgtaagtgcttctgttgaccatcgtctccatgttctgtaaggcctcgtcgatgtgctccactctccgtacgccggtcacaatcagctggccgttgacaaacagcagaaaagtgacggcgatcggcggagccacgctctgcggttgttgttgttgtcctcgcaaacgtgactctgaaagtgccatgctgagcgtgcaacgtagcgctgggaaggcacagaagtccagacggcagctgcgcacgccgacaaattgggtgtcggcgagaacattgtcgtcgtggttttggtcaattgccgagtgtcggctcatcaacgagttgtacaaacgttcaatgtgcactcggaagggcaagcgtacgctgctcaccagattccgcactctcacttcccctatgcgtaaggctcgtgcagcggttgagagtccagccccacggagcgccgccccaacccggcggcgcacccgatgggccatcacgttgactgtcgagcaaagaccgcacgcgggagcgcgcacacctgtcatgacgacacgtccgctgcgaaacagcagagctgtggccactccattgggctcaacggcgtcgtcaccgctgttgtagcctctaatgcgtaacacgatggcagggaagcgtcgcggcgcgtactccgtacagatgccatgcgttgccatcgcacggaattcggtgtgcgagaaagcagttggccgattgttttggcaaaatgtaaatgtgaccgtactgtttcggatagtattcaacatctacaaatccatgggcttgcaaatttattttaaaaaaagtgcacaaacactataacagcacaataagtcacgtgatcacgcgcgcaaatctacaatgaccatgtctctcaaaaagctagttgttagcgcatcgacagcaacagcggcaacaatgtcgttccggcattgccatcgactttgtcggagccatgtcgccggattcacgacggtatggctcttcttgcttcaccgtctcctcctgtttagcgcgcttcgtacgctccagcacgacatggacgagctccaggctgaaggcgttaacgctcacttcccccatttttgcgtacccccccccccccgcttacgggtagtaggaggcgtgcgtgccgcccccgaactcgatcatgcacggcatgtacgggtgcttcagctttagcccgtgtttggcgaagaagtattgtcgaacctggacagaaggccgcaccatgactgcttctacacactcaccgacttacggtaagctccagatagccaccgcaggcgaacgtccggttcgcgttttgcacgctgaggtcgtgacagtggagcgcaatgttacgctccgccggtttcagatacgcggtatgaagtcggcagtgttgttgcaggtgcgacaccatacgctgtcgcgcgtggacactgtggaagaggagttgaagctccttcattgaacagtcgttgaacgcgcacaggtagttgagcagcggcattcgaacaggctacaaacagtggtggggggggggggggtagaaaattagctggcctccacctacctcctcttcctctcccccgccgagcagttttgcgccttcgcttccaccgccaccgcccgtaccgttcgtcatgtcgctgtgctcactggagcgctgctccacccctttaacagtgtcggaggagtcatccacaacggttgccgtcgcggccgagggggagtctgtggcgacgggggtgtcttcaatgtcctcatcctcctcctcctcctcctccccatcatcggattcgatgaacagcagtgcgccgtggccgccgctgccctcttcagcaccgtccttctcggaggagggggcttctttttccagtctaaactcggcggtggtaggtgtggtgacagtagctgtgtcactgtggaccaactttgctgtcccgttttcctcctcttcgtactccattgagcccacagcagtgcctgtcgtctgagccgttggtcgcagaatccaggcgacatttccgaatgaatccattttgggggtgagggtttagtagaatagaggaagaaattttttatctacatatttatatatatatgtgtgtgtgtgtgtgtgtgtgtgtgtgtgcaaatacagagggacacaaaaaaccgaagaagggaaaatgttcaagcacccgttcaccatgtgcgtcgccggatgcaccggtagcgggaaatcgcagtgggtggaccgccttctttctcacattgacctgatggtcagtgaaggccctatcactggcgtgctctactgttatggggaagtgaacgacaatgtgctccggctacaacgtatggagaacaccgccaccacttcaagtgacagcaacaccacggagggaaaacattcgatcagaatgtgccatggagcgcccgaggagagggatgtggagcgggaagcacgcgctacgggcggacggctcctgttggtgttggacgacctgatgtccggcggtctacgctgcagctttctggacacggtgttcacccgtggctcccacaactggggcgtcagcgtggtgctcatcacgcagcatctgttcactcgtgagcttcggatagcgcgcaacaactgtcactatatggttttgatgcggaacccggccggcgcacttcagatccgcaacctcggcgcacaactgtttccgggcggggcgctacgctacttcttggaagcgtacgaggacgcaacggccgaaccgtttggctacctgttggtcgacatgcacccaaccacggagcaacagttgcgcctgaaaacgcatatatacccgggggaaatgtgcgtggtgtacatgccacgagcgcgcgcgaattttaatgcaaacgcttagcgcaattagcaaacagcagtcgacaccgaaaaaaattgaaaggggcggagccaacaacaacaacacattgaagaagaggacagaagggtctggcgaggaaagacgacccagcagccgcaagctcgccccgtctcgccccccagtgctgagcgaacacgtgaggcgccacattgatttcttccgacaactaaaggcagcacgcagctctcctacccgctgccaagcgctggtcgccggagccagcagcgagcagcttctctgccttgtggagagcgcactgaacatcttacgagcacgtgtgcccatccaacggcgtcatctggaccgcctcaggcagcgtgcgagcgacgtccgcacactgagcagggtgcgtagcacacgctccgcccgtcgccttctgctcaacgcccacgcaccgtcaacagcgcaaactggtcgtggcataccgcctctggtcgggttgctcgccagcgtgctggtgcccgtgctcgtccaacgcgtattcgagacaaccagcagtagtagctgaaaggcacccacacgcacgcttgcccacgaagaaacaatgacgttgaagcacactgttcgcatgctactcatccccgaggatgtttatcgacgtctgatggacaaccccagtgcagcggcggcgacgtcttctacaacgtgcatgaacaagttgcccacgcccgcaactcccattgagcacacggcacgcaaaatggtggcggcatcgagcaagcacacgaacgacgacgaacgcctcatccactaccaacaggagttcaaacgctaccagaaattgctggaagaggaggcggaacgaccgctcaacgtacagctatcgcaacgggcaacaaacgcactgcgtgacactgtgctgcagaaggcttcgccggcaacagcgacgccgccgccagctcgcccccaacggaccacacctctgtccagacgacgtggcttacagcatcaaaaacaagtgccgagcgcatcttcctcttcttcgacaaggccaacaaaaagtagcagcagcagtgacgagcaacaacaaccgctcccccagcagactgttgctccacaaaaaattggcggtctgcctaagcaagctgagccgcgtatgcatgccgcgatggcgtacgcgcaacagaacccaggcttgcttggcgtcgacggtgaagacggtcagcaaattttgcacctgcccagggcg

SEQ ID NO: 429 - DNA, 7679 bp, Heterodera glycines
  unsure (1)..(7679): unsure at all n locations
cagaagggtctggcgaggaaagacgacncagcagccgcaagctcgccacttctcgccccccccagtgctgagcgaacacgtgaggcgccacattgatttcttccaacaactgaaggcagcacgcggatcgcctcccccgttgccaagcgctggtcgccggagccagcagcgagcagcttctctgccttgtggagagtgcactgaacattttacgcgcgcgtgtgcccatccaacggcgtcatctggcccgcctcagacagcgtgcgagcgagcgacgtccgcacactgagcagggtgcgtagcacacgctccgcccgtcgccttctgctcaacgcccacgtaccgtcaacagcgcaaactggtcgtggcataccgcctctggtcgggttgctcgccagcgtgctggtgcccgtgctcgtccaacgcgtattcgagacaaccagcaatagtagctgaaaggcacccacacgcacgcttgcccacgaagaaacaatgacgttgaagcacactgtacgcatgctactcatccccgaggatgtttatcgacgtctgatggacaaccccagtgcagcggcggcgacgtcttctaccacgtgcatgaacaagttgcccacgcccgcaactcccattgagcacacggcacgcaaaatggtggcggcatcgagcaagcacacgaacgacgacgaacgcctcatccactaccaacaggagttcaaacgctaccagaaattgctggaagatgaggcggaacgaccgctcaacgtacagctatcgcaacggacaacaaacgcactgcgtgacactgtgctgcagaaggcttcgccggcaacagcgacgccgccgccagctcgcccccaacggaccacacctctgtccagacgacggggcttacagcatcaaaaccaagcgccgagcgcgtcttcctcttcttcgacaaggccagcaaaaagtagcagcagtaacgagcaacaacaaccgctcccccagcagactgctgctccacaaaaaattggcgatctgcctaagcaagctgagccgcgtatacatgccgcgatggcgtacgcgcaacagaacccaggcttgcttggcgtcggcggtgaagacggtcagcaaattttgcaccttgcccagggcgcttatcgccccatccggggcagcaaccttgacacgctgctccgctaccactttgtgggtcgtcatcagcagcagcagccgcggtcctccactaccacccccaccgccagtgtcgctaaggcaccaccgggctacaaaaccttcgtcaacaatgcgcgtgacgatcttcaaatgtggcgtctgctgtttccggatgaaagggcggcggcggcgggcagtgattcagcgtcaacagtgggcggacaacctcggcgccaccaacctctgcgcggacagaagaaaactggcgcgggccgcttttccctgagccgcctactacagcctaatcatcatcatgcacataaatctgttcaaaaaagtgcgacgagcaagaggaagcccaacactgtggagcattccactgccaaacgttttaagcctcaattatggtgattggaagcaacgccgtccgctcactgacggtggaaagtcttttggacccgatttacaaggacgaacggtcgccagcatgcttcaccagcgtagagcccctgctgcgggaggcgaagcgccggcacccggacgcccgtcttacgcgcgctgagatcagccgctacttggcgagccaacgtgtctacactcttcaccgacaagtgcgacgacgcttccgccgtctgccgactctggcctccggtctacacaccgactggcaggccgacctggccgatttccaacgtctccgcgcgcaaaaccgtgggtacgcctacctgttggtgtgcatagacacgctgagcaggcaagtgtatgtgaagccggtcaagagcaagcgctcggacgacatgatcgcagcgctcaagcgcacctttgcccgctgtggctacacgccgtggcgtctgttgacggacaagggccgtgagttcaccgcctccgctgtccaacgctacttgcgcgacgaggcggaggtgcgtcaccactgcatggaaacatcgccactgtggcacgctgggatggcggagcgtgcaaaccgcagcatcaaagagcgcctgtaccgttacttcacgcaccgtggcacccaatgctggacgcgggtgatccaacgcattgtcagctccctgaacgcgtcgccgaacagcagcatctttggcatgcgccctaatgaagtgtgcttcgacaatgcggagtcgctgcgccagcggatcgccgaccgtgcggaggcggagcgcggtggacgtgcctctcaacatgcgcggttccgccccggtgaccatgtgcgtattgagcgtgcgaggggcgcctttcgcaaaggctacctgcctcggttcactgacgaggtgttcaccgtggatcgggtgtgcacaggcagacgacccatcacctacaagctacgggacatggacggtgaacccatcaccggcttgttctacgccaacgacatgtgtctggtactggttccaccctcgctggacgacagcagcatcagaagcagaggcagcattgataagcgtaaaacgcggaagcgtctacctggtggcatcgacaacaacaacaaggtgtacgccattgaacgcattctggagcgacggtaccggaaggacggcaccgagtgctgcctcgtcaagtggaagggctacagcacgcgtcacaacagctggattccggcccacacaatcatataaaatgggtcaacagcaaacacatgcctttcatcatcaaaggaaatgtcaactgccgcattcacctcctcctccttctacgtggtgctgccgtcaaacacgccggtggacgggaaccggaccaactcattccgtgtccatttaccacgcaaactgcagttcaacgcgcagtggagcgtcggcctggccgtgctcgtctacccccactcgtggccctccctgggcaccagcgagccccagtttgtacgcgtcgagtggcagaccggcgagcacattcgcatcccggtgccggcggccaacattcggaacccagctcagctcctggacagccttcaccacgcgttgggcgaaggcagtgaacagttggcggaccagctgcgcaccattcactccgagtaccagcgctgtgtgaagggggcagaacaacgagcctccaaggaggcggaccgtcagcgggctacagaggaggcggccgagcgcgagagacaaaacaaaacgggcccccgcaacgtcaccgtgccacccccgcccacaacaacaaaaacgccaataagtggggcgcaaaccccccataccaccatccccgcggtccctggcggagcgagcgtacagccgcacgctacccaacgacatcaggaattgtacaaacaactatttgccactatgttggaggaaagcctggcgcaagcattgacggaacgcgaccgcgcaatgctgaacgcacatttgcccgtcggcctggagctgtggacccattcctaccggcgggctcgcatggcctgccaattcaactttgacgaacatctgcaacgctttcgcctgaagctggacaagcggcgcatacgcctggtggagttgtccgcccagttggcctacatactcggcttcggcacctccacgctgtccgacccagtcaacgtgtcagcgtacccgccggacatgaagggcggcgtctccaccttctacgtctacgctccgggactcatcgagccgttgatcatcggcgacgttgtggcgcccgtgcttcgcgttgtcaacatccgtgggatgccggatgagattgttgaagaatgctacaccgctgtccaataccagaagctgatggtgaaggagatttcggatattctgatcgagatacggaccccgtccggtgcattgatgccattccagtatggaacctgtacactgactttacatttcaaaaagactccctacttctgaatttgtattccgtttatagagacacttacgcgcataaaagttccatttcccaacattgtgagagagagagacaaatgaatagcttacaaataaataagatattgaggcgctgtgccttgacccgcgagcgcttcctcggctgttttccggccgaccaaatcccagccccccgctcatcgtatccctattgcatggtgttgaacacggacacggcgctggagccaggcacgcattgggtggccgtctacattatgtcgtccaccactgttgactactttgactcgttcgcggactggccaccgacaagtgaaggcattcgcaccttcttacaccgttttgcacatgtcaaccgctgccccatgagtgttcagtcggaccggtcgagcgcgtgcggaaaacatgttatctacttcttgtaccgtcgctgccagggctggacccttgcccaaattgttgggcatttgacaaactgcaaaacgccaccggaccgtctggtggcagcgttcacacgccaattcatttttaacgatgctgacgctgccgagactatataaaacagcaacacaccagtacacgctttgacggaaaaaaacacatcgtctgataagcggtggctaacatgcacgtagactttgatccgctcggagtcgactggacccccatgttcacatgcgcccaaaacgacgcaatcgtgcactcgggccccgccgacgcgggccacggactcaacagcatcacgacacctatgggaaccgccgaggccgcagcagcagcacacaactatcttatgattggtggtggccatactacctaccccgtgttctccggcctaccgtaccagcgcggcgccgggcttggctccatgttcagaagcttcctccgcttcctgttgccaattggtcgacaggctggcgccgcaattgggcgccaagggctcgagtccggcgcacgcgttctctccaacgtgctcgacggacagaacttgaaggagtcgctggtcagcgagggccgcgtcggcctcaaaaatctgctagacaaagcggcggacaccgtggccaagagtcgacagaacggtggcggcaacttcgacttcaaacgatacagacagaatgcagccgaacccaaagagggcataaaaagtggaaagaaaggcctcttttccacaatgggtccgccaacggcacctgctaagcaacacaaaaaggagcttcaaactctggaacgcatactccgccgacaacaaccgggctcaacaccccgcaagcgctcccgcaccgtgacgccctcgaacagcgacgacaagaagcgaacgcgacgtgcgccccgctttgacacactcggcacctattgagagccccccaaaaaaccccatacgcgcacacaatgacttgtgcgaagcgcatcagtcagcagagtgcgttagcgttcaacagtgcgctcaacatttttgcggtaccacccaccaacgtgtcggtggcgcgctcattttttcgcgaactccttccattgtcaacgatcagccaggagggaccgtacctattccgcatgtacaatgatagcctgtgggccgacctgtcccgtgtgtacctgtacctcgaactgtccgttgagaaggcaaatgcgcagggcatcatggagccaattgacagtgtggtggacaaggaagtcggcgtatgccagagcatcggtcaaacatttgtacaacaactaaaggtgggtaacagcagaagccctcgcagacgcacacatcagtattcaggttgaagtgcaaaacacggagctgtacgacagcgggacactgtacccgttcaaagcgtacatctccaacgagctgtcatttcccgcaaatgcaaagagccatttcatggcttccaacggctactacgtaagccggacacacgatgacgccaatgatgatgggttcaagaaacggtgtgcacgattttcgggcggttgtaaggcggagtttatctcgcgcctcgactttgacttgggcaaccaagaactgtacctgctcaacaacatggacgtcctgttcaccatctaccgttccaaggacgcattcctggtccacagtctgggcgccggggctgccgccacttcgtacgcactccgagtgcacgacatcaaactgtacgtgaaggtcatcgaggtgcagccgtcgctcaacatctccatctacaagaccctcgaaaaacagccggccacctatgctgtacgacgcacggaggttcaaatcctgctttctgaccgctggtcgcacggaaatggaccacaacatattctcggcagccatcccacgccgactcaccatcgcccttgtggcgaaccgagccttcaacggcgcctacgcccacacaccgttcaacttccgtccatacgacatacgtgcaatcagtgtacatgctggtggaaacacgtatcccgccatccctcaccgtatgaacttcgtcggagctgcctacgtacgcccgtttgtcgacatgtacgaggcgttgggcatggcaaactcggaacgctccatggacatcacgctggagcagttccgagacggatggaccttctttgtcgtaccgatgacctcgacgctggacgacagctgtggctttgaactgctccgctcgggcaccacaagtgtacgccttcagttcaacagagagataccgcaaggcggcgttgaaatgatttgtcttggcgaattcgatcaactaatcatgattgattacaaccgtcatattgtgaccgattcaaaaattgcataaaaagatgagaaaatagaccctccagcatcacttttcatttgtagaggcacgaaactaaattagtataccaataccctccctctcaaaaaaaaacataaatgatcagcaacggaacaccaccggtcgctgactacttccacggtggaattcagacggccgagccgcttcagccagcggccaccgatgcttttctaaccgtgtaccagcccgacgcgtacgcatggcccgacagcgacacgttacaacgtgccgctcaagcactgatcctcgcactccactacaccgttatagtgcccatttttctcttctgcttcttcaccgccgtacgctggctacgccttcaacagcctggtttggatttggctcaccaccccccatataaccttgctggtccgcacctagcatctgttggggtgacgagcgccggtaacagcgaccatggcggtagcagcagcaataccagcgcagagcacaacgaattcgagcaccacctcaacgggataagagtcgcggcactttaccctcctcacaaattgccccaattcgtttaatttctccggtgcccatttggccgaatggtgaagcattcggatgctgacggttcgacaccgcacattgaaggctcgaccgcctttggcaaaacccctgactcatttgaacttgcaccgtcacgcaagtgaattaaagcgaaatgagtctcgtgttttgtcgaacgcggtcgtcaatgtatttttttgttactttctctcgggctgatgcatacgccttagggctcagacgcgtacgctcactcctcccgcccgctccccacccgtggcgcacgcctcccaaaggctacgttacgctacagaatcccaccgtcgaccgaaccccctcctccaactgacgaccgctcgcttccataactggg

SEQ ID NO: 430 - DNA, 3580 bp, Heterodera glycines
tggtttcctatcgacaaaatttaatccatatatatatatatatatatatatatatatatatatatatatatatatatatttcaattgacacatattttatcattttttaattaaaatcagtacaaaaagtctttttgggactcagtctcgattctcgggtcagctggagaccaaaaatttcgtctcgagcaaaaatattttccatttattattcatacttacttcctccccttcaacgaaaacaaggatgtctccgtattgtttctcaacatgaatttggattattgccgttgcagcagcttccaatgcgtcctcaaccggcgcagaaaggtactaaaaactttgtttaactgacagcctagccattttcatttttagtaaatcccttagggttggaaaaagtttctggagaaaacaaaaagatctttagaaagagcacaaaattctctataaacttaaagtcgcaagactctactactatcatggggaaataggctgaagaaaataatggatcatacagtaagaataattactatgtaaaataattgttttcaaccaaaactcagcggagaaagctagtaagtaaacaaacaaaagaggttttgtagataaatttctcttatttgttagtccttaatacgtattccgtgcccaataagtttttttcaaactcaataacaaaattttcgataaatttcccacgtaaagatttttttcttcgcgttccgattactatgaatccgaccaagtttattttaaaataatttggtttatttttaacttcttaatgccaatacttaaagtgagtctaaagatatgaccatgactgtataataattgtgtacaggcacttagccaaaaatttcggagcggggaacccgaagacctttttgctcatcggacaaaatgttttctctcgggttttgtttttcaaaattttcaacgccgggcagaaaaagtcggaatttatagtaagttttcccaaaaatgacaattttgaccaaatcatcaaaaaattctcctcctgggaaaactcataaaaaaatttgggtcaaatttattaagaaaatggaggaaattaaaaaatgcattttttgaataattttgatttggcgagagggggaattcctctccccctggctaagggcctgaatttgcgtacttactaattgttgaatagaattggttctgcattcaattcggacatctttgcaatcatttcttccgacaccacatccggaagtcaggtattgtcggaagcggtcaaagtccatagtggccgacatgaagaccacttttaagtgggcacattttgtggagatatactaaatgttataataatgcttgtattttttaattattatcaacaactttagtaaataataaaaaataattctttttaaaaacatcagctgtttttcttgcaatattttttctttttaaactttttatttaaattttgggttttaatatttaagatatcagcataagaacattttaaaatttcattttatgcacataaggcaattatatattataagtagggcgtccaaaaatatggacataaaatagccaaaatatcaaaatatagacataaaattgcaaaatatggacataaatttttccaaatttaggctataatttctcaaaatttcttcaaattcactaaatgcaaagtaaaactttcaagaatggctagatatgtattaaaaatcatctttgaagaaaaaaacacgatacattaatcaaaattttcgacaaaattttgataaaaaatgtctttttcgcaaaaattttccgatttggggtcaaaatcccaatttagctgatgggggcctttctaatagaggttttttggaaaaatcccagaatatggacataaaatatggataaaaatgccaaaataaggaaaaatatggaaatatggacataaatcgcgaaatatggaaaaatatgggaaaaatggatatggaaacccatcctagaagctttaaaccaagttaaaaacatgtttttcgtgcgtttcagacctcccacagtccaggaaaaaaatatggatttccatataattggaagccctaattataagaataaaaccaaatatttaaataattttcattttacttatctaaattttttaaaaatttctctcatattgagctcatcagtaagataaaatccataattctcgttgaaagactcttctttaaatatatgacgaaaagcagaaaaaaaatagccaagaatcttttttcaataaattttcaatactcccaaacttgaaattaatgacgttaagctgatatgtattagggctcgaaattatatggactaaaaaaggtcaaatatggacgaaaaagcttaaaaattgccaaatatggactatggactgaaaactgacaaaaattaatttttaatctctcaaaaattccaaaaaattcaatatttgcttaaacaaacttaaaaaataaacttaattaccaaaaaatttaaagcttaaaatgccaaattttaattctagcttcacaatttaatcaaataaatctcaaaatttttctaataatttcatttgttgtcagtgaaaattttcggatgtgtattttttaaaagtttctaaaaaagtcgtttctttaggggtgtattttcgattttttgaatttttcttatgaaaatttcaaaaattgggaacaaaatattgactaaaaatgcaaaaattgtgaaatatttatttattcccgaaaagacccaaaattggtaaaaaaaagttatctttatatacaatctgatcaaaattcagaaacatttttcgtgtttcacctactacccttaggctaacaaagtttaattttttaccaggcacacctcactattaacattaacaaacaaaaaaaactaaaaactttttataccttttgcttaaaaattttccaaaatttgccgttccaaaaccatagacattaaattttaaaaaccaaataactacaaatttatcaatgagaaaataaagttctaaaaaataagggattcacaattttgatgttaatcattattggtgataagcagtgactaaattttagcccgcaaatcgacatgaaaaaaaatttgggaaaaattcacatgaatttttcagattttcattcacttcaactgcataattcataaaaatcacattataaaaatttaattatgattacccaactcttcaaaaaatttgggttttttaggcaattcaacagaaatagtggtcctcaaatcttaatgatataccttgcaaagcaaatttgtaatatatttgcgtgccatcgaaccaaaataatcaattcaatttttcgctacataaacgaatggtcgagtcttgcttttccgaccaatgatcattaatcattcgagataatgttcatttttatatatttcttagaaataaaaatttaaaaataaaagtttctaataaaattgttgcttcaatcataaagcgaggcggtgcagtgaagcgtatgatcactagagaccggaaatttcaaatttgcggatcccgctgcgggattggaatccaaaattctttgcgggacgggatcccgcg

SEQ ID NO: 431 - DNA, 6549 bp, Heterodera glycines
tagtgatgcttgagagtctcgttctcgcctcgagaaaagtctcgggttcatttggtatcggtattgagtctcgggttttcagtatcggactcggtctctgagactttcgagaccgagtattctttacacccgtaatgatcggcttttgtaaagttagaaataaatatacttttggttactttatgcttcatacccttagtcatgtgcatggtgtagcgggttgtgctcttggttaagttcttcatttatgagttggatcagtacccctccaagagtaattttttcttctaatctttcaaaattattcctttttcaagggaatctaatcaatttttagcaattaaaatcataaaatattgtcatttttggactaaatttgttcacaaagtgcgcagaaagtttcaacaattttccctggcggcgcctctcgtcaccgccgcagttccaaaataccctttatttattaatccgactcttaattcccaagataagaaattactaactgggattcctcaaaatcccgcgagggatcccgtcccgcgccggtctctaatgatcacccacccctttcaacaaaaaaaggttttgttgagaaaaatattcaagaatactcgctcagaattttacgatttatgtctgacggcactctttaggcgcctgaccctaaaattccttaattttcttaaaaatacgctaccaatcagaggaaaagtggagaggaaaagacaacaatttgatagttcaaagaaatttctgttaaaattaatttattgactttttaacaagagaaaacatttattttggtaatttcactgtatttttttttgctaaatttttatggaactaaaaaagaaatttcgaaccttaagcagagcaatgagcagatcactgtttattgaccgctcgtgaatctcatccacgatgaccacagcaaatttccccaaataataatcctcccggatcatattgagcaaaattccgtcggtgcagtagaataattccgcatttttcatgccccttgaatcgaagcggacggagtagcccacattgagcgcgttgccaaattcaacagttctctgcatgccgatttcatggcgcacccttaatatatttctcactgttatgagaatgagcccctaataagtcgctgtgaaataagaatcccaaaattaaagcaattcattgtttaataagacttcccccttcaaatttgacaatttatgaccagtagttgtttctgtgaaaaacggtatttgcatttttatcgttctactgtagtggattattttgattaattttagtttccatatttaggagggtatttttggatttttttagtgaatagtaaaagtttgtgaaatagttcagtgtcgaactttctccgtgtcgaaattacttagtgtcggaaataccagccacatgttgtcttttatcgattacttttataaaatcaattaaataataaattaaatttttagcgcgcccttaaaatgcgttatattaaaaatatgtctctcaaaaatgacttttatgttaaaaacaaattttaaaaattttcccatttcccagtggaattccatttaaaattgacggaattttcgtaggggaaaaaggcgggaatatcgttcccgtttcccttccgctttttatgaattcccgttcacggaagtttttttaccggaacctaattattatattgaacttttttgttgcttaaacaaaagcttataaaaatggtttcaaagactttggtcgagaatttattttggccaatatttttccgaagcgagaaattcgactacttttcttctgtgacgacgtttcccgctgtacccgaaaattaacataattttaaaaatgcctttctgctatttactaatgtctacctgctggccaccgttgtagcggcaattcttcttggcattgtgcagacaacgtagcgtttttcgttccggtttcgtagccaattgacgcaaaatgcagggatgcgtgtagattttccacatcctgttgacccgatcacacaaacaaatttgtgtttttcgagagcagagatgaattcagatctgtgctggtcaacgggcagactttggagcaccatttttattttgaatatttttcaatttaaatactaaattaataatataaaaacacaaatttgaataaagatatcattaaggttaatattcccaataaaactgcttaaaaaattttgattaagcaaactattaaaatagacgagtggaattaattcgcattaatctggatatggtaaaatattctaaaaagtagtcgaataaaataattcaatgaggaatgaaatgctatgaaaaattcctgatttaaaattgttttatcgatgaaaaggaattaaaccaatttaattaatatgctacatcatgataataaccaccccgtcaaaaaaactgctgatgatagatttttgaaaaaagttgcatttcaaatactagggttgtaaccgagatgggtccccggctaaaccgggttcaaatgacgcttctgatttttctaaggcactctccttaatccaaattctcccataggaaaaaaataaccgagatttttcaacggtgctagtgcgtttcttaaatccgccaaagtttaaaattttatagaattttaaatgtttaggtttttgtgtcttattaagtttttcaaaatattatttgttttgctacagacaattggaaagcttttattttaataattgtaaattacaagcttttaagagaagaatttaattttataagtattaattcaacttagcattttggacaagaatttttaattccattttataaaaaatgaatttttttgccatactgtaaatcacagttacatggagccagaacgatccacattctacctgagttttctggcattttttaataaaatttaaaaaacaattcttttatttaatttcaaaataatttttattcaatggaataattctctttttggatctttaaaaactttaaataatattttttataatatatttctcccaatttaagcataaaggatttgtccattgttcttgcccaaaaggtcaacgggaatgggggagggaatgaaaatgcatcaaaatagcacaataattgagaagcatcgaaataggcaccggtgaagaggtagagagagtggaaaatggagaggggaaaagtgaggagagaaaggagagggtgacggagtgacgacgaggaggaaagcgttggcgaggaagaggggatgaggaggaaaggaagacgagaaatgaagaggaagagagtgtgccgagaagggaaatgtgtgagtcgagggggggaggacagtggcggttagagccataattgaaggtcaccggaggggcagcagatggaagcaaagcgacgggaaagagaaaataagggaccatatcttttttagcccaaaaattaacacattttccgagaaaaaatttaaaaattggtatggactaaattatataataacgagggctgggaatttggctctaggaaaatcggacaccaactttaaattttaaaaataattttttgattctttgctttaatatttaaaatacatataataaagttacagtactgaagttatccaaaataaataattttattgccataatctatctacggtaggcatatatatttatatttttttgcatgcccttttttgattatctcaaaaaaagaattaaaaaaatctctgtgatccttgggaatcgagaaaaaaaaagtgtttaacagtttttagcatatgggaggggggatgttatccattttgcatgccatgccgtcctctgttctcgaatcattcggttccagcccagcccctgagtttgtcaatgtcttccgaagagtgaaaatcatgagaattcacctggacctaatcctccccaggcaaccgaagctgatcagaccatttttcatgaaaaaattgacgcaaaacaaaacaattctctgtaaattcaattcgagaacttggtaaacctaggcagatattaactcaaacaatcaaaattatttttaaaatttaaagttggtgtcggattttccagtgtcggatcttccgcaagtgccggattttccataggtgtcggattatccgctagtgccggattttccataggtgtcggattttccggctcccgggaatttaagtcattaaaaatcttcaaaaagtcataaaaaacgcaaaaaagtcacaaaaagtgcatgttaacttggtaaatcggcactcgacttttaatacaaagagagggttttaatgaaaaaatgtaaaatattaacttactataacataagggtgaaaaatgccaaaacaaatggtaaaagttacagtgcattttttcaatgaaaaaaatcagggctaacaaatgatttcaattgaaaacgaataaattgcattttctttgaatttaagtaaaaactaaaaattgcttacattgttgaaaaaagtttttgtaattatttaagaaaaggttcgatcgccaagaactttatactttagcagaaaatttttataaattttaaaatgacttaaaaacgtgaccggaaaatcggtcagtggaaaatgcgtcagtggaaaatgcgtcattatcattttggacaagaatttttaattccattttataaaaaatgaatttttttgccatactgtaaatcacagttacatggagccagaacgatccacattctacctgagttttctggcattttttaataaaattttaaaaaacaattcttttatttaatttaaaaataatttttattcaatggaataattctctttttggatctttaaaaactttaaataatattttttatgatatatttctcccaatttaagcataaaggatttgtccattgttcttgcccaaaaggtcaacgggaatgggggagggaatgaatgcatcaaaatagcacaataattgagaagcatcgaaatagagcaccggtgaagaggtagagagagtggaaaatggagaggggaaaagtgaggagagaaaggagagggtgacggagtgacgacgaggaggaaagcgttggcgaggaagaggggatgaggaggaaaggaagacgagaaatgaagaggaagagagtgtgccgagaagggaaatgtgtgagtcgagggggggaggacagtggcggttagagccataattgaaggtcaccggaggggcagcagatggaagcaaagcgacgggaaagagaaaataagggaccatatcttttttagcccaaaaattaacacattttccgagaaaaaatttaaaaattggtatggactaaattatataataacgagggctgggaatttggctctaggaaaatcggacactggaaaatcgacaccaactttaaattttaaaaataattttttgattctttgctttaatatttaaaatacatataaatttagcataaatacacatcacaaattacctataaaaatggacaatttaaacaaatctcttgggatagggattatgctttcttaacgtaaaaatagcaattggaaaatgcgccagtaatacagtattttgtaaaaataatattctgtagcaatatgtaataaaagggtaactgtaagtcggttactgtaagtctgtttcttactgattcaaataatcttctaaatcacagtatctggttttcccaaaatatatactgtatcactggcgcattctccgatcatcagccaaattcccttacaacagttctttgtttgtcatttgatcactttccgactaatgtgttttaacagttcgtcaatgtctaaacacttcaaaagtgcatcatacacttccaattcgtttcctcatcaaaagcaaatttaattgccttaattaattggttggcctcatccaacttgtgccacattatgttagcagattcactcaaatccaccatgtcttaatgaaaaaattaaaatgtaactaaataaatcttatcatatatcatatcgaagtgaatgaaaagtcaaaaattaataaaatatgaaaaaaataaaaattaaaaatgatattcgaatcgataaaatttatttgttttacgaattaaaatagtttatgttatattttccactttttaatacattattcattaaacattaaataaatatacgaaataaacttacacttaaatattgaaatgtttttagtaaataataaactataatgaaaaaacaatttaaaaataaaaataattgtcgataaaaatgggtgacggagtgacgacgaggaggaaagcgttggcgaggaagaggggatgaggaggaaaggaagacgagaaatgaagaggaagagagtgtgccgagaagggaaatgtgtgagtcgagggggggaggacagtggcggttagagccactaattgaaggtcaccggaggggcagcagatggaagcaaagcgacgggaaagagaaaataagggaccatatcttttttagcccaaaaattaacacattttccgagaaaaaaaaattaaaaatagggagagactaaattataattacttgttaaattggcactcgact

SEQ ID NO: 432 - DNA, 8711 bp, Heterodera glycines
gcacaaaacaaaagtctgggattgtctgtaggattttaggaatctaaaaagaaatctttataaatagcaaaaatttcaggacaatttgagaaacttagtcctgcccatcaatactgggatgaactgaaatcgccgcaaaccgagcgtggccccctgaaattggcacatttcttttccgcaacggcatcacaaacattggacgcattaaaaaatgctgaacaaatgcgatcaaaaagtttgaacagttcgtcatcgtccgcttctgattttaacattggcgctttgtttaaaaaagccagatccagcagcttaggtccaataattgcattccatctttaaatttggcttttcctaaacgcttccaaaattcaatgagaaatttggcaatttgacgattttgtgaatgaaattatgattttatttttttctttaggatctacctaaaataactttaataaaattatttttgattttttataattaatttaatccaaattcgttttttacgcttacgagcttcaacatacaagcattccacttttatgtcacaacattatttaactatatcatcgctttagggaattaattaccaaaaaagttcaacaggaaaatgaaaattttaggaaaattaaaattttaagtgattaataaatatgttcggttttcccaaccaaaatttccccaaaattgtttaggcgcttcttctgccaaactgtccgatctgagcaaaaaccatgacgcaaatgcttcttcttcaaaccccaagaaaggcattttttccatcccatcgcttttggcttcaaaaaagcgaaacggctcaatgagacgatcaaaatcttcacgagtgcatagcaattcgaaaaaccatttcaatacaattcgcatccacaatttatattaatactgttactcgaaatttttgagagttgagaccagagaatttaggattcgtgaccaaagtttggccaaaagagtacaagctagggatgtgcgagagtctcgattcccgactcgggaaatttctcgggttttcgcttttcggtctcgggtttttagtctcgaaaaccgagaattttttacaaaattcattaaaaatcacaaaaaaaaatcttgtctgcgcctctcggcgccgccggccttttgaaatagtgcgacgcaaaaaaagtcgttagttcgatgttgagactcctgcgcaaaaactcaaacaatttttgattttaaaaaatacattaaattaatttcattaagattctcggttctcgattgccgagtcgagaaatttctcgggttttttgggcctcgattctcgataaatcatttctcgcgcagccctagtccaacagcatttgcaaccttggtttaagatagaaaaagtaactattcgagtaactttatacacatatttggcatgacaagcagtattttcatgggttaagaaactgaatttttattgttgttgtaatcctttcaaagtttcatgaattatgttgtttgcaaatttacaggaaaactttcgcagcaagtaccgtatttactgaaatacagtctgttccaaaaccataaggtcactaaaatttttttaattaactgcatataacatttgttaacgtcagctaaattaaacattcttggtatcattcgatagcaataagttctctgttagctcacctaaattttagaaaaaatttcgtcaagttttaaataagttattgacaaaagtacttaaggaactaattgttccgacatttttggccaaaacttagccaaattttttgaaaaactattagggctagcgaattaaataagaattaaaaattttgtagctttggagcaaaattatggataacattttattagaaattttcatttgttgtttttgtataacgacatattcagttagtttcatattttaaaagtttcgattaaattattggtttatttataagtaaaaaatcagttatttaaaaattataaaaatcaaactatttttataaaatgttttgaagtttcagtaaaaaatttaattttaagcatactccaaaatttatttagacattctttatcaaaataacactttagaatttttagaaattaaaatttaaaatttgaaattaattttgaagaatttaataaatatattttggtttttagagggcaattgtaaccaactatcctcctcgggaggaggctaaggattttcatctgcagatacactagccaataccctatcattagcattgtgaatatgcaatgaggatagagttagagatggggatttttttgctagttcagaatatggataccttatccttatcattgtgaatatggatttatctgcagctagcgaatttaaaattcaacaaaatcacagttttattataaaatccattactagtaataaaccggataaagctcattgggtttttcataaacattcatggaaacagtggaataaaaatttagaataagggtcgacaaaaaataagattaggggtcgacgaaaccattcatttgatttgcaataattttttgaagataataataattatacacattttttacggttgcttgctgatcatgaatatgctatttatttatttcattttgcttttttcttaaattttttctttttttgcaaatcaggtcattaaaagagttcagagaatttaattttattataatattgttttgcaaatattactagagatttcatgttctctgtcttattgatgtgcttaaagaatttggagaatctctgatcattttttggataaaattttcactaattttataagccttaaatacctaattatacaattacaaattcataaaaaaaatttaaaatacagaatggtgggagccttcaacattcagcgtttgatttagctgggccaagttgtcccatccgtaaaaacgtcttagcaccctaattttggcacttgccattgtcccaacttcaaagttttgtaaatttttaaataccgtacttttttttctattaaacttaactaaaactgtggcaatcatttttatattattttgaagagatggattccaaacctccggagcgtattccaataaaggcctaatataagttttatataacgtaatccaaatcttagatgatttggatttaattattcgaaacaaggaacgcatacgtaaatacgcattccttgttattttgtttacatgttcggaaaattgtaatttgttatcaatatttactcctaaatccctaattgtatccacagcatttattgtatttccatcaaatttatatgtttgcaaataaaattgccaaatatgcatcaaatatgcacaaaaatggcaaaatatgcaccaatatgcacaaaaaacttgaaaattaggggtgcaaaataatttaaaaaatttattcctcataaattttatcggttgtttttgtaattgataatcaaaaaatttctcaaggttttcggcagtgaagctcactgttgacccactcgcgcatccattcagatttggatttaatttaagtgttgtgtatcaacaatttattaataaacaccaataaaaataaatgcacaaattgatgaggtcggaggagtgcagcgacggaggagaataaaataataaaaatgtccaatgcgaatgaatggagcggagagccatgagtgagggaatgggcacccttataaagacgcggggtcagagaaatgtggaggagataggcagagagggagacaatggaaataatgtaagacagagaaagggggaggggaaaagtcaataacagtgatgaggtgtaagtgatctttgatcctatccaacacctccctccttatgtcgattgtccctcgatttgggatttaagatcggattaagccatattttggctttgtcggatccaggaccagtcgttgaggtgcttgtttggctcttcctgatcggcgcaaaagaactggttgagcaggcgattgctgacgatttgtttgcggtttgtgcgcgatcggcgattgttgcggattttgtgcctgggtttgatcattttctacaacttgatcattgtcttccaattcaattgggaaacgtcgcctgatttggttggcatgacgatgaatggctcggccaagcgtcggtgccaaaatgcgatacgtcggagatgtgccgaatttctctataatttttcccgggagccaaatggctttattgtttttcaaattccaaaaataaattggttcctcattttggaaaatggttgatttggctccatgttttttgttgaattgattttccatctttttgatgtattgcccttggaattgttgaaaattttccaaatttgttggctggagtttttgtttttcgggatggacaagtgtcattcttgtgcgcatgcgtcggccaaggaaaagttcgtctggcgaatgaccgttgagtgccgtgtttggtgtcgtgcgatacgccaaaagcactttttgaagccaatctttgccttcttgacggcactttttcattgaccttttaaaaatgtcgacaaaccgttcagcggccccattcgacattgggtggaacggcggcgtgaaggtgtgttttatgtcgaattctttacagaattgtgcaaattcggcggatcgaaattggcttccattgtcggagacaatttctttgggaattccaagccgatgcacgaatgatttcagcattgaaatggtgagttggctggatgtcctttccatttgccatacttctggccattttgagtaagcgtcgaccaaaaccaggtatgtttggccgtcagcacacgggccggcgaaatcaatgtgaattcgctcaaaaactccgtttgctgctttccatggctgaagattcgcttttgtaggatttttggctgctgagtgacattcctcgcattgcttcaccagtcgttcaatttcggagtcaattccgggccagtaaacatggttcctggcaatggctttcattcgcacaatgccgggatgcgcgaaatgcaatgatttgaggatgttgttccggagcgtcgaagggattataattcgttcaccgtaggcgagacatccttcgatttcggatatttgtgccttttttggaagaaaaggagacaatttaatgttgtcaaatttttgcggccatccttgtttggtgaaggcactgatttgttgtaaaatttcgtcttttgctgtttcatccgctattatttttgcggtgatcgggagttgctctattttggcctcaaacacaaaattaacacagcaatcagtatcgttgcagatatttgcgatgagaatgtcttctgatggccttgggtaattagcgatgagcctcgaaagtacgtcggcatttccgaatgcttttgtgttgacgtatttaatatcaaattcgtaatttgacaaaattaacgcccagcgctgaagtcggctggctgaatatattggaatgccttttgttgatccgaagatggccagtaggggcttgtgatcggtcaacagaatgaattttctgccgtagagcatgcggtgaaatttttgtaccgcaaaaaccaatcctaaagcctctttttcgatttggctgtaattttgttgcgcagccgtgaaagtgcatgatgcgtgttcaatgacacgttcacttttgtcgggaaattgatggctgattgttgcaccaattcctccttttgaagcatcagcggccacaatgatcggcaatttggggtcgaaatgcgtcagcaataaatctgaaagcataatttctttagctttttcgaaggatttttgttgatcagtttcccaattccacggtacatcctttttaagcaattcatctaatgggcttcttatttcgcgcatttgtttgatgaatttgccgtagtatgtgagtgctccaaggaaagaccgtagagttgacttgtcgtgtggcgctggcatttttcgaatagcctcggctcttgatgggtccgggcgaatgccattttcagaaattatgtggccaaggaaaatggtttctttttgtagaaaactgcacttttcctgttgaatttggaaaccaaattgtttgattttgtcaaaaactttggtaattgttttgacgtgttggtcgagagttgtgttggcgataatcacatcatcgagatagacaaatgcgccattgatgggtgtaatgattttgtccatcaaactttgaaaaattgcgggcgctgattttacgccgaacggtaaacgctggcattggaagagtccgcggtgtgtgttgattgtacacagctttttagactcatcagacaattccaattgcagataagcgtcgcgcaaatcgaggcgtgagaaatatttagagcctgcgattgcattgtaaatgtcctctggacgtggcagcggatggcggtgtagctcaagtgcgtcgtttaatcccgtggaaaaatcgatacacacgcgtgttctgccattcctttttttaactgccagaattggcgcggcccaatggctaaattcaatgggctttattgcctccattttcaatagacggtcaatttcggcatttacgtcgtccaaagcgccatgtggaactggtcttgccttgcaatagataggctttgcaccgtttttcagaatgagattggccttgaatttggtgcaatgacctaattctgggctgaagacatcggagtgggttgatttgagcgccgaaattaatgtctccgtgtctttgatttcgttggttttcgttgaaattgtattgatttttggatgaagatttggatgcataatctcttttgggatcacctccaaagcttctatccatggcatgcccaataaattatgactgatttcggggctcacatatgccaacaatttcattggtggacgatccatgtattgcactttgcacatgaattgtccattaattgcaaatgtttggtcattgcaatttttgacgcgaatatttgctgacgtcaaaggcggtttgcccatttgaatccatgtttggattgtgaacaatgtgatttgtgcgccggaatcaacatgcattggataatctgagccattcactttgattggtattttccaccattttggatggtctgctttgatttccatgcaatttaagtcgatgatgactgtgttgatttgtgcatgcctttcagttgtattcaccgtttggatgtggcgaattgaagaattgcttcggcaaactttgccgagatgtccgattttaccacattttgggcatttggcatctctgtgcccacaatcggagcgccaatgatttgtgcttccgcatgattggcatggacggtttggcaatttgtgcttgctctcatacggttttggaaccgcttttggtttggcatattgctttgttgcgtctgccttgtcctttacttgttgtggcttggcacgaatggcattggcattgtactgttttgtgctgagtgccaatgtgctttccttcaaaatttggtactttttgcattcttcgcccaattcctgtagggtgatgcttttcccattggttcgggcttcttccattcgctggagacatcgctgtttcaaatccgaaaattcgtcgcgtaaagagatgatgagaatcatgcactttagctcttctttcttcaaatccaattcggcgttttcacacgatgaattgatttgtgccaaaagactcgaaaggtcttggttttggcattggcgaatttgaaaacaatcgaaacggcggaggaagagcgacctcgtctcaccaaaaatctttttcagatttgccacggtttcgagccagttgaattgttctgtggcttttggtgcaatgctgtcaatataccgtttgtattcctcctcgtctaattttccgaccaaaagttggactttggactgctctgggagcgaagcgccgtcttgttgaacgattttgccatatcgattcagccaagcgtcgtaagtctgtccaacctctggattataattgaatttttcgaggcggacattgattgatgccgcaagtgatgccgttgtggatgaccctgggtttgggttttgattttgaatgttgagtgcggcggcaaaaacttcggctgatttttttagagccgcgtccaaaatttgctgaagttgttgtgcgtccattttgattgttgattaaaccgcacccagcggaactttacaccccccaggtgatcagtttttgttgatgagaaaccgcacccagcggaacttacaccacccaggtgatcagtttttgtcgatgtccgatgaaagccgcccaggcttttgaattgccaaaattaggcttgctgaattatgccttgatttggcttggaggttgtgcagaatatgccttgatttggcttgaagattttgcagaattagccttgatttggcttgatgatgtgcagaatttatctgctgctgctgactgcgccaaaattgttgtgtatcaacaatttattaataaacacaaataaaaataaatgcacaaattgatgaggtcggaggagtgcagcgacggaggagaataaaataataaaaatgtccaatgcgaatgaatggagcggagagccatgagtgagggaatgggcacccttataaagacgcggggtcagagaaatgtggaggagataggcagagaggaagacaatggaaataatgtaagacagagaaagggggaggggaaaagtcgataacaatgatgggaaagtgatctttgatccctatccaaca

SEQ ID NO: 433 - DNA, 1448 bp, Heterodera glycines
  unsure (1)..(1448): unsure at all n locations
cagcggccacaatggattgggcaattntggggtcgaaatgcgttaacaataaatccgaaagcataatttctttggctttctcgaaggatttttgttgttcatcttcccaattccacggtacatcctttttaagcaattcatctaatgggcttctatttgccgtagtatgtgagcgctccaaggaaagaccgtagagttgacttgtcgtgcggcgctggcatttttcgaatagcctcggctcttgatgggtccgggcggatgccattttcagaaattatgtggccaaggaaaacggtttctttttgaagaaaactgcacttttccagttgaattcggagaccgaattgtttgattttgtcgaaaactttggtaatcgttttgacgtgttggtcgagagtcgtgttggcgataatcacatcatcgagatagacgaatgcgccattgatgggtgtaatgattttgtccatcaaactttgaaaaattgcgggcgctgattttacgccgaacggtaaacgctggcattggaagagtccgcggtgtgtgttgattgtacacagctttttagactcatcagacaattccaattgcagataagcgtcgcgcaaatcgaggcgtgagaaatatttagagcctgcgattgcattgtaaatgtcctctggacgtggcagcggatggcggtgtagctcaagtgcgtcgtttaatcccgtggaaaaatcgatacacacgcgtgttctgccattcctttttttaactgccagaattggcgcggcccaatggctaaattcaatgggctttattgcctccattttcaatagacggtcaatttcggcatttacgtcgtccaaagcgccatgtggaactggtcttgccttgcaatagataggctttgcaccgtttttcagaatgagattggccttgaatttggtgcaatgacctaattctgggctgaagacatcggaatgtgttgttttgagcgccgaaattaatgtctccgtgtctttgatttcgtttattttcgttgaaattgtattgatttttggatgaagatttgggtgcataatctctttcggaatcacttccaaagcttcaatccatggcatgcccaataaattatgggtaatttcggggctcacatatgccaacaatttcttgggtggacgccccatgtattcaacttcgcaccaaaattgtccttcaattgcaaatgtttggtcattgcaatttttgacgcgaatttgtgctgacttcaaaagcggtttgcccatttgaatccatgtttggattgtgaacaatgtgatttgtgcgccggaatcaacatgcattggataatctgagccattcactttgattggtattttccaccattttggatggtctgctttgatttccatgcaatttaagtcgatgatggctgtgttgatttgtgcatgcctttcagttgtattcac

SEQ ID NO: 434 - DNA, 2095 bp, Heterodera glycines
caaaaaacggcaaaaagggaagaacatgtcgtagttgaaattgtatacaaatgatatgtcattcgactcctctcggtctataatgaatgaatccgaaggaatttttcgggggtaaccatttcctgatgagttacagacccgggactcaagtgtccaaatccagcggtattcaaccatccaaagagtaaaattaaataaatttgtattaaacatttgtaaatttgacactaaatgatcattttacaagcacccgtcgcgggatcgataaagtttgctgtatagttaacccatacatgctgataagttggcattggcacgatcgagatattgactatgtggctgcgttgcggatttgcgcgcagattgacgtacattgaggcggaatcggtatggataattgatccacccgaacgtatttttggagcagcggaaatagtgttttcttgccttctgtcctcgacaaattccaaaacaccaattttttgaacattccaaagacccatcgctcagggacgatatgtccaacttgatacataacattttgacgcaaattgcgcatttttaccccgctaacaattagaatttgttgtatttcaacttataaaacaaatttgtcccttgaggtgaggaggggggggggggggggtctggggctcgagtccgtttgcctgcggtttatttttttatgctgattggtgaaaaatcatagacaaaatgatggatttagtaaaatctgaattcagattcatgatcagcgcatttttaccctaaactcattggaaaaaaatacccaaagaaaattaaaaactttgaaaaaaatcaagtacttgatgtaaaatcaaagataaatcaatgatttttcaaaatctgagttcagattcatgatcagcacatgtttttatcctagaaaaaatgtttttgaaattttactatttttttccgtcgggaccacaattctacacctttgccataagctataatgattagagatgggaattagtcgacttaaaaagttatgaaaaatcgccaaaaagtcatgaaaaagtcataaaaatgccaaagtcacatagaaatgccaaaaaagcaccaaataaatccaaaaaagttatgaaaaatagccaaatgtaatcgatctatctatctatctatgcattctactaattgcgtgctattttcgacaggaattcctttattaaataattcatgtgaagaacaaacaaacaaaaaatgttttttctccccttcgaaaagagagaaagcggcagttttaaaggcaccaagcttatggtaatatttgtgctctaaatatgaaagacccttgtggaatgaggccgccacataatcacgagcaatcccgtgtcctttttagaaattcccaaatgcgagtaagcagttttaatggcaacaagtttatggtcatatttgtgctctaaattgaaagacccttgtggaatgaggccgccacataatcacgagcaatcccgtgtcctttttagaaattcccaaatgcgagtaagcagttttaatggcaacaagtttatggtcaaatttgtgctctaaatatgaaagacccttgtggaatgaggccgccacataatcacgagcaatcccgtgtcctttttagaaattcccaaatgcgagtaagcagttttaatggcaacaagtttatggtcaaatttgtgctctaaatatgaaagacccttgtggaatgagttcgccacataatcacgagcaatcccgtgtcctttttagaaattcccaaatgcgagtaagcagttttaatggcaacaagtttatggtcaaatttgtgctctaaatatgaaagacccttgtggaatgaggccgccacataatcacgagcaatcccgtgtcctttttagaaattcccaaatgcgaataagcagttttaatggcaacaagtttatggtcaaatttgtgctctaaatatgaaagacccttgtggaatgaggccgccacataatcacgagcaatcccgtgtcctttttagaaattcccaaatgcgagtaagcagttttaatggcaacaaagttatggtcatatttgtgctctaaatttgaaagacccttgtggaatg

SEQ ID NO: 435 - DNA, 3394 bp, Heterodera glycines
  unsure (1)..(3394): unsure at all n locations
tctagagtctttgtttaaatgggtttagaactnttttaaaaaaatattttatataaatgatatttattttcaacttcatcaaaactgattaaatgttgtttgatttttgcttttacttattcgcaccatttttcatgatgataaatgaatgggtatttcaactataaatatatatattttaaatgttaacccgaattttgaacttaaattctataaatttaaacgacaacatataaatatattttatatttaaattatttttttattgaaaaataattgaaaattaaaaatcgatcacctatcactcaaagaatgagttggttgcaagaaattaaaaattaataaatatcataatataatagcaatattattaaaacgcatgtagcagattaattatttgttttctgtttttgatgaaagaaacattaaagaaaagaaatgaattaattaattagaaattataatttttataaagaaatggttgtaattgaaaaacgtatatggaaataaaaatttgacaaaactggaaaaatttaattattgttaaagtggatcggattctttatataaattcacaaattatcaatttagatgtaaataaatgataattaatgttttcctttgtttttgataccatttttacaaaaaaacaaaaaattttttaattggtctaatccttaaataaaattcttacttataaatacatttaattattaaacaaatatgtgttaacaaaatagatttattttttggcgtcaaaatgaatgtgaaaaagaagctggtcagacaagagaaaattcaaattaatttataatcctaaataaattgatcagaaataataaaataagatttttacgagtgccattatttttagagaaataaattattttataaaagtattaagcaaatatacgaaaattaaaccaataaaagataaaatataattttccatgattaaaaaagttaaatatcgagcggtagaaaaaagttaataaaaataataatgaagcaagattagtaacttttattgtaaaagaagaaaatatatgaataattttaagaaagtgtgaatctatatataaaattaaaaacgattgaaatattttaaattcaattttaacaaataaatttattaatgttaaatacaaaaaaaaacacttaaaataatttataattattattgagttaataatgggacctccagctgcattttcgaatccgagccctgcactatcataaaaaatatgtcataaaaatgatctaattttaaagttttcaaaagaaataactatcttgatgacgactgcatgtgaatcctcatgtcgtgaattctcttcactttattatttattgatttcattattttaaataactttttatttttgttttagtaatcttgtaacattttttttttgattttctatattaaaatatcaaccaattttaacaattaacgcagaattgaatagataggtttttccgcgcgattgctgtggttaaataaattattattttttttattgaatataaacattaatattttttagaataaaatattagtattataaatatcaccgcgacgctgctccatttcgtttaattcctcttcattcatagttttatattttaaagaattgaattttttctttttgtttaattcttaaattttttttaatgttttttaatttgctagcatgaactaagaacaattaactagtttattgtaaatagaaaaataagtttacataaataaagacagatattctaaatattgtggtgagcagaaagtctttgtatagtggtcaacaatattacttaaaacattcaaacaattcaaataataagggtttataaccaaatttgcaggctaatagagcagcatttagaatcaaaaaaatcagatttttaacaatttttttcggcgcatttttccgaaaaattttttgggtatgggtgagggaagagagttcggcgttgccgatttgccgataggcgatgccggggaaattttttgaaaatttaatgcaatttgttaacaacttctgtcaaaaattaccaaaatttgcgatcttgggctaatttttaagaaaaaataggagtttttgggcgccggcggtgccgataggcgccgctggtggaaaattttaagaatttttaatgaattttgttaggaattagcgaaatttttcagaaatttcctcttttaaatgaaaataaggcactaccccaaatcagaacatttcttagaaataataacattttcattttcttaatttttttgacttgcaaactgactattttaatttgctttttcatttagaataatattttaactttaaatatccagtttttaaaagagaatattcagaaagaaaataaagaaataacaccgacacatattaaaataataaaaagaattcgtaaaaacgggacagttaaccaattaaatttttatatttttatttatttaaaaatttttaaacatttaaaaaaataacaaaaaaaaagataaaaatacaatgcttttacaaaattaataagaaaaactaattataaacttgtataagctcaatataaactaatttaatttaccttttgagaaagatcagaaagaatgattctgcgcaagaatttaaaaaacatattaaatcaaagaaaaatgaccaatttgcagatttttcttttcaaatagaataaaaggacattttaaattcctaaacattcttctaaacgtcataatttgtttaaatgcaacaatacatcgggatcccaaaaaatcttcgggatgaattgggatttgtactggaccccgactcgggatacatctcggttctttttccaaaatcttcgggattgggatttggtcggggtccctccaaccttagttgtccggtctctagtctctaatagaaaattactgattcatttatgaatttagcgtaaaataaataattaaagtcaaaataaactcaatcaaagaaatttagcaaaatttggataatgaaataaaaaatagataataaaatatataacaagaaatattacacatttcgaataataatggaactccagaagaaaaaaataaagtttaaattttaaaaataaatataaaaaggattattatagaaaattcaaattaaaaataaatataaattaaataaaaataacgcgagacgaatttttaataataaataccattgctaccaagattccaatcaattagtcatagtcagtccgaaagtcaagaaaattattgtgagataaaataattttataaaattgcaataatagattttcggaaaaaaaaattaaaaaatataatgctttcatttaaaataaacaaaatcttaaaaattccgattaaataaaacttcagaacacatttaagtttaat

SEQ ID NO: 436 - DNA, 1789 bp, Heterodera glycines
  unsure (1)..(1789): unsure at all n locations
ttaatttttatgttnatttaatctaaagccatattcagtttcagcgtagagtttatccagactaattaattctgaaatttttcatgcatgaagtttcagctgtacaggctcattgagaacnncagagttcaaatataaataataaaaatatattaaacaaaaataatacgtccagatggaatataaattaattaaacaatataaaataaaaaatatttatttagtcaaatattttttttaaatcttaagttaaaataaaatttaaatactttttttttattaagtataatttgattttaaaaacacataaaaaagccaaatgagtgcgtgggaacatcgacagaatttgcgaaaatctacacaattgaaaatattagaaaattaatttctaacttttttaaaaatattcatgttaaaaataataaaatactttaaactaatattccaactctttgtattggacttgaatctttggaaattaactatagtttttgcgtaaatttgatttgatatgaagtaaattaaccatgttataatcaaataaacacaagacgagaatattaataaaaaataattgagtaaatttttataaactaaaattaaatataatttaaaattaaaaatgcgagtaaaattgattaaaataattaattatcatataaatatgttaagaagaaaatagcaataaataaagaattaacttaggtatgaaaggtaaagaaagaaagaaattattaaacaagaaaaaaataaaataaaaggaattatttaaattaattagtatcgaaattaaagtataaaaatttattccattcgtaatataaaataattatttattttcaaaaaactttaaaaaatcatttttttaatttttaaatgacaaataaatttaaataaatcctttgttattaaataaaatgagcatataactgggcgcatatgtttacacgagataggccacaagattaaaattataaaagaaattatcgcaaaagtgatttctttcaaggatacatttatatatgaaaataatttttaaatttaattttgtaatttaattttaagataaataataatttagaaattgaataaaatgagattaaaatattatgggtttaaattaaaaaatgggacaaagcaatgaaatcggtcagtgctcattaaattaataaaattattcgctaatgaagtataaattaaattaataattaaaagataacacataggaaaaaacaaaaaaaatagaaaaaatataatcaaattttaaaaatagaataaattataattttaaaagaatattttaaaaactaaaataaaatttaaaactgacaaataaaatgtataacaaagttgacagtgctaactgttttaatcatgatcaatcaatgactcatgatcaattaaattcaaaattttatcttaatcaaaccttttttaactcattacaaaatgataaatttaatcaattaaaaaatttattataaatcacttgaattcaaattgattttataaaatatttatacatataaacaaaaaaacgaccatggtctctacaaaaacaggacaaataaaaacttgattgaaaatattcagaaaaattaatttctgcgcttaatttaaatattcggtaaaaatagaaaataatttaatataattaatttttagactcaaatcgaaatttagcttaactacatatatatttttaatttattccattttacgtaacattataattgttgtgagtttaataaatgtattttattgtaaagtcagactctagaggtccccg

SEQ ID NO: 437 - DNA, 13066 bp, Heterodera glycines
agaaaatttttttggcctaagcgggacatttgagtctcgcccccataactcgttaggggttggttttatcgaaaaaacgcctagggcaaaattgtagagcttttaaaatgctatcgaatagtgtattatatggccggaaattttcaaaaattttcgagctaggccccctagaaattttcggatattttttttgggttgaaaaatagggtgaaaaattttttttctgggtatttttaaggtgctgagcacgaatctgatgttcattttcagtttaggaaattttagaattttttaaaaattcaaaaatatttggcaattttttgaccctctgaaatttgggcgaatattggaaaattcataacacagtgaaggattggtcaatttaagtgaacttaagctctaaaaatagagaaaaatccggagaattttatgttatttatttggattttctttcttcaaaaataaaaaagttattccagaaattctggaaaaattcggattttcagaaaaaaatttataactcgcttctgaaaaaatattcaggaaaagtaaaatgctacaaaaatccgcaatttttagctctattttataaattttatttcacatttttatcacttttttgaaaaatgttataaaaataaaactaagcccaacaaaatttaaaaacgggcgcgaagcgcccgtatgagcccaacaaaatttaaaacgggcgctaagcgcccaactgagtctcttcccccgtggttgccaacaaaattttattttgaaaacggccgtgaagcgcccgtctgaggccgcgaagcggccttaatagcccaacaaatttagaaacgggcgcgaagcgcccgtctgaggcctcgaagcggccttaatagcccaacaaatttctaaacggcgcgaagcgcccgtctgaggccgcgaagcggccttaattgcccaacatattttgaaacgggcgcgaagcgcccgactgaggccgcgaagcggcctaacaagctaaaaaacgggcgcgaagcgtccgtcttgagcctcgatgtggactaaaaacccctaataattttttaaaattcaataaaatctctccaaccaattcgatcaatttgaatcgcttcacagcctaggtagcgaagctcccaaagcgcgaagcgcttttaaaaatttcataaaattttgcatttaattgcttttaagtttttttttaaattacgcttacattagtggccaaattttttttatgatgacgtcccaacttttctgctgcttaattgaagtgcgcatctcaaaatgagtgtgcgattcaagtgcaatgtttaatgccgcgcaaaaaattgagcactgagcgatcaaggtaactgaacagggttattctttaatgaccataagcaaatacgaagcttgctgggcaattacggtggataattagacccgtctaattaagaaagggcggatgtgccttggtagctcatttgtcaatggtaaagctgcgagtggacgagtggcgttgatttccacccaccgaggcctaacattttaccatatttcttattgtgtaggtgtaattttataaactacggtagacctattaaaatgggatgctaattgttcgacatttaacacaaattgaggttgggcggcggaccctttccaattaattgagtaatttaattgaaattaaaatttgttatttgctcgctaaaacacgtaccgtatggtcatttcatggattttcttaatgcttttttgaaatgaaatgctgtccatcggcgccacttgcatttcattttcgtcaaacaaaactttttttttgcgcactttaagtacggcaccggtgccgtcctccgcgcgtcgaataaccgcatcatcaaatgtcaaatgggggacccttaagcaatatttcgattaattattcttaatttaaatatttatgcccattccctgacaatgtcatcgaaaagtgactgtccaccaacgcattgaaccgtttgctgagccgtgccatcagaaggccgagttcggcacggccgaagaattcaaaaacatcgaaccaaatgtcgttgcaaataaaactaaattttggcatacttttttaaatatccccaaaaaagcaattagaatgtatacgtttaatatatattattacattttagtcattttaaatattcaaaattcccatttgacggagcgtcagcttctgccggattttttaaaggatttctaaaacggtttacctcagttgagccggaatggttagtaaaatttccaaattttcatatttttcccaaatgaatttctggtccattttaaataatcaattgcattgaatgtcgctttctgatcaatcatttaaaaattgatcagtgataaacaaattcaatgataaagtgatcccattaaaacatttgtttgtcaaagttttgacccccggcactgattaagctttataattggtcaattagctcacctttgtctttgcgttaagctcaatgccttttcaatcactgatctgatactttcctttgtctgatcatcaaattttttccaattaatgcgcaaatcaaaaagcattaatttgtcttcgtcaatttgactatccatttaaatgcttttaaaaaattgaatattaaataaataaaactcaaagaaatcggatggacaacaaatcttctttttttattaaaataaatataaaaattattacttaaaaaaagaagtgacgccatacgcgcaacagaaaatgacttttgcccttctgttgttgggcaaaccttcgccgttttccccgacattttcccccgaggcgtttatccgactcaataaaaatgacataaaatggcgagtagtgattttggtactcaatgtatggcgctcagtcggccatatcgaaaagtgactgtccaccaacgcattgaaccgtttgctgagccgtgccatcagaaggccgagtttggcagggccgaagaactcaaaaacatcgaaccaaattttgttgcaaataaaactaaatataaatttctaaaaacgacacattctgtcggattctttaactgttagagggaaagggttgcgaaataatatccaaattttcatatttttcaaatgaattttatgtgtgcatttgagatttggataggatcaaatgttctcccattttcaattacaattgctggattatcctagtgaatcactaattgctttgaatttcattttctgatcaatcatttaaaattgatcggcgataaacaaatccagtgataaagtgattccattaaaacatttgcttatcaaagttttgaccccccggcggtgattaatgctttacaaattggtcaatgatctcacctttgtctttgtgtcaagctcaatgtcttttcaatcactgatctgatactttcctttagggttgcaaccctgaccccgccccgaccccgaaccccgacgaaagtggaagggaacggtggaccagcgaagggagaagaaagggaagaaaaaaaatcatgcggcagtctgatttgttcatgtaagtttctttaattttcaatgaatacaaaatgaatcgaaatcctttttcaccaaattaattttgtaaaaataaataaataaaattattataccgtattcccatatcccctaatagagcagctcctatgccaatgccctcccccccctcctccttaatctgtgcttctttttcataggattgctaaaagtatatttatttcttggattatcctttatgacgggttcgggctaaaaaaaaacctgaatatttggtacaattttgggcaaaaacaataaaaatattaccatatcgccatttccatcagtcgttttatcaactatttttattgccaaaaaaaaatttgggtctttaacttacgataaaaaaatttttgatccaaaaccctggatttgaagccttttatctacatgttaagcaattgatggcacattgtcctgtacccgtgccatcaatgtggacgtgatcgcctgctatgaacaacggcgccggcaacataatcgaccagcacaggcacaacaaccgacaacaactgtgccatcgattgctactgttccatggcaagggacaacgcggctggtaatttcgacactgggtaaattcgacactgagtaaattcgacactaagtattttcgacactaagtaatttcgacactacattttccgacactgaattatttctaaaactttcactgttttcctgcattttcgacactggaccatttcgacattgagtaatttcgacactatagagaatttttaaaaaatagaataatcaaaatttaaaaaaatgtaattcggtctttaatataatttttctctgttccattttcaaagtcctattatttaaaagtgaaggtgatatgaaattgcgcgaagataagcaagtggctcgcgttcgttgaactgttcgacaattgctcttatgttgttatcttgtcgaacatattttgcttttcgattttgatttggcccccttattccatccgccggcgcaacaatgtagtcagccactctgtctgcccacatattgtcctcatcacacatttttcgcgaaaatgcactcaatctttgaatgcctcgcaaatgtacattccatatgcaatgccaagcctccaaactgttattcgttctacacaagccgtgctcaactctttcaaccatattccataagggaataggaaaaagtgcaccccgatttcctgaatatttaaaccggcgctagttacaaagagtacctttttgaattctttacttttttggtctctatttaaatgatcattttgttctgatactaacataaaagcaaattttgaaaaattagagttttcgaattttgttcgaatttggtttcggggttcggaacaggcccaaataattgtaattcgtgatcagcgactacgaaaatcctttgacacttggttcaggacttttacaccgaaaaataatttgcaaatttaggcaaaaaagtaaaaaaaattcaaaaaggtactctttgtaagcgccattaaaccttttttgttgcacaataattagtaccaaaaatttatttggttttttaaatggttggttttcccattttgtgggttttgaatttttgtaatacagtaccccatcaatttttgtgtaatttacaacttaatacccaaattcaacgcttcaatacgccaacgtatccaggcatccgctcggccacccatattttgtccatctggatcaataatcggctgttcatcttcgacaatgtggcgaggaccaatccaagtgttcacaaaataaatgacaagttctttaattaaattttttgagactatgtgtaaaagcaagtatttaatcccaaccccaatttttgtaattatttttattattttggataccctgtaattcagcagttggttcaatggttgaaaaaagggcgcaaaaataattgtaaacataattttctggcacaaatgccaaagccttgattcaaatttaaaaaatattaatttattttatgagcggtaatttatacttgcaatgatcggatagacgtttgtaaatccctgttctgcaaatattgtgtgtgcaaattaggaaggcgttggacacgacggtataacgcttggccaaagtggaaaaggcatccagttctgaccgaatttggaaaaacaatgccagcagcattcatggcagccaactcaaaatcactcatgatgcgggtggggaaccaattgtttccaattcggttccggattgtttcaaaaaagctggtgtatgatcctaactccttattcggcatcaacccatagaccaccggaactgctgagtgatcaatgatgacgctcattgtgtacaattgagcaaatccccttggcgctgtctttaaaaataattaacacaaaatatactcataaaacattcaccaaaacacaattccccgccttaaatcatatcacattttaatctcttaagctcacatcaaaagtgccgtcaattgcaacttcagcattgaactgcctaagcgaatcaaggccaaaggcagacgcaaacacaatcattctgttattttcaatgggctggtttaaaataacacgattttgcaatgcagccgggatgacaatttgggcagtgggctgtgcatcgagaccaacatctcctgcctaaatcgactaagaaaagattttgtgattcaaaaacttcttcttggtgttttttcttggcgttgttgtagtttctgcgcatgttgctgggactcggtgcgtttattcggacatcgacttgcatttctgatcgaacatcacgtacaatgttacggctagtcgtaggaaagtcgctgcgcgcttcttcacgaactcgttcattcgcctcccttatctgatcagcagggatgggctatttaggcaatcccaaaaactttttggcttatacgctgaagacaaacactttgttagttttgggtcttttcgcttttaaatatcatttagtgtattgtttgacatagaaattccatcccggctaactataggataatttcgattacaaattaaatatttaatacattgtgttggccaaaaataggtggatgattatggggtgctgtcactcgccccattttgaagcggttgccgtcgggatcaatttgccaagcactttggactgttgctcttcctgggcaatatggaggacgccttgggcatctccaatactcaaagccctccgcgattcgcgcatctcgttcaaagcagtaatcaaagttgtgacatgaaatcaaacttcttccacgatttgttttagtctcattaaaacggaaaagggccattttctcgggaaaaatgcaaatgaccaatacatttcatcatttccaactacacaagataacccccatactcaaaaaagataacgagaagaacggtcaaatgcaaatatattaatgattctcgtttatcaaattttatgggaaaaacattaatttccgttatcaacatttagaatagttctccgaatgcaaatcctttggctttcgtttattcacttagaatgagtttgaatttatttaaataataggactttgaaaatggaacagagaaaaattatattaaagaccgaattgcatttttttaaattttgattattctattttttaataattctctatagtgtcgaaattactcaatgtcgaaatggtccagtgtcgaaaatgcaggaaaacagtgaaagttttagaaataattcagtgtcgaaattacttagtgacgaaaatgtagtgtcgaaattacttagtgtcgaaaatactcagtgtcgaatttacccagtgtcgaaattacatagcgccgtctgatttgttcatgtaagtttctttaattttcaatgaatacaaaatgaatcgaaatcctttttcaccaaattaattttgtaaaaataaataaataaaattattataccgtattcccatatcccctaatagagcagctcctatgccaatgccctcccccccctcctccttaatctgtgcttctttttcataggattgctaaaagtatatttatttcttggattatcctttatgacgggttcgggctaaaaaaaaacctgaatatttggtacaattttgggcaaaaacaataaaaatattaccatatcgccatttccatcagtcgttttatcaactatttttattgccaaaaaaaaatttgggtctttaacttacgataaaaaaatttttgatccaaaaccccggatttgaagccttttatctacatgttaagcaattgatggcacattgtcctgtacccgtgccatcaatgtggacgtgatcgcctgctatgaacaacggcgccggcaacataatcgaccagcacaggcacaacaaccgacaacaactgtgccatcgattgctactgttccatggcaagggacaacaaccgcagccgccaaaagccattttgacggcgccaaatttgaaacggaaacaaataccgtaacagaaacagcggcggttgaaaatgacgataaaagggcatttgcagtagaaaaagaaatgaaaatgtttatggaaagcacaacgcgccaaaccgtttgaataaatacatatatttattttgattcattgtcgatttatatatgatttgaaattatatgcaaaaaaaaaacactcgcacgatgaaaattcgtcactgatatggttttttatgattagattaatgctgtaattatcaagcattatgtattaataccatagctatataaaatttgacggttggaataccgtatttggtttttttaaacatactgtatcactgacgctttttattttaggtaaaccagacggttggaataccgtatttggtttttttaaacatactgtatcactgacgctttttattttaggtataccagacggttggaataccgtatttggtttttttaaacatactgtatcactgacgctttttattttaggtataccagacggttggaataccgtatttgttttttttaaacatactgtatcactgacgctttttattttaggtataccagacggttggaataccgtatttggtttttttaaacatactgtatcactgacgctttttattttaggtataccagacggttggaataccgtatttggttttttttaaacatactgtatcactgacgctttttattttaggtataccagacggttggaataccgtatttggtttttttaaacatactgcatcactgacgctttttattttaggtataccagacggttggaataccgtatttggtttttttaaacatactgtatcactgacgctttttattttaggtataccagacggttggaataccgtatttggtttttttaaacatactgtatcactgacgctttttattttaggtataccagacggttggaataccgtatttggttttttttaaacatactgtatcactgacgctttttattttaggtataccagacggttggaataccgtatttggtttttttaaacatactgtatcactgacaacgggaggatgaagagaacagagcaatggcgtacttcggagatgccatgccgaggacacagctcaagcaaatgggcataaaatgcaccgcacgaatcggcgccctaaaaaggcacaaaagcgcgcatcacaatacggacatttcgtatcacttctcccgaatatcgcttcaaagtcggaaatttcagtgccacgaatttttcccaggccttgaaaagttgccaatagaaacggagccaatggccaaagaccttcgtccgaagcataacttccgctgctctgatcagttcgttgtctgaaatggcgccgcccctctcagagtgctcgaaggcattggccacaaataggcgttcctcgaagtgctaattagcatttgaagcggaagccatacataaaaaaggggtcaccccaaagaattcgttcgttttgagggaaaaagacattcgctttcttttgtttaaagggttgcaagttcgaacccaacaattggcaactgaccgacaaatgcataaactcggccgccactttgccacaataaattcccctcaggcgctcaatcagtgcccccggcgtcgctttcgccccctcccccaacggctcttccaattccttctcctcccaaccgtacaaatcgggctccaactcggggaccctaaacaattgcgcctatggaaaaagtggcgagtgaatgggcgagtgacccgacaggcacagaaagaccgagggggtccaaatcggcacgcaaaaagccaaaacgacggaaggcattgaccaaagcgttgatactctttttgtcaactcggccccgtatcaaaactaagcgaaataaaatgaaaaaagggagggatcgctttttgatacccttctcagcgtcagcgtcgagtcgagaagggagtgaattatgaccacctccgaaaacatttttgtcaaccctgtaatgcctacgttgaattggcatctttttgttgggattggcccattttaaaagcaatggagaaaagccgacgaaaaaagacatccgaagaagtggcaataaacggcagaaattttggataaatattaaaaggcggcaagcagttcaaatttaaaagggattatcgaaataaaccgaatacataaaaattagctcataatcaataaaataataatttttaaaatgtgaaagaataataattgttaaaatgtgagaagtaaattagggttaagtgtgaggtgaaaggggggggggggcgtggcatagaaatttggaaattctcagtgtgtgtaagtgatgttgaagcggtacattccgttctttcccgggggtttatttgtacagaatcatcaattggtcgccaccgtttcactttggcttcttctctccctcgccaattgagtacggctccgcctctccgtccgtctgttgctgtcgaattgcgcgtgcgttttccatggccgctttttcgagcagttcccaccgtctgcggttgttctgctgcttcagttgctcctgctccttctgtttgttgaagttctgtacgcacaggtcgaacaacttctgattctcttccatgaaaagtttcaatgccttaaaaatcggtaaaatggcaaaatgagtgaccggacagaacagaacagacattgtaaatcaatccgtggatcgtcctaaaaggaatatttttatcgaatatacttgaggaccgaagcagttaaccaaatccccccgcgttgttctccacctcgaaaaatttatataaaagaaaactttctttgaaacccgaaaaatgatagattttcaataatttaagttgcaccccatgagcagtgattgattacttgctccaatgattcctggaatttttatacagcgatgggaacataattggcaaaatggtctcgacattttcactgaatatgaaaataggcactatctaaggttaaaagaccggtggaaaaagaccttatcagggcgagaatgcactcgttgttccagaaataaagcgtcctttccgcaaccttaacaaaaaagaggaatttaaaaaggggaaaaggggggggggggagaaagacgtggaaatgcggtgaagaaacgcaacgggaaagttggtaaaagagagggaccatgacatttttgaactaaaatagaactgaacaattaagcagaagcaaccaaatacaaaacacctcgatcgggtcgatgacatccaaaatctcttcgagttcagtaatgaacatcacctttaaaagcccaaaatattaaggtcgaaaaggatggggtggtgaacttctttggggctgtgcactttgggccaatatttgagtagggccaaaacgacgggcactgtcagagcggagtctttgtcgatgaattggacaatgcaatacgccaattgggggtggtacgcgctcataaactttgtctggcaaatgactcaaacggttaaagcaatgcaaaatcttttctataccttatgcaatggaagaagcacacgcattaaaaaccttaaaatcatcgtaaaaggtaaccccaaaaagaaattcctctcacgttttatgttcctcttttagcggaatcacaaaaccttaaattgtttttgggaattgctaatgccaaacaaaaaaatgaccattaatgatgcttcccagaacttcaagcagttcagcgattccgttatgcctttccgtttcataaattgatgtatagaaaatgttgttgatttgtttgcgaatgaatgaccgacggtttacaaactttccataaattcgatggcaaatcgttttcagaaactccttaagtaatttcgtttccatttgaattaattatcattattgtataactgactctttccctctgatcttcgctgtcaaagagattcaacaacttaaagaaaagcttttaaaaaagtaaatttgcaataaaacaaataattggacaaatggcaattaatcaacattattttacattgactatgaatttgtggtcgacaaatttttctgcaatgcgacagtcaaaatcagcggattcgacaaaacgcagaaggaaatcgtagacgagttgcaaatgaggccaagagggttcgagaacggggtcatcctggaaaagggggggggggggtaaagaaaagcaatggcaaaacgaaagcagcacttcttcagggtcgaactcagtgccggagtgatgcgaaggcgaaaacacacggaaggcattggccgagaactaaagggagagagagaaggtaagaaataacataacagaaagagagggagaggagacgggagagagaaagggggcagagaaagagagggaagaggggggaggaggggaacagagtaaaggaaatgagtaagcaaaagaaagcaaaagatacagaccatttcgaagactgtccgataaacatcgaaactgaatttgtcctttctgatagccaagaaatcgatgcattcattcagtgacactcttttttcctcaataaaatatgttgtatgtgagacaattggaatttgtaaatgcataaatcttaaaatttaagttttccataacagcccacaaaacccacttctttcaaccgcaattccgacaaagggtcattggcaaaatcaaaaaccacggcacactgttttagcttctcgacgagcagaagttgtgctccccgttcgtccttaacctctaaaatggctgtcttatagaagcaaaaatggggacggaccgtcgaaatttgccaaattcggcccgccttctatcgaatgaatttccttctcctggggagattcgtccgtcctttccttcgccgatttaaaaggctgacaaagtgtacctgaagaaaaaggaacggttccaccatttgcggttatttttccaaactgaaacagacttgacacggggaccccctcatctgcagaaacacagccacagccaaagtccttcccgacattttcatcgtttaattccatcggaacaaatgttatttaatagacacgtattatttggtttaaagtaaagaattcgaaatagttatctttttgcaatttggagagaataaagaaaattattttatttataattt

SEQ ID NO: 438 - DNA, 1878 bp, Heterodera glycines
  unsure (1)..(1878): unsure at all n locations
ctcgactcactcaaatactcttcgtacgaataaaagagcaaaggcggtatcgatgaaaagagttcgactctttttgtgtagcgaaggccttcccccgggggcacagccattctttgtgagattataagatccaaattcatgctgcacattgcctgacacatcagagtctctgcccttaaaaaaatgaaattttgagacgaaaagcgtggagattggctgtcggatttcaacctgtgatgaagcgaccgcgctttgatgagcgaaagcgtcttgcgaaactcattgtccattttggtcttttgcagctgccttttacccgacaccttttttagctggtgaagtgaaccttaattttgattatgactaaattttatgcactgatttcgagcaattacttttgctaaagtcaattatcaaagaattgcacttttgctcgcacatattgctcaaatttttcaatacgaattccccgaaatacctaaacaaataagggcacttttatagaataggagccgacaaatatattttggaaatcaaaagggtccctttttttgttttgtcgactcctactctctaaaagtgctaaaaaaaaaacggaaaaaggccaaatattcatcaaaaacaaacaaaccaataaatgtaatggaactcataaggctggaccaaacgcatttgaaatgccatgctaaagtaatggtgcatcagagccaaaattgtttgcaaaaagaaattggagaacaaatgttgcatattaggaatttggcagtccgaattgtccacgtccaaattaattcgtgctgtttccaatacagcctcgattttgctggccttaaaatggcgacattcaatgaagtccatttgtgagatgtatcaaaaaataaacgacctcaatgattagtgcaccaaactcatcaaaaattacacgcaaaaatttgtccatttgtcttgacaaattgtgaccaaaggtctgaaaaaggttcacataagcgcgcacaacgacgacgagaaaatcattgaaaatgtcccgtaatgactcatcggaagcaaacaaaagtctaaattttccgcataattttcaaaagcaatagatgactcatactttaaaggttgatctaccgtcccgttaatccaatttgcggagctaattgagttgaggacgacgccctcaagcggagttgagccgcagatgaaatggtcattcggcattatctattcatgaattgggcttttcttattaatcgaaatatggcagaaaatcaataaaacgcacgagaagttgagtgagtgaacggatgagaacgcatgagtcatcctcaccaatttgttgaagaagctccttaaaatacatccatcagtattttatattccgctatttcttacaattattccctcgacggtaagtgacatttccggcaaattggaaacaacagacaaaattttttccaacagattattaaagtattcgcacgcgccaactctcggaagaagccttgatttacgagggaaactgggaagtccaaaatataaagacgaattggcatcaaagacgggaagccaagaaaaatcggagtcaaatccatcggaaggctgcgaaccaacacatattgtgttcgaaatcattttgttaagttgaatgcattttggtagtagcaagttggaccttaattataagcgaaggcattgtcctgccatgccaacccatccattttggttcagataatggcatccctttttcattttcaccgtttcaaatcgggcacaaatcttgtttcaatgtcattggaattcgagagaagcgattncatagatggaaaaagagcatccaaaagntcaagaagtgccgacaaatattcaaaacgatacgcaacgcatccaact

SEQ ID NO: 439 - DNA, 4044 bp, Heterodera glycines
agaaaaaatttagtcgaatttgcaaaatctagcatgttttaaaaattcattaataaaagttttaattttgttcttcgttttaaagcagccaaaaaccaaaaaattagattcttcataacttcgctaaaaagctaccaaattttataatcttgaaatcattcgatagccctatgggttttatattatcctgcaaaatttcaaaaaaattcgttaacttttaagaaaattatgagcttaaaactaaaaaaaacctaagttttttgaacatttttggtcataactttctcgaaacttgacaaaattttttgaaattttgcagcataataaaaaaacgcttagggctatcgaatgttatcaaattttaaaatttagttgtttttgagcaaagttatgtcaaaaaatattttcattagatggtttttgactaatggactggcgaagcgaaacttggcttggcactcgacgtcgaagctcaacacgaagtcgcccaatttactcgaagtttcaagcaggaagaccaaaagttttttcgaaaatttttatcccaataataatagtcatcactagggatgggatttttgcttaatatttggctgaaagttatgtcactatttgtcactttttcgcacttttggtcactattttggcattctttttatcactattttaattaactatttcgagattttcgtcactaaaagtcgtgaccctagtcataacattagacaagatgaaagcagggggggggggaatagctgaccttggcaaattattccaattcgactttcgcttaaatccaattttagttgccaattcccaaaattcagcgctgaatatcgtcgttgcttccaaaaagtctttccttggctcgccaaacaccaaaatgccgcttctaacgtggtgttcgttggcacttcgtcatcgtatttggccgtggtgagccgaagcgacaaaaatatgggtgtttgtaataattaaatttaattattattttaattttaattgctaaataatatatcataacttagcttaaactcagtcaaataatgaaatttagtactaagcgacagctccaagtatcctctactaattatgtaatttttataaacttagcaaaaatctataaaaaagttgtaaccaaaaaagatcgaaaaatttatgctcaacaattttgaccctaacttttttgcaattcgataaatttttttgaaatttaacttaataatagagaaatctttgggctatcttttcatatcaatcaagtgcggtgtgaattattgtaattgatgttggaacaattttcatgcaatttaaacgaccttacattttttgggatgaccataaaaatatgagactattaattcctttttacttttttctgaatcaaccaatttaaatgttgtttatataattagatagcccaaagatttctctattattcagttaaattccaaaaaattttattgaatttcaacaaagttagggacaaaattgttgagtcgaggaagccaacaaggacaagcaaaacaacggcgcacgttgccaattgtcagccggacattgtgactcaaaaatcagcagagagacggacaaacgagtcataccatacatctcgaaataattcgaatttcaaccatgtttttgtagtttgacccggggagtgccatagtttttgatctatttttaactaaaaaatactgaaacagcttaaaatttaaatggaataacaaattatcctgcaattcgtgcttttcaatttctttaaaattttaaaaccagctttttataactttgccaaaaacctgagaaaataatgacaaattcgttaaaaaagattgaaatatattacaacattggttgttaatttcgaaatgcttacctcctttattttattgattatttaaaaagaatgctaatatccgaatataaaaatgccaactttttaacctaaaaatatccaagtaaactccacatttccttaaatccattcattgctttgcgttaaactttatgatttacagcatggagaatccaggaaaacaaaatgtatttgcataaaattgtaaaaataatataattatagaaatatatttaggcaaagccattgacttaattttaatttaatatgcaataatttttcatttccgtattcagttatttaaaaaaagcattaaaattatttaatttttattatatatttaatcaataaattgattgcttaatgtttataaaaattttctatatatttccgaagaaaataatttttataattacaatttttattagtttttattttattataacaaattagtgatgatgacaacaaaacaatttctgttaatttatatattaatttttgtgttaacaaaacccggttttatgaaaatcatttatggtaaggctaagggggtcgggggcgttttcttacgaacacaattttttagtataactttttttctttgccaaccaaatccaacattcttggtatcattcaatagcaccaagtgtcctctataagcctgcaaaatttcgaaaaatttcgttcaggttcaataaagttacggcaaaaatttttcaaaaacctggttttgtgaattttcgggccataactttttttgaaacttacctaaatttttagaaattttgcaggctaatagaagacacttatggctttcgaatgataacaagattgttggttttggttggcaaagaaaataagttatatctaaaaacttgtgcttgtacgaaaacagcctgctcctaaggggaatgctaaacaattaattggtgaatttttcaattttttttttcaaatttttttgtctaaaaaaatagaaattttataatgattttttaaaaaagaattgcattataaattttagcaaattataccaaaacagatgcagtcatatttagatgtaagccttttgacgaaaagtttcagtcctataaaagatttattaattaattatgtgctaattaatcattagtgaatgtccccttaggcatcgacactttgcaaatggacacacattacgcggacattctgttcaacgaccatttgtcattgtccgatcggtccaatttggcctatcgaataggtggcgcaattgtacatttgaatgttgaacgaagtctcgacttaatgggaaatatgtgccataaaacgggcctgaaaattcaaaacgcttcgcttttaattgtgggattaatgagggaacaatttggccaaatgatcgaagattttggcaaggagcagctgcagaaagacattttctcgcttccacttgtgccttttgtggaaaatggagctgagtttggacaacatgaaaaaattgctgatgagcaaagcaaagctggacaaactgctggaccctgaacatttgtatgatgagccgattaattagttaaatttgcagaaataatgacgagttttttcgggtgggagtggttctgtttggtgcattagtcatagagttttgtacatttttgtaaggaatgagccagcggacggttaaaagtagggttgctccccgacccagagctccccggtccccgaccccgatccccgacatttttgggcctattccccgccccgacccccgacatgtcgccccccgccgaggtccccggcccccgacattttaccccccgaggggtcggggagcaaccctagtttataagaagaatcaggaagctaacatacgttttttggctgcccttttcaattattttcccaacttatacaccattgatagagagagcttcaatagctctacaattttactcagaggtgatctttcgctttttctattgataaaaatggtttattgttttttttttgggaaaagatttaaaaaattcaaaaaaaccgaaactgaaacggataccgaaaattttgcttcggtttttttcggtttcggttttttaaccgaaaccgaccgatcgacaaatttttgagtttttcggtttttttcggtttcggtttttttcggtttttataccgaaaccgaccgaccgaccctcttgtccgggctctaatat

SEQ ID NO: 440 - DNA, 4771 bp, Heterodera glycines
aaatcaaaaaaatcaaaattaaatctccggaagatgccttttaaaaggtacaacaaataaccgcgaaataggcacaaaaataggataggaacctagatatcggtagaaaaagcctgaaagaggttaaaatatattcataattgcatgattttgtctctgcaataaaaattctttttcttttgtccaattaacatattatttcactaattcaaaattaacttgataaaaattagctgttaaggatgtaaaaatttggagaattttttctcactgcttaattgccccatttccattttgaacccaaaggccgatttttgggattttgagccaattggcaacgaccatttttttattttccaaccgctttttcggctctttcttccaaaaaaaacttttggaggacagtgagggtcagacggcgccgataggcgctgttgggaaaattttgtagtttttaatgcaatttgttcacagattttattcaaaaaatgaccaaattttagggtttttagccaattttttaataccaaaatgtttaatttggtcgactttaacaaaaggtaagaccatattttgtcgaaaaacagtacgagttgggtttcgtccgaaaaatatgtatttacataaaaatgggcaattttttgtcaaatttttaaaagtttagtggagttttggggccccaggaaaaatatttggaatttttaagaaaattagctaataacatcattattatttttaatttacatatttttatttgctaattgtaaggttttacgaagaaaattgaattttttcgaaaaattatcgtggctttaatcccgcgggatcccgcgggattggtaaaatggtcgggagggatcccggttcgggatcccgatgaaatcccgatcccgatcaatcccgatgaatttaaaaaatcgctcgggacggatcccgaggtcgggatcccgaatttaatcccgcgggatcccgaagaaatcccgcgggatcccgatcacgtccggtctctaatataggtagaaaaagcctgaaagaggttaaaatatattcataattgcatgattttgtctctgcaataaaaattctttttcttttgtccaattaacatattatttcactaattcaaaattaacttgataaaaattagctgttaaggatgtaaaaatttggagaattttttctcactgcttaattgccccatttccattttgaacccaaaaattgtttcaaatttattaatttaatttaagttggtttatttaatataatttcatttacatttaatttaatttattaagggactcaatcaactgcgatgagctggaaaatgtgctgtcacaagcacaacggaaaggcaacaaaattgaattgccatcatgggccaaagattttggcaattatttttcggatttacatttttacgggttgcatttgtccctaaatgcggaggggaccgaaaaagggttcaaaatgtccgattggctgggccaaaacaaattggacggcgaaacgacaattgcgcattcattacggacaatgcatttgcgcggagaaatgggccgcattaaggagataaagcggcgaatggtgcgccatttgattagccattttcaattggagcggttggagatgattcacccgatcagaatggcagcaggtcagcaaaagggttgcatttgatggcattttggtgccattgagaccgaactctaattggaaagacggcaaagtgttgagagtctcgaccctggggaaaaggcattttcaatgtgtaagcgtctagaccttgacgacataaatgccctttgacttggaaaatgttgatccgcagactgggccaaaaaaaaatttgaataaatgaaaaaaaattggctaaatttaaatgcgccaaagataattataaatttgttctaagaccataaatcagtttttcgtaatgttttaagtttttcaacaaaactctgtaagaatatagtaaatttctttgcctactgatcgattaacgcttaaatttcacattaatattatctatcgtatctcatgcatactgtatcacagacgcatttcagctgtcgcattttccggtcgcattccctcggctcttcccaacgagtccacaaatatatagtttttcgaatcaaaaaacatggccaatttgcggcatttttccaggtcatgttgatgaacaaacaatgagcacatattatgagatgatgttctgccaaaacattcgtctgacagaagagttgttggaatatgccattctgtgcagccaaatttttgcctatttcctccaccaaaagggtgccaaaacggaagagaatgatgccaattggtggcaaaagtttgtacattcgacccgacaaatcattttgttcactaatgacgccggtgccacggagaaactggcaaaaaaagaggacgttttgggcactttgcacgagctttggcacaacataaaagacggagacaattttgacgagaaagcattgcgaaagggcagcaaaatgggacgggaattggtggaaaatttggcaaaatgtttggtggaaatttatgccgggaacgaagagtttaggaaatgttttggagagcaaagagaacggagaagaaagctggaacaaatgcttagaatagccgaaaaggaattgggcggaagaagtgccgtgccggaacaattttggcacatttttgagggtaaagtcaaacataaatttataaattatattgttattattaaggctgggaatttaagtcacgaaaaatatccaaaagtcgaccaaaaaagtcataaaaaatgcaaaaaacttataaaaatcccaaaaagtataaaaagcaaaaaaagtcacaaaaatgcatgttaaaagcttcaaacaaagtgtagaacactgtttaagtcattttaaggttatattcaatgatggggttctaaccgagtaaatacggtattttaattttaaaaattagacagtgaagcagagaaaacgacggagccgacgaaagagcaaaagcagcagctgcaacaggggggaacctttgctgatgattcctcaatgattctgttgaaaattaatgacatttgtcccaacaaaaaaattcccctgaaagaaatagaaactgaacatttgaacaaagaaggtgggcaaaacaatgctcggcttaaacagggttagccgaataccaggctaaactggtgctgggacgttagtcaaaaaccatcaaaatgggtgaaaaaaccatcaaatgaaaaattttgacagaaaatcattcataacttcgcctaaaattaaccaaattttagaatcttcatatcattcgatagccctaagtgttatctattatcttgcaaaatttcaataaaattcattaagttttaaaaaagttatgtcaatttggttgcttttaaaaaattgtttcatttgatggttttttgactaacgtcatagcaccgctaaaacccattttgtgactcagttggaggcttttgccaaaatacgccgagtccggcaaaccccgctttaaaatgccgacccaaacaattaaatttggacaattaaaaattgaaatcatttagagcttttttcctacactctgatgaagcagtatgttgagctgctgctggccgatcgccaatcggtggacaaagagttggaaacgatcgaaagcaaagcgatcattttttattatcgagaacgcgttagggcgctgttcagaaaggcaatcattgcgcaaccaaagatggaaaatgaacaatttatggccgtaattaacaattatttgacccaatgggagtcattaatggacgaatggcaacaaaatgccaaagggacagcaaatgggtggccccaattagtgtgcaaatgttaccaattcacttacaaattggtgacggacaaacagctgaaggaactgaacgcggaatggcacaaattggtgggaatgaatgtgaaggaatggaacggcacaatgctaacagaactgatcagcgagaatatgatgagctggtttggggtcggttgtttgctcatatgtagtgatcgagttttgttcatgggcttccaatttgttattaagcgatgacaagtttttattttaaaatttttcaaaattttaagtccccaaaaatttgaaagtttcgtggtgagccgaaatgacaaaagtatcaataatcggaatatttaagtttaataattattttaattttatttgctaaaaaatcataacttagcttaaacttagtctaattaattaaactttgtattaaaaggtagctcactacatttcctctactatattataattatttttaaatatttaaacaaccttacattttttatgagcataaaaatatgactcatttaattccttagtaacatttttcaggaaacaaccaattttaatttactttataagatagcccaatgatttctttattaattattttgtcaaatttcacaaaattttattgggttttaaaaaaagttagggtcaaaattgttcagtctaaatttttcggaagtaattaaatttaattattccggtcattgatacttttgtcacttcgtcctagcaccgctctttggtgtttttgacaaaaactcgaaagccgggctttgaagctattctttttgtttttgaatagcccaaaagatgcccctcagaaaccgtacttaaattgtactactgtatttgaaaaaagtacaaaatgccatgccaagattaatattgcttatcatgtacacagaaaagcattctgttgtcggaccaatgg

SEQ ID NO: 441 - DNA, 1050 bp, Heterodera glycines
cgatttacatggcttgatataattctaagctaaaatgaagactataacattttttcgaatttttaatcaaaatttcaaaactttttgaaaaaagtcccggtcccggcccaaaaactgggaccgggaccgggagtcccggaaaaacgggagtcccgggatcccgtcccggtcgatttgccaagtcccggtcccggtcatttcaaaattccgggctctagtaaatatccccataaaggagcttaaatggaacaaaaaaaatggtaaaataggggtggaaaacggtaaaataaggacgaaaaacggtaaaagagggacgaaacacggcaaattaggggtgcaaatttaaaatccgtccgttcatttctatgaaaacaaatcaattaatgagatatttgcaaaaaatttaatttcctctttttcagtgcaaaaaataataatcttagttgaattaataatttcataaaactaaatttacttaggagtgtttttaagtttttattaagaaatttttcaaaccaaaatagggcgccctatttaggggggaaagtcaaatataatttaaaggatgaatagaattagaaatatgtttttcaatgcatttctcatagaatttgatttgtaattgttttttcagatttgttgaccaatacgcaactgatcagtatgctaatgaatcagtttaactaccaaagtggcacagaagaagcgcaatttattgaggcgagaaatgtggcaccactgttgatcggtgaaatattggaccatgaggacaaattgatcaaaaatatgcttaaaccattgaaaaatttgccggaaattcgcgaaattttgttgcacaaaattaaggccacaaaacgggcatttctctccaaattgggcacggcaacgtacaataaaagcgtactgcgcgaagcaatttgtccaccactgtttttgtacctgaggctgaaaagcattgccatgggaatcagcaaaattaagcgggggaccgaactgagccaatggcagccgaacagcgaatgcgagacggtagagggcatccaaaggtac

SEQ ID NO: 442 - DNA, 3745 bp, Heterodera glycines
  unsure (1)..(3745): unsure at all n locations
gtgccgcgaaaaaagcggtgttgaaagcaaaaaaggtcattgatttacattaatttacatggccggagaccccttcgcaaaattggaaaattggccgctgatcccttgttttgcaataatctgaattttgaggtctacatctgaattttagtgttctttatcctgaatttgaaaaaaaaaacttggtcaccctcaatatacatatacttctgaacaattctaatgctaaaaaacaggcactcgcgcgaaaactgaataaaaattttgtatttgaaaaattttgtccaaaaatttttacgttggaaaattaccggtttttaccggtaccggtaccggtaccggtggaaaaagttggtaccggtaccggtaccggtttttgcattaccggtcagtaccggtaccggtttttttacaattaccgattaccgctcaactctaatttttactaattttttaaaaattacataattagtagaggatacttggagctgttgcttagtactaaatttcattatttgactaagtttaagctaagttatgatatattatttagcaattaaaattaaaataataattaaatttaattattacgaacattgacacttttgtcacttcgtcctagcctagcatcaccgtatctcgggggtcaagcctttgacagaatttccgggaatttaagctctctggcagtacacttccatcaaaggatttgaaaattgatgaaattaattggaataacaaattcttttacagcgatttcaaaaatcttttccccctccccttaaggtcatttgatgaaactcgactgctgttcaaattcagaatctgtcaattttttgtcactaatccaaacgattttcgaatatttcttcaaaatttagcagaaaatccaggggcaaaaaccaaattcctaaaactgataaatgccgacgcggtaaccaaacttttgccggactcgcacggcaatccgctggtcgaagcgctatgggcggccgatgagagggcgatggacgaaggtgtgaagcaatgctttataataatttaattagctactaattaatgaaaaatgctttggacgaaatttgcctgctgaccgacgaccgcccgtttaatttatgaaaattatataaattatttttagtgttttatggcaatcttcagttgggccaccttttcctcacatttttgacaacttatgattccgtgcaatggctgtactataaaataaaagtatttttttgtagataatcagagctaactgattgtgagaaccggtagtcaaaaaaccaccaaatgaaaaatttttgacagaaaattattcataactttgcccaaaatgaaccaaattttaagctcttggtatcattcgatagccctaaaacttgtatgaaaataagtacaatttctgccataacttattttaaatttgatagttttatttgaaattttgcaagctaatagagaaaaagcttggctattgaatggtgccaagaatgtaaaatatgtttgcttttaagcaaaattatgccatgttttgtctaaaaaatcgctaaaatggcggattttacgaaacgacccagcaccgtttttgactaacgtcatagcaccttcgaaaccatcaaattatttatttttagttggatttgttcatttttgtccgatggatcgactcccaagtgaccgcccttctcattttgggcaattcgttttcggcacaacggtgcgccaaattttgggttcgatgcaaagttttgattctccaactgtacgaccgctactttgatgagcaaatggaggaaatgccaagcttacaaatattccaataccattttttgagtcatttgaatttgtattttgaaaaaattttggacagaaaaattggggcgaaaaaaagtgaaaaagcgatgaacgacgaactgagaaaaatcgtgcaaaacagccaaaaagtgtatgaggaggacaaattgatggacagttttgtgtcggaggagagggagcagtacgaacgttttgagatggtattgacggaattgcgcatcaaaacagtgaacgaattggcgaatcgaaacgaagtcttcaaagaggcattgggacattgtgagagagacagagagaaaaagagaaacttaaaataattacctaattaaattatcaataaacaaacttaatgtataattaattagggaagggattccgggatttatgtctaaaaaccccggaataagtaccgaaatttggtaaaaaccctcaaaatatgtgactaactcggacataaaagtgaaaaaatttgtttaatacgggccatttttctccaaaatggttaaattgagcttaaaaattattctattccattcaattacacaaaaaattgagtttttgtggttttgtcagaaaaaaaagttaaaattttctaccacgacaaaatttttcatttttcttaataaaatcttgtccatatgccaaaaatgtacgaactcccgaatttttggcttatgtgccaaaacttcaaaacacttatgtgaatttatgtgttaaaagaaaagtcgttaaagttcaaaaactgtttagagaaaatatattttttgggttcccctgcgataaaaattagagaaaaagataaatttgattttttaaatattttaattattaactctcacaatctctcacattgaatttctcgaaaatgactttttcgcaaacaatgtgttcatttgaatctataatttttttaaaatccttcaaaaaattgctcacaattaaaacggtttaaaatttattttaatttgtttttaaatttgtgatttttttttgcgaattggtaaaacaattattatttatattttaaacatttttatttataaaattttagtcttatcaaaaatgaaagaattgcccgattttgtgggcaaagacacaataatagaaacatggagggcaattgcatcggaacattttgaagaattgggcaaaaaattggaagaaaaatacggcaaaaaaacagcggaaacgaagccgaaaaagaaaaaggcgaaaagaacaaagaacaaaaatggaaaaaacaatgcgaaaaaagaggacggcgaaaaggaaacggaagtagcaatggatacggtatttacggaagagggaaatacagtaagcggagtggggacgaatgaagaagcgaaagaagatgctgaaatgagtactgttgatgtggatacggtaggggacaaaatggaaagtgcaaacaccgaagaagaagcattcaaaaatgaaaatgcttgcgaaatgaatggagcggaaaaagcaattaacaatggacataatgagtcattagcaccggtcggcggcgaagatcaaagaaatgaggaagacaaaagtcaacaagagaacactgatgagggcagcgaatcgactgctgttgctgatagagcgacaaagctcaaagagtttgccgacgatgactttttggcacaaaaatatgccgaatttgtgcacacttttatgatggaagaacaacaaaatggggatggcattggccaactgatcagaatgctcacaatcggagcatttgtcaacgaaatttcccatcgattggatgcgatcgaatggatgggcggtgatcagtggcaaaatgtgaagaaaaaacgcacatttttgtggtggaaaagcattttggctgatcaacaatattcagcagatttagttgatcaactttatgangttttgaaggaaatttggagtgaaagggagaaataattgg

SEQ ID NO: 443 - DNA, 3056 bp, Heterodera glycines
cgaaaagaacaaagaacaaaaatggaaaaaacaatgcgaaaaaagaggacggcgaaaaggaaatggaagtagcaatggatacggtatttacggaagagggaaatacagtaagcggagtggggacgaaagaagaagcgaaagaggatgctgaaatgagtactgttgatgtggatacggtaggggacaaaatggaaagggcaaacaccgaagaagaagcactcaaaaatgaaaatgcttgcgaaatgaatggagcggaaaatgcaattagcaacggacataatgagtcattagcaccggtcggcggcgacgatcaaagagatgaggaagacaaaagccagcaagagaacactgatgagggcagcgaatcgactgctgttgctgatagagcgtcaaagctcaaagagtttgccgacgatgactttttggcacaaaaatatgccgaatttgtgcacacttttatgatggaagaacaacaaaatggggatggcattggccaactgatcagaatgctcacaatcggagcatttgtcaacgaaatttcgcatcgattggatgcgatcgaatggatgggcggtgatcagtggcaaaatatgaagaaaaaacgcacatttttgtggtggaaaagcattttggctgatcaacaatattcagcagatttagttgaacaactttatgagtttttgagggaaatttggagtgaaaaggagcaaataattgggacaaatttggagaaattaacgggaaacaaaaaggagcaaatggaaagtgatcagagaagaggcattgagttgatcagcagacaaattcacagcagaaaatttggaagagcaatcattggaggaaaagtaaaaaattgggccaaaatgccaaaaaagcagaaggaaaaggcacttttgagcctttttggaagccacgaagatggcactaaaaatgccgaaaatggaaataatattgttggcaattttgagcgaaaattggaattgctggaaaaagcatttgcacagcaaaaattgggtaggagaagatgaattttaaaagataaatttttattattagaccaaatgttatttgaacaatacaaaaacaatgagaatttgtcactttttattgaaatgaaagacaaaataaattttaatggaaaaaatgcgcaaatatttccaaccgaaaattggcaagaattgaaatttacggaagaagaaaatgatggaaaattgaaagaaatcgaaaaagtaattttaaaatttgacaaataacaataataaaattttaagttgaaagacgcattaaaattgagagatggcgagcaaaaagttgcccaaaaactgatgattaaattgaatgaaatttttaacggatgggtaattaaatatttatttaaataaaattttaaaaaaatattcaatatttttctgatcagtcggcggaagcacaatttcaaccttcggctttacattttctgatgaactcagttgcaaaattggagccgatttgcattttgccggacggctttgatcagaaattgatttttggacaagcgacggaatgcgatcagtcgaagcgagagcagtgcagtgatcagtcactgtactgcaccctgtgcaaagttattctttattataattttaaattaagattaatcatttttcgggggggggggggagatttgtccttgaaaatggcgggaaaaggacaattgttgttgtccttatttaaaaaaagattgtttctgagcattttttccaattttgcgtaatcggattcgggattttgataaaattctgaataaatcctgaatttttacttgtaaaaagcaaatctaaatttttaaaataaatcggaacgcagcaaaaatgaaatttttaacgttattttaattttttgaaaaaaattaatttaaatttcagtaaatttttgagctaaacggtagcctaaataaaatatctcattcgaaatttaggcattaaatgtgacatttatccaaaaatatccgaaaaatgatttattcttgtgggatcggttcttaagggttattttttgtttttattgcattttggttaataaatttgggaaaacgccaaaattggacaaaaaaataatttttggctgtttaggctcgaaaaattttaaacctagaaaataggctttaataactcgaaaagtagcttaagaaccaccaaaaaaacttgcttttcgtgcgtttaggccacaggaagctgaagtaaaaatagggcaaaaacctaaaaagggtcgttggaattacaaattaatttctttaaaattttaaattaaaaaagaaattagttaattaaatttttaaaagatgccgacaaaatcaaacaatttgaccaaatcaccgagctttataatcaaagcagaacagtggcattaaagcaaagagctttggtaaaggagaggaaagaaacaattttcgttttggcaggtaaaattaaaatatattaattatataattttatttagtttttaattttattttcagattttacaatgcgtttaaaattgttggaattgttattgccaaaaaccgattatttgtcaatgttcagcaacaagcaaaataaattggacggacaatttgctgttggcattttggacaaatttcgaacaatttttgcctttttggagagatgggcacaaagtaaaaaaaaaacaacgcataaattaattttttgggagaattttagccaaaagtctacttggattccgacttttaaatctgagtctttttggcaaaaattctccaaaataaataaataaataaagataattaaaaaattgtacaaattaattttaagataattttatttactgcgaagatttgggctatttgaatggcgaaatgcttttgataatgttgaccaaagtatttcttctgttccccgactcgtcagtgtcttttcttgtcgacaaattctttctcatttactcaaaatggtaaaaaaaaaaattaattaattacattatattaatgatcttttttgcgaatcgagaccatttctaaaaaagtcggacttttttcaggcaaaattcgctgaaca

SEQ ID NO: 444 - DNA, 441 bp, Heterodera glycines
cattcccgcaacgatatgtggcggaaaaagtgaatgtatcaagcgcaaaagtggtgcaaaatgagctgaaccaaggcaagcgactgacaaaaactaatggaaaaataatcttaattaataaataaactaattaattaatcaatcgggacggagtcattatttaaaaaagcatctatatgatttgatgaaaatttatttataacttagctcaaaagcaatcaaatatttaattcttgatatcattcgatagcgcttagtgttctatataattctgcaaaatttcaaaaagtttcattaagtttcaaaaaagttatggctaaagaactaaaaaaaccccttgtttttggagcatctttggccctgacttttttgaaatttaacaaaattttttgaaattttcaagactgatagagaacacttagagctatcgaatgatatcaa

SEQ ID NO: 445 - DNA, 5259 bp, Heterodera glycines
cgcagaggccggagtcgttgaagatcggccgacacggcggcagtgggcggatggacaacggaaagtcgcggcggacaatggcaggatacgaaccgatcaatgaggtgccgaaaatagagacaaccggtcaaaaatcattcgcttcgctgttcagcttcagcccagctgttcgtctcgtccgcctgtcattgcgcttcatcccccgccgagtcggccgcgtcatcgcagcggtggaaatcccaatgccgtgctgagctcacgccgttcctccaccacacaaacgccacggcgtccgcccgtcgagcgcctcgtgtgcggtcattgcggtgcgcgcatcgagtgcttcaacgaggaaacgctgtcgctgtgctgcgtcgcgttgtgcacctttttgcaacgtgccaccgctctcgcggcaccgctccttccgcgcacagtccgtccatttgcttttttttatgctttgtctttcccctcttccacttcatttccatatttatgtgggaaaaatttagcttcgctgtgtcactcgtttcatcgattcgccgctttttccatggcacgaatccaatgtttttgtgccgggaaactcatgcagcgctgccaaacagttgatacgcgtgataatgcaccaggtgcttgatcagctgagtcctatgtaaccaaacactgacacattgtttccgtaaaacaaacgccaaattaaattccgcgccattttcagttgtcttccagtggcattgcacttcaactgttcagcatgcatatccaaacgaatgaactaaaccaattttggaatcgaattgccaatgcattggccgacttttccgaattgaaccccgtcgcatttattcagattttgcttgaggcatgcatttaattaaaatcattaattatataattcccgctcccctaaaaaggatatgctcgaggcctggccattacgagtgacgcgtattatgcacaatttggccattttcatgcaattcattccaccggacgcttttgcgaattgggcactcgtagtcggccaattggaagggctttttcgacgcttacaatctcaggcacacttaagcctaattaaacaactattgtaatgatggtcattcattttttccaaagttgtcaatcgatatgcccggacaaaatgccagcaacagttgccaaacccagcagaatttggctgccgaagtgtcctcttctgtgctggtgatgagcagagtgaagcgcgtgcaaaattttgcctccataaaaggggccgcccaattggtggaaaggtgaggcaattcacacaaaaaagggacggaaaatgcaaattaattaataaggaaagcgggaattttatgacaaattaaactgtacaaattgtttattggttgtgagacagagaaggactttccctcgaggattataatggaggagagaattgcccctaaacgatcccattattgattcagttttgccaaatggttggtcgaaatgctgcaccgatgcccggttgagttgcgcgacatgtgagtgttcgcggtttcaatgaatggcaaaataatttgtcgttaattttattcattttccaggcttttggtttgcaccgcttgtaacagagtgagaaatgcgcgcgtaacaaatgacttttaaattaattaattggtctagggaatgatcagagaaagggacaagcaaattatgacgcgtgccattgttggcgaattggtggcagcgctaaaattcaaatgcgaattggtcgagcccaaccacttggccatcgtacggctcgttctccaagactttggggaaccattggacagcgattggactgcaagtcaatgcggacaaacggtcgagacgacagaaggcaatgggctaaaagaggaaggacggagcacaaccgacggagcggaactgatcggcggaaccggcggcggcaacggaagcggcggtgatcagttcaacacgggcgcagcagaagcaattcgaccgcatgtgccggaactgctcgaattcatcgccgacttgcacgttttggccaagatgaaggtgaaatggatggcaagacaaaggaagaaacaaaatcgatttacagaagcaaacgctgagcagcagcgatcggatgggcggtgatctgaaggcgggacttgccgaactgatcgcactggaaatgagtcgcccgtcagtgcgcgactctcggacggtaagagaatttaagccgttctgcagatcaatcattttatttgtattttcattgttaaacttattccatcgttttatcagtatcactttatgttaattaccttaatgagctcctccatctgttcctttaggtgatgcgcttcattccatggctttactcgccgccttcgctttcccaggcgttgcccggcgcattcgccgaatcggtggccaatgtccgcgtgctgtcctggattttgttgggcacgttgcatgcccgtggcaatggcactgtcaacgcaatttgcagctccgtttcgggcccaaaccaatgtttgcccgtgccgatcgcttgttcgggtcagatggccgattacatccattttgtgttggccgggttcgcagatcagtcgaaagtccgccggaacttttgttcgctattggtcaatgttttgcttttctcagcaatccgtcgttcatatgtccgcccttttccatgcgtttcatttatgccaactttggacaatttactgtgaacagaccgccgccacttgtcgctcggaagagacccttcaaaggacgatgcaacaaattttggacttttgggcacgcgtcaccccggccattcttcagctgctgtcccactccaaagtggtcagttttctgcttctaattaccttcctgatcaatctttttaattccgctcattcgtttggttaatgcttttctccttttcatcctatttttggtcttattaatgcctgccttggtttcccataataatgccattttcactgcgttggtgccatggtgccattctctttttccatgcatttctctttttctatgccattctctttttccatgcattttcgcttaatatttctttctctatcgcttttttctcttttatgccaattcctcactctttcagctcgccgacatggtcaacctgcactttgtcaacactctccaggcccttcagcaggtcaattcggccgtcctctgccaactttaccccatgtgggagcccgtgctgaccgcgcaccacgcgcacatcccacgccaacttcggatgaagttggacgcagttgaagcgcaggtgaaggaggagggcaaatggggggtaataaaataatagaccaattaatgcaaatgatggctaattaatacaaatgagactccatttaatttcataaatgaccacctcacttcccttttttctgttttagctccccttggaaacgccccaaatgcgcccatggctttcaaaagttcgctacaaaatctcacaaattgaactccaaacgagcgccgcctcccctttttacaatgtttaaaagagtgctgctaattgatttttcacttttgcacatttatgtgatatttttaggtgctttttgatttttgttgtggaaatcttggatatttgttttgtaattttttctttttaattatttaataattaaaattgaatattttttgtgtttagtcaattggtaacccatcagtcggctaaacgtagaatagggacgttaaaactaagaattttcggtttaaaaatctgttattcgtgctttctcattgaattaaagccacagaagaaaatcccaaaaaacattaaaataggcattaaaaattttttattaaggatttttagggagaaaatcaagtaaaacttatccatttcgaacccggaacactattcggccataaaagaccacagttactcatataagcgaatgtgtgctcttttggcgagaattgtttaaagcaaaatatccttggcaaatgaaaggcacgaaaatcccaaaaaacattaaaataggattaaaaattttttattaaggatttttagggagaaaaacacgtaaaacttaatgaaaaaattaattttggtcatttaaatgattgataaattgtttatatttatacataaatattttttcgaataaataaaaattttaaatctaaaattttttatcaagaaaaaataaataaattctggcgatcaatttttaagaaaattttcaatcttaggggtgtattttctggaatttttttgattcatttcaggggtgtattttcccgattttattgtatttttaatggaatttttggaaaaaaacgccaataaggcaccaaaactgcaaaatgccaaaaaaggcatttaaggcacgaaaatcccaaaaaaggaaaaaaagcctaataaactcaacgtatgtagaagcttcaaagcaagtggaaaatgtgttaattatacttaatatatcgaaactagtgcgtagaaaaaaaggcatatgcctcaaaagtcggtctctagttatgattaactgataaaatttttagaattttactgctatgcttgttgattttttttcaaaaataggtgttaaaatcgaccaaattatcgcgaaattgcgtattttttattcaagtaataatttaagcattgttttgcaacaaaataaatagttattaaatgaattcgaagcttttccccagaaaaatgcatcttttgaaaaaaatttcaactttttcgttcggattcgggtccggggttcggaattgggcaaatccgagttcatattcgtgaccagcgccctcgaaaacccccggaactgatttttggcctaaatttaaaaaaaatttaaatagaaacccccattcttcaggattaccggcattgcggtgggtgaaccgcaataaattgccggtaacatgtgatttcgtcagaagtgatttcgtcagtacggggtttcgtagtaataataataattttttttacgaaaaattttaataattcataaattaaatttgttcaaaatatattaaataatatgtaaattcaaaataaagattatttgctgattatcaactattttcggccggtcacttacatataagcaaaataatttgtatttatgcctcgtctttgctacttttatctcctataagttcattctagatggtcgtcagccattatcattctgcattaacctcgaaatttcgctttcaaatttcttaactgtgttggagcgcgaccgcaggtttttctatccgcgttccacctctattcttactaag

SEQ ID NO: 446 - DNA, 3235 bp, Heterodera glycines
gggtcggtttagtctggcccgtttagtctggccgttttagtcagagggtcggtttagtctggccgttttagtcagggggtcgttttattctggttagctgtttttacccacaaattaattactttttataaatttcttttgtttgtcaatcatatacataaacataacttgaaaatgtctgtttagctacaaatcaaatggaaaactccaatcaggaaataaagacaaagcgaaacaagcagaagctggaacatgagggttcactttatgttcttcaccaactcagtgacgatggacttcggaagtactggcgatgcgagtttttcgggcctaacgacaaatgcaaaggtgtatgcaaaaataaaataaagactatttttcaaatttagggcgcattcacactgatattcatggtaatgtcctcaaaagttcatggacaattacaccggaaggccgtggttcaatggtggtttgacagtgccacggttcgcaccggaagaatggagtgtgcatcaacggacgttggatggaggagacagaaccaacaattacgcagaagcattccatagaaaacttcaacaggcatttgattgtacccatccaagtgtcttccacttcatcaacacaattcgatgtgagcaaaagtcaattgatgctgacatctcacgatgcgtcgctggtgaactccctcctctaaagaagcccaaatatcgtgccgccgatgcgagaattcttcgacttttgcagggatacaataccatcaacaataacccggctaaccaaaatgaccacaattaccatgccaatgtcaatgttaatcccgataacatcaaccatttgctcgttggtgtttctcgaaattatgaaatgcgcccgtaatttttcaatgctttgttatttttttttgttgttaacacattggataaatatgttttgataataaattaaacatttctcgaaaaaaaatcagaatataatccatgtggcacaaaaacagcttgccatactaaaacgaccccctgactaaaacgtcccctcagactaaaacggccagactaaaccggccagactaaactgacccggtccgcgattatcaacctattttcggccggtcccttacatataagcaaaataatttgtatttgtgcctcgtctttgctactttatctcctataagttcattctagatggtcgtcagcagggatggcatggaattccgagttctgacatttttggggtcggaattccgaattccgtaaaatttttgggcctcgaaattccatccatggtcgtcagccattatcattctgcattaacctcgaaatttcgctttcaaatttcttaactgtgttggagcgcgaccgcgggtttttctatacgcgttccacctctatttcttactaagcattttgagtttgttgatagtctttgtcagttttctgtctataaccggagattgtgttgcgtcagccgatcacgtatggaggctacgtttaaaaatgggttcggcaggacaacaatttgagaatacttgtagcggattttgcaaatcgcaacccgctagggtatttacgagcctgctttatctttcggatttttgaattttttgtaatttttggctaggtgttcgcttttttctgaattaattttcactgacgaaatcaccgggaaccaaattgccgaggcagcacctccggccaacattggaaatacgaccttaatttttaaaattatttttctaattagcaacttataccattaaaattaatttaaaagaatgttcagccggtggcctgggtttgtggcttcttcacgctcgagcttcttctcctcaatttcgttaaaatactggttcaggtaaatgtctcgtcgtcccattttgtccacatgttcttcggcagtcgctcattctttgagcccaattgactggccaaaagaatacgctgcagacgaagatcgtactgaaattagggacagaccgaatattttcaatgaattatgatatataattgttcgggaaattttatttggctgttcttccccattccgacctggtaggggtccttaagacgaagccggcgccggcgcaatgcctcctggacttcgggatgcggttcgaatgcctggtcgtagaattgaagacctgcgaacggaaagactcaatgctttgacttaagagcatcggcgggctgtagcggaataccgtgactaccagggtgagcatataattttaatacagtttacatttcacgatatagaaactctgaaaatctattcctcggagagcgctggctgcaggaagaggagctgacgaatcagctcatgttggcagcgattccgcaccctcccccgaccccgcccccggaaggggatactattcctaggcgagcggtggttgtgcgacgaggaactgaccgacgagattattcgtcgtgagcaatttacgccgctgccgcaacaacaaaaagacgatggaaggaggaacggaatgagtgattgataagtgatcactttaaaaaaaattttttttaccattgattaaattttcattttcttatgcaaagcgagggtaataaaataattgaccaattaattaatgcaattgatgactaattaatacaaatgggcccaattgaatttaataaatgaccgcctcactttccctttttctgttaatttgcatataatttttcttttatccttttaatttttcaataattaaaattaaacattttttgtttttttttgaataatcatcaatcattcattgatcatatgaacccatcaacacttgtgcataccgtagtctcattggtcgggcacagtatcatctgttagccaattggtgacccatcagtcggccaaatcttttctttttacctgaagttcgctttctttccaagtggccaatttgttgtcaaaggcactcaaatcgatcacaacatcgatgttattacgaagagctaattaaaaaattaaatgatttttgttggcattttttcttggcttttcgcttcgcttactcgcataactcgtcttaatatggtcaatgccgcccaacttaacgcagtcgatgcccaactccgatcgcacgtattccttcgtgcattttcccccgtctaaccaacgacagctgaataattcttttgaaattttaaattcgaattaattaaattcacaagagaatgacgtcatcgaccgggggctgtgccatttgcacgtattcgtggaaaat

SEQ ID NO: 447 - DNA, 1603 bp, Heterodera glycines
ctgcttggccccgttgagcacttccgtcgccccttggttacgtcggcaaagtgccgagtggccaaattgaggaaattttgtgccactctgagggctctttccgtggaattgcgcaccgaaacaccgtcgacggaagggaatttgccgggaaggacgttggaagtgtcgtagaaacgggagacaatgtgaatgaaatcgggcggaccatcttcatcgtaatagaaaatgcttctgtaaatttggaaaaaggcaaaggaaaagccaaaaaaaagtggggaaaatgggagagattaaaaagcataaaatgataataaagcataataaattcgaacttcacttgtctgagcggacagatgacaatgaacggagtgtcgatggaatgggctttggtggtgaacaattggatggagttgcgtttgtcgttgaagcgtctgatgaaaacggacgaatggaacagaaacattccgatgctaccaaacaaaaccaagccggacacactcctggggagggacggtggacagtaaaaagtgccgacaaagcgaatgccaaactaatgaactaggaactaattgccctgggcaattgacgcctcaaagcgattaatttggactgattgatcagtcaaatcataaacaagtgctcatgaaatttgtgctttttctacctgaaccacaaagggtaacggctgtgcataaagcggaagccgctgatcgacgtgtaatcgcaaaaggcgtcaaagaatgagcggtgccgtggtccgtttccaatgggcccattttcgttggaattttgacacgttggactagccaatctttgaatggtctccgaaattgccaacatttgggagggaatgtgagaaaaataggcaaaaaatgagtgaagagaaatagcacaaaatggaaggaaaggcatttgaaaacggaaaatgataccttttcaatggcactgaatgtttttttttctcgcattttacgattgcaaatgtaataaattaaaagaaataattattgtaattacaatcattttgagcaaatcatgtttatttcggcggcacaatgatttttcccaatttttaaatgcattcataattaatctgttccccgttattttaataagtcacacattctctcctcctcccccattttccccttttatcccatcatttttcttttcttcatccatttttttgtcctttcttcgctaatccgtcgccttttctcccactccgatcgccccaaaactcgcgccgtttcggctcacaattcaatccgacagatttgctgtgaccaccacaccctattcagtgtacacaaaagaagaattcatacacagcagtcagtcggaattcattcacagaaatcggagcggtagggaaacaattggctgatcagccgggggtcaaagcaaaagaattggcattttgaggaaaatgcggaaaagggaagggaagggaagggaagggaaggccatttccgggcatattcattttttaattaatttttataattatttaggcaatttataatattggaggtgtttccccaatgccctcgtccatcccaccgatttgcccctttgaattggccccgcttttccttttttc

SEQ ID NO: 448 - DNA, 1620 bp, Heterodera glycines
cgaaaagggttaaacagcagaagatggaagacggaatcatgtgacggaagggggggggggtaataatgccaaaattaggaagaaaattaaattgacggaaaatgtgtctgacaacagcagcaaaatttgaatttattaaaccgtcaaaaaatcgatatttgttcatttgtcttccttctgatcactcattgctttcccaatcattcctttgtcttttcccctcttctgctgatcactcttccatttcgatcaccctctgccgagtgcccttctccgttgtgccgctttccgttgcttcctcacccctctcatccactttctccgccttcgcattcggttgggttgccacgaccggcatgggcgaacattcctttttatttcattttcttcttgttgaaaagaaaatctgaaaaacctcccatcgatggcatttgccatcatgtccatcttttggccgttcagtttcaattcggccaaacagccaacaaagttttgcgtatgaaggccaaaggtcatttcgtgaaggtccggcactccgcctaaatggccaatggtaatttttctgcgcaaatgccaaaaactgaccgacaaagacatgcccttcgacgttaagcatcgccaaaatgccgctgcttccttaatttgtaaaatgtattaaaaactatttaaactgattttggcatttaaattatcgtctcggcttacgtcccgacgttggcgcgacatcgtcaacaaaaagccatccgtcccgaccccgacgaattgcccttatctaagcaatataaatggtttagaattcaatatgaaatttccatttcactccaccgaatgcgttttgccgtcgtccaccggactttcgctgagaatttgcgccgcgccaccgcccaattcgaaggagaagctcaaatgcccgtccaacaggccaatggacaagtaatcctcgcccgtccattcgtcgtcctcttctgtgccctccgctgaattcggctggttgcccttgccaaatgatcagtccgtatgtggcagtcgtccgcactttgaactcgaccacttcctcctgctcactgctcagatggggaaactcatccgaggagaacaccttaaggggaggaaaatgccaaaaagggaaaggcaaattgacgaagaaaaggcaagcggagccattgtacggcactaattgaaggcaaagcaacaattgattgatctttaccacaaaagcactcccgtcgaattttgcggcgtattcaatgggccgaactgaaaaaataactcggagtaatttaaacgatggcaaaatgccaaaggcaattaaaacgcacattcttcgcaccgctgtcccacataatagtctcgacactcgcacatcacgtgcgtcccattcacttcttcgcattcgccgtgcgttccgcaagtgccgtcgtcgcatagtccggcgaatggtccctcaatttcgactgaataatctgccggacggggcacaaagctggacggaatgttcggctcgggagtaaccgacggatgctggcgaatcggggacaaaaagcgacggggagcgggcacaattgtggtggggtcgggagtaggggcagaagtggtggtttgaacagtttctgaagtggt

SEQ ID NO: 449 - DNA, 1285 bp, Heterodera glycines
cctcctgctcgtcgacttgctcctcatggtacgccgttggggatgggtgttgtcgttgttgttgttgtacttgtgcttctttccccctccgcacaacttcccaagttgacacccgtgtacaagtccctactcagttcggccaggcccaacacgcgcccgttcagcaacaactcttccacgcacccctcaaacggcacaatgccatccatcaacgcgtgcatttcgtcgggcacaattacgcccctcggcggcattgcccccagcagcaaaatgccatccgtccccggctcccctctcagcacgcccttcttgcgcccgtcaaccaaaatgttcattgcgttgggcgaatcgctgggctctatccgcagatggtgcgtctttttgtgtttgatgcgtttggtcagaaaatgtttgtcgaacggctgatcatcgccttagggggttaattagttaattaatgacaaatagtgagactaatcaccgtaccttccctgtgaatcacccagaatttctcctcttccattccgatggcactgatcacttttccctttgtgctgaccattgccccgaccatttgctgctgtttctgccggtccgagctcaagcgaagctcaatctgttcagtggattagcattagtcagaaaagaagccccaccgaatagggccccggggccttttggctgccctcctcgacgccgaagccaagcggaagtgccaaaaaggattgtcggccgtcaaaccgaatgccctttgtctgctgtccttcttcctcttcctccggtagttgatcagtctcagtttcacaccgagttcctttccttcccggagggcacaaacattgctcggcatttggaccgtcgtcagtagctaagacacacacgcccctgtcacacaaccgttggcctccaggacaaattccgtctgttgaaggcaattggcacaaatggccagcataaccggcaaggcaatggcactaaaagggcagagcggtacaatttatatcaaagcaattaaaaatacgaactgataattaaccattgagaaaacaaaagaaagaggtacttcgaatccccagcgtgttagctgacatttgcccccgtttcggcacggttcgttggcacattggttctcactttggtcaagtgttgccgttccgtgctgttttcccccatcaattggctgcccttcagcgctttgttctcttccttcttccccaatgtccacattttccccattgatttttaaatttcaattgagccaatgaaatttatcattttgggggaa

SEQ ID NO: 450 - DNA, 4842 bp, Heterodera glycines
ccccaatgtccacatttttccccattgatttttaaatttccaattgagccaatgaaatttatcatttgggggaagtgttttgcccgcgttgggtccattccgccgatgaaaacgcgggacgacgcattgggagggtaagcgaaacggcgatccacggggtaagagagacggaggggaggggcagaagtgccaacttgcaaagaagctgaaagagacgacggatggtataatggctaatgtcactgatcagtgccaaaaacaaatggccactcccatcgctcgtctcttaatttgcccacctttgccctgtccatcattttgcacgcgaatggttgtcggttcgttcaatggcactttgtctcggcttttaattgtttctacaattacttaattattgtttaacgttttaataacaagacatccaaccaaatcgatctccgcccaatgaaaatttataaatgacaattccattttgaagctccacgctgtgcataaacggtcgttcgtctcccgcccgtctttgatcagcagcggaagcaaaaagaataatgccattgggagactgaggacgaatctgagggaaaggggaaaacagtagattaaagagggcatgggaaagggatagggatcagctgtgtgatgtatgacaaattcagcgaatgattgggctaatagggtaattagtggattgattaatggtaaggagaggaagcgttcagctgccaaaagtgctgcttgcactagcaaaactcacttgaagctccagattcaacgcgtccagacgcattgctctctccgatggcactgccatcgccgttgtgccgctgaaatggcggaagtgcgaattttccgcgtgccatggttccgcgccttggccccgctccgtcccctccccctcttccgtctcctcctcctgaattatcttttgtcttccgaccaatgatcattcccattcttctattattaattcccttactttttcaatttcctcctcaattgtcccctttccctcctccaaatttttccctctccgctcctccgttcttagcatctgatcgggcccaaccactccaaccgctccctcccgcggcttttccctttcgacttcgatgtcaacaaattcgccaagttttagtcccggctcaatggtcgaaggcagcggcttttccgttgtgcttattgaaagtctctctgaagaaaggcaaaagacagaaaatggaattttggtggaaaatggcggcacaatcaaagcaaaagaacggcaaaggaaagaattcaaaaggatgccaaaatgcaatttccactttcaatgcaccaattcaaatgtgcaattagtaaaaaccaaccaaccaataaaccaaataaatcacttttaattaaaccgcaaattaatttgttggcttacagcaaattaaatcaaaaagttatttattgaagcgaaacctttacttttttgtggtaaatgacaatgacaaggaaacagagagagagagagagagaaaaagaaagaaaaaagtgggcgaatgaatgaatcactggggtggcagtgcgaaaagaaagcgcgtccatcaggtaattgtcaatttgttaattgggtaattaacgagaactaattaattaaaaaaacaaaatctatttaataatttgagagaataaagagaaaagtttatggaaaatgcaaaatgaagtggcggggtggagaagtgacaaatgaaagatacggtaatcagcaaatgttacggtggtggtaattgatcagagacaaacgattatcgattgattacatgatatggcagcattggagcgatcgcattttacactgattttactgttgaacaccctcagaaccaagacccgaacagtctggcacggtgcagcgccgcaggcggtgcgtcgttgcggatttcgtaatggtggtaatacttttggaactgagtgcggccatttcggtacctaaaccagtgtttgtttgtccatcacaggttcgttcgttagtctgttcgggactctcgctttttgctaattgtaagattttaatgaccattcgcttgaactgcgcatacagtagtctcgtacagtatacactacagtcccctcgttcgtccgtccactgaccgttccgccctcctccgcaagttttccttgcgcacttccgcgatgctcttcttccgcttgtgctgtgcgtgttccgtcctcttccgcttccgctgcttctttttgccctcctcctcttcctctttgtgctgtgttctcttccggtgactcgtcgccctgcgtctctgctgtctcagccgcctcagtcggcgcatccgttgaggatggtccggctcgggtcgtccgatctctaccgcttggacagtgtccgcgtcgctctccgccgcgctttgcccttccgccaaagtgtactgcggccccttctcttcctcttccgcttcttcttccgccggtgttccatcctcctcctcctgttccgtcttttgctgctgcttctgttgatggaagctgcgccgccgcttttccgcctccgtctcttcgccgccttccacgttcaaaagtgccgacgtctccaacactccgtctttcgtctgcgcttggcaccgatatcggcccgtgtgttcaacagaaatggaagtgaagaggaggcgattggcggtgacctgtagggtaattaattagtggagtgccgtgccatttgtggccaaacgcccacttgggcattcgctggcaacgcgtccccgtccttggagaagtttacacgtgcactcgggtctccgatgaccacacagtccaaccacgcctggtcaccaacttggaccgactcggaggaaacattcagcaacactttgataattgtgtcgggcactgaacccaattagcatttaaaaattattcaaattctaatggcaccgaccaaatattttggcattcacaaagccggacacactgctctgtccgtggtgaactgtgcagcgataaatgcccgcggttgagtcgtcgaatttctcgattcttcaatggcaaagtaatcattaatttgaacagatattcgaaatttgaatttttacagcagtttgtcgcccgattggttcgaattctccggcaacgactcgccattctcgcgctgccaatcgacggtggagccgggcacaacaaagacgggacagttcagcaccgcctgcgaatcaccgtcgaactttgcttcaactgcatctaaacgtacggtaggttacgatatggttcaaatagttaaaataatgaagaaacaaaatgttagcaaatcacgaaaaacagacaaaggacatttgcttgaagcatttttttgtttcttttctcatttctgtctatctcactctctctcttttctctctccttttcttcctctctctagtttctctctctctcccattatattactcgcccttttgcctcttccgactctccgtttttctcccaatctttaaactgactgttttccgagtcaaatccgacagaaactgccgcctgtgcctgtccgaccgtctcgccgtcctcgctctccacttcgcaccggtaaatgccgtaatcgttgctcggatccgccgacttgaccagcagctgactttgcctgcccaactcacggatcagtgctccgccacgcgcgagtgaccaggaataagtgaactcatccgcagaacggcctaaggcattcgcgtgcaaatggcattttgtgagggcccattactatggaaatcccctcaaaagcacaaggaaaatgggaaaacgcaaaaaaggatacaaaaggattgtggataagcattggcataattctgtccatccatttgttagagcaaaagcaaaaaataaacgaacaaaagaagcaacagaaaaaagccaaaggcatcaaaataaggtaaccccgtcgcaaaacgataagataaatggcacggctgagcatcactgtgccgttctccaccttcgcctggacggtgtaaatgccggattgggaaggtcgaacattttggagatgaagcaacggaataaggcaccagcggaggggcgaaagacggagcggaagatcaccccaaagccaagtgaaggagatcaaaggacgacgatgggaagggaaagtgccgaggggcactgggaggaaaagccaaagtcaaaaaaccaaggtgggataaagcaaatgaggaaaagcatttttgaagggagggaaagggagggacaaaaagtcgttgtcatttttaggaaaacggacatttgggacttccggtcattttccatcaccaataaaagaaaaaccattattaaatgtccgtaagcacttgaacaaaaatgcatttcattaaaaaaccaaaatcactttaataagcaaaattattactgctaattatccccttaattgcctcgtaatttcccaatcattgctcgctgttttcctcccactacaaactgaccgtgcaccacacagtccaacacaattgagtcgcccgcgttcaccatgcgcacttgcggcggtgaaatgtccacgtgcaaaaggtcgggccgcgtgtcgccctcggggtgcacttccactttgctggtggcgatcacttcctcgttacggtacgcgttgcactcgtactcacccgcgtgatcagcaggctgaacaaaagcacccgatcacttttgagaaatagtaaatggttggcccaattaattaattatcctaattaaccaaccaacatcacccttcaattattcattcccgcgacagttttactttgaacgggtcgaatcggagcaccccgcggtgttcctcgtcgctggcatccgaaggcaacgcgtccccgccggccctcttccactcgacgcgttcaacca

SEQ ID NO: 451 - DNA, 2858 bp, Heterodera glycines
  unsure (1)..(2858): unsure at all n locations
accgttgtcattcccgacggttcgatcactttntggcaattatcacagtaatttgaaaacttagctgaactcgatcggtaccttcaatgcaaattcccttagtgacggaggcgaagtcattgctggcccggcaagtgtaacagccggaattgccgaggccaatgctcggatggcgcaggaactgctcggagatggtgattggcacgtagtcatcgggaaggtcgccacgttcggggcccgggtcactttaatttgacgataatcggccaaatttgcaaatttccctcccccaccgtgaagaaaaaactcactgaagccattctacgtccggatccggctcaccctccgcttcgcatttgatctccaacggttcgccgacaatcatcttcagccgggcaggcgcgggtttttcctccttgataatgttgataccaatggacggaccgatctcgactttgccgctgtccgatgcttcgcccagcggattggtggcagtgcaagtctggcaattgaggacaaaggattgttgactacattgattggatggcaatcaagaattggatggaatggctagaggattaatcaaaggaacagactgatcagattccttccttcccccatttgccagttttaaatgttgtgccatcccccccccctttacatattctccgtcgtgcagttccttcttggcgtctttgatctccaacactccgtcccccaagtcgacaacatcctccggtaattcgtccccatttggtccgctccactgaattaattgtccgcttttcgctcactttgctctcctaattgctcactttaatcgatgggtgtgggttgcccgtcacgtaacatttgaactgtttcgattcgccgggttggccgttccacactttcggctcgacacgtgctgtcggtggctcttcctctgaatattttaattaacaaataaactaaaatatttagtgaatgggaggggggggggagtgaattgaatgacagaaaatgcgtcggtgattttccggaagccgtgtgttctcctactctccccaatttcgtgcacagtttccagtatcagtaagtattaattacgatcattaacccattcattacccccaccctccgcgctgtccccgtccctaccgtccgttatgtccaatttgaccgggtcggcgtgtccccgtccgaacttgttggtcgccgtgcagtggtactcgccaatggtggcctcgtccgctgctgcaatcagaatgtcctccccgtccacgctgactccgctgggcaatgctccgttgggcgactcaaagcctttgaaaaaagccaccgaatgaatcgcgccctttttaggcccaacttcagcagctcactcaccccaatggatttgcgcgggtgttttgctgttcggctcgcaatgaaaccgcgcagggtctccgcggggaacagtttgctgcgggggcgtggccacggggcggggcggctcgccaggttttcgcgccagcggaccgaccggtggtggactaacgtatattcgagcgggctcggacaccttttgcataacaaatggtttttgggtaaatgccttattatggcaatgaatgcttcatccgcccctctttccttccctttgcgcttttcttccacttttcttacctgtggtcctcggcttggctctcgtggttcgtaaatacattcgtaatctccctggtgatgcggcagcgtctgcgcaatgttcagattgcctctcccatcatcgacggcacccgaaggcaacggccttcccccgcgggcggtccagcgtagagtcgcgcgtggctcatccggaacccaacagtgaatgcgcgatgggtgtccctgctgcacggtttgctcagtcggctcaaccaatggtctctttgacgcttgaaatcaatgtaatgattatctaactgattaattaattaattatgctaatgacccacgttcattgacgtcaagtcgaacaggcggcgactgaaggacctgtcccgtctccgggtcaatcgacgagcaaatgtatgagtcggcatgttcacgtgccaccgcatcgaacaacaaatgtccgcttctgtccactgcgcccgatggaagcgacccgccgcgggccggcgcccaactcaaatgggcgtttggctcgcccggcacccaacagcggaagcgcgccggctgaccgaggtcaacgcgttggtagggaggctcaacttggggcggatttcgagcacgagcgggtggtggtggtgaaggacgacggacatcgagctgaggagcaacatcatataaaaacaaatcactgagataattgttcggtactgacccggactggcgtcgagtcgaccgtccgttcttcgcgcgggtcgtcgtgcgggtcataggctgtgcaaatataatcgccggcatgccgaagctctgcccgtgggatgttgagcagtgcaccgttgtgctgctcctccaccccgctgggcagcatttcgtcgagtgccggtcgccatttgagcaccgcctgcggataccccggcacccaacagcggtaaggacgtggcaggggatgttcctcgtccacaatttggtagggcggctccactagcacttggaaaggcttcttcggccgtagcttcagccgcacattgtccgagtcgacaggtcgacttccgatcgggtcgcggctcgggtcgtaagccgcgcaaacgtactgacccgggtggtgctgggacacgctggggaagtccaagtaaccgccgctctgattcgcgcccgagggcagtgggccaccgtgcgagggtcgccaagtgagcaccgccccgggcactccgggcacccaacaacggaaacgggccggactgcctaag

SEQ ID NO: 452 - DNA, 5977 bp, Heterodera glycines
attatcagccaaataatcatgtgaaatcccgaaaaaagcactttcaatatggaataaaccataaagcttatgctcattaaggaaaggaaaagtcctccagctaacatagaggataccaacggataacacgttgggtttgccaattgttccatgcataaatagcattcgatgagtacacactcatcgactgctggacataaaatgtcctttttaaacatgtgctttgaatccatccaaaaatgaccttgacattgatagtcattcaggaggatttcctttggcaattcatatgtgagtttgtgtacattctcatgaatgtaacaattctccgagcagcaaagttccactttccgaatttctttcggaatctttgccaaaacacctttgtttgagcaaatgagtttacactcattgcattgatttgttggataggctcctgccaatccaaaaatgcagaaaatagtgagacagttaagaactgtcatcacttttgctttgctgcgagtaatcattccatgtttgttttggttggcttttggttcaaccaaatgagaatttttgtcctcatttttctcctcctcatttggcaatttattttccaaatgaagaattgttttttctgttgaactgtttgcagtttcgtctttgataaccttcaaattttctttgccatcttcggtaggattttcaaatcctacctctaatggaaaaattttgttgactggtcgtgtaataacgactttccgaggcatggttccatacctctttgatttaatgccatgaattggcatttccaattgaacgcttctaatggcacctggtttaccattgagctcaattatttttcccaaagtccactgattccgaggagtgaattcctcatgaatcaggactatcattccttcttttggctctcctttgtcttggagatgagtacctttatgatcccacttagacctttctctaagaaggagaaggtactcattatgccatttattccagaagctttcatgggcttctctggttgctttaaataaagcagccaatttctccgaggatgaaatttgcttatcgttgggatcggtttcttccgtcgttgtctcccaatttatctgtaaatcgggttgaagtaagtcgatggggcggagtggctgaatgccatacgctccctctgataccacagtgattggccgatggttgagagtagcctcaacttcggccacaaaagtgttaagctcatcgtaattgaggatttttctccccaatgtccgtttaaagcaatttttgcataattgcacgaggcgttcgtaaacgccacctgcccatggactaatttgagcaataaatttccacttaatcttattaagtgcaagaaattcatttttgttttgctcaactccctttggagttgtcaattgctcaatcgttttttgagataatttaaatgaagtggcattgtcactccaaatgaaatctggtttccccctccgactaatgaatcgtcggaggacatttaagaaagattcggccgttctgtcaagcatggcttctaagtaaactgctctcgttgtgaggcaagttactataataatccatgctttgaccttctctcctgccaatcgtgtctctgttggccccaaaaagtcaatgcccattgacttaaagggcatttgtcggcagactcgttcctccggcagtggacgcatttttggtaaggcaaattgatatgccttcatccttcggcatcgacggcagttttttataactctttttactgccgttcgagactgaggagtccaataaatgttgagaaattccgtaatggtgctgtccacccctaggtgatgtcgtttctggtgacattgcaaaatgataagatcccggatttccgagttctttccaagaagtatgggatgtgaaaacccataaggttgatcactccttgccaatctcgttttcagtctcagaatcccttcactatcgattagtgagggaaattttgtgaattcatctggatcattcaattgatccaaacgaattataaggtattcagctagcagaacatcttctgctgtgaatgctctgtttttagaaatcttgacgatttccttccggtgcctttttgtgagctctgaagggtctcttccatttaataatttcaaatggagaaggtattacaaagataactgtccggaccaacttggtccaggaatggtgtctctttgcattaaataattgctgttttggctctgcacatgtatgagccaaaaatactttttcatcttccttcggtggatcatataactcttcctcttttatatcaaagaagagttcatgaggccaacaattttggtcctttgtgagccaattgggcccattccaccacgaagaattggttgagagctcttctggtgttgctcctcgtgttgccagatcagctgggttttcagctgttcgaacgaagtgaaacgaacacttcgttatgctgcgaatttctttgattcgccgttcaatgaattttggttggacttcttttgaagccacccaatttaaggcaatttgtgaatcactccacaaataggaatgttcaattgctcgacgcaattgagtttgtataaattttaagcctcggattccaataagaatggccatcagctccattcttggaatagtgagtgctttcgaagcgctctttggcttaaggcgattttttgagaaaatcagccaattttgaattttgtttgaactctccactcggagataaattgcagttgcaaatgtgtggatcgaagcatccacaaatgcatgcaattgaagggagcattcgccctttaccattgtccttcgtggaactcggattcgcttgtctttccaagaatcttggaaagcactccagcgagtcgagtcctcttctgagagggcatcatcccagcctttcttttcctcccataagctttggaagaaaagttttaaaggctggatgcatgggctcatcaatcccaaaggatcgaataaagaggccaaaaaacttaggacgagacgtcgattcactatctttaatgaatcgacagatgggaattcaaagacgatttcgtcttgatcaatgtcccaaataagtcccagcactttcactttagctttctcgagtcgatcctccggagggatggcttccatcacctccttggaatttgtaataaattcccgaaggttgaaacagccttctttaaggatagccttcgcttccttatattttgttaatgcttcctctggagtttcacactccatgagcgcattatccacgtatagcgattcggctaattccttagccaaaatcgaacgacaattttttagatgatattgtagagtagctgctaggatgaaaggtgaactgatcacaccaaatgcgactcggcagaatctgtatatgatcagattatccgacgaaagtggcttttccatgtctttgagccacaaaaacttagtgacttctctatcctctggttccaaggaaatctgcaagaaagcagcttggatatccgcgagaagaggaaatgcagggcatcggaatcgcaagagcattccgatgagatcaggtaaaagtaccggacctctgtacaaacagtcattcaaactgtttgtctcccttgtgtgagcactcgcatcgtaaacgacgcgtagttttttgcccttagccaacactccttgatgcggaatgtagtgctcaagagtgccaggcgcttccctggcctcttcaatgatgccttttgatagttggtcgtggattgtgttgttatattgttgtagaagttcaggagaatgtctgagcttattcaaagtcgacattaaccttgagaaggccattctgtaattggaaggaagatttggtgtctcttccttccacggccatttaactgaatatcgtccgccgttttcacgacggattgatttgtcaaacagctgtattgctgtttgatcatcatcttcgttagggtcttcctttatccctaatgattccaaattaaagaaatattcaatttctttagtagctggcatctgcttttgattggactcgtcaatggtcatcattgacaatcctggattttgaacttttggtccgaagtctgattctccattgactagagggcccagagttgtttgaatgacaaacaacccaggcaaaacttcctttttgctttggaaaaatttccaaaagtgtcgagcacttatcagaatctcaggctcgtcttcggagagggtcagagcttggaaaacatcctgctcttccgttataatcatttgagttccactccaccattttgaatggagtggaaatttgctcggttcgattgaggaggatttcctcccacttattgtcactccgttgaatttgaacggagtagacaggtgaatggaaccgtattggtccattcctttcaccaccgaaaccgtagacttccatctcttctgaagttactttatgtggcttcagtttttcgattaggcggtcagacatatatgatgtctggctcgctgggcaaaaagaaacatagctttgatcatccgccgagggtcacgacttgacctgaccctcaatcgtcgtgtcatcaaaaacgcatgtgacttctttgtcacaacgtttgttaaaacatttgttgttccgtcagaaattgctatttcagacggtttctcccttattcttaagggttcgtttgttgtcgaaaaatgattttgtgttggacgaggtggttctcgtatgttggaggactgtttcttttgaacagtccctcctttggtcgtatgtttaggagtgcttcctctcggagcgtctccctcagaatagcaaatcatgaagtggtgtttttcaccacattttgggcacctctttgatgagctgcattgtgcattgttgagaattgtgcccttgcataaggcaaaaaacatcgttgttgatctgcaagccgccttctgcgtgctccaggtgttggatattttggacacttgcttggtgcgtgtcccatgtcactacaaagagaacaaagtgggttcgttcctcgttctcgaggagaaaagtgtgtttgttccctctgattgacagtgttaaatgatctgtttatttggggagacatcatccccacagactcatttctgttattgggtcgccaatgaccctgacgaaattggttgggagggaaatttgttcctctcccttggaaattgttcctctgcatttgaggaggaaaatttcggggtttttcttccccacggaagacttgtgtacatctttgtacttcttccttcacttcaacaatggaagtgattgccttgcgtaggtcggaacaatcaaatgttccacctgaacgcatttccttctccaccacttgagtgaggagatggtatggcaatttggattttatcgtggaggccatgaacttattttgttcattttctccaaaatctgacaactgctgacaaatcctttcaatggactctgagaactgcctcagagattgaaccgaatctgacggttttgaaagatggagcaactctgattggagtgtctccacaattgacttctcatccccaaatcttttcttgaggatttctaccactcgcgggtagttttcatttgaaggcgggtacaaatcaattgctcttcgagcaactgacttctcgggaagacatcccaagagataaatgtgttttttgaagttttcaatttgaagactttcaactgaagtctcaaacagcttccaaaataaaggccattctcggggttcacccgaaaattttggaagcgaaatgggcggcaacatcacttcatgtcgctgcggagccacaaccacttgtggctgaatgttttgaacaggctgttggacctgtgcagggtgaacgacatcgtccccctgttctgagaggcctaaagccccatcaatggtgtcgacaagccctcgggcttggtcggccccatttcatgaag

SEQ ID NO: 453 - DNA, 4685 bp, Heterodera glycines
aaatctgacactgctgacaatcctttcaatggactctgagaactgcctcagagattgaaccgaatctgacggttttggaagatggagcaactctgattggagtgtctccacaattgacttctcatccccaaatcttttcttgaggatttctaccactcgcgggtagttttcatctgaaggcgggtacaaatcaattgctctacgagcaactgacttctcgggaagacatcccaagagataaatgtgttttttgaagtcttcaatttgaagactttcaactgaagtctcaaacaacttccaaaacaaaggccattctcagggctcacccgagaactttggaagggaaatgggcggcagcatcacttcatggcgctgcggagccacaacaacttgtggctgaatgttttgagcaggttgttgaacctgagcagggtgaacgacatcgtccccttgctctgagaggcctaaagccccatcaatggtatcgacaagccctcgggcttggtcggcccattccatgaaggcttttccttcaggtttgtagtccttgtagttctgctcttcctcctgaagagcatgacctttaactcggtggaagactgcctcccacttgtcattgtttttctccaacaatgacactgctctacagagattttgtctctctgcgagcaaatctgttttgatttcctcagtcaaatcttttgtcagattttcctgagccgtctcaatgtacaacttgagacgcttcacaatcggcgcgattgtgattcgcaagagttcactcatctcttacgaatgttggacaagctttattcaaagcttggacttctctcattgagggggtaagctacgactggagcttgacccctatggggctccaatttttgtcgcggaatggacaaaaaatcactggaaaggaaatctttccctctaagggaattctttcctttccctgtccgacggggacagtgttgaaaaaatgcaagtgatgatttcagtgcccaaatgtggacactgaaactgagagttctctttaaccctcttaatgacccaacgggggtcaatttaatggtctgtatgaaagggctcctgaatgtcccctttacagattgagagaagagcttttctcttactctttattcgattaaacaaatataattctgtgctgagcagaagaagtgaagagaatgaaaatggggcgggcttttataccctcacaaatcaatggggcggaggaaatcacgtgaacaaatgtgcatacaaaaaatcgatcgatggatgattcatagggaaaatgaatgaagggggaaaaggatgactcataatagaagcgaccgagagcaaattgatcgacaaattaatgaacaaaaaactaattaaatggtgaatgaattttatgtcgctttccgcgacaacaattattaaacttttgaacacagattttgtctacattgatttgtatgaattaatatttttttattttgatcaattatttttttaaaacttttttatgatatattgattttttaaatcttttaataggtaggtatttttctttatctttttccaacgctgtaaaaattctgttcatgttttttttcctattaaatttattccgaaataaaaattaccctcccccgttttcatttgcattgttttttacttgaatttgtttaattattgaaaaaaaacttttttatcaaaatttaaaaaaattatcgactacttatcaaaataaatatatttaagaaacctttttataattattaatgttaaacttttgcttgattaaatttcacaacttttaaccaattagtcattattctttttttaaaagcaaagattaaataataatttaggattttattattcaattcttttttgaatttccaacaaaccccttacaaaatatgtataatttgttttttcttttcttgctgaatcttggggttaaaaaataataatatttgtatttcaaaaaaaattttttttttaatgttgttcgcaattgtttatgttctattttttgtcattttactatttttatagaaaaataaatgattttatggaaattacgctggttgtaaaatttctatttttctgtgtaaatttgaaattataaattgattattttgttttatttagtttgaactataaattgactttatattccatatatttatttgatttttttttcaaaattaatgcataaaattatagaaaattgtttatatgtaagaatgtcattctattaaatttcttaatgttgactaaatgtttatatttttctttattttctcattaatattcccttgttgtctgctgcaggcgttttcccgttctgcgtgtttgagaccttttattattcttcaatagtttattttccattttaatgtcataatttaaaaaattaactcgccaaaatacgaaaaaactcataaatttttttcaaaaattaattttattacaccatatttgaaaatttatttgttcaatttatttttttaacagaatccatcgaaaacattattgtctttctggtctatagtaatttatataagttcatgtaattttattttaatgcatttggtaaaaacaactaatcaagtataagtaattacttaattgtctgatatttttcaaaatagaattaatataaggaaattcttttaaattactttttataaattcaaattttcaaaataaatattcgatttttaagtttcaaaaataatcactacaatttgcatttgcatttaatttaattttttaagaaattaattaatttaaacttggattttaatcatcaaataggtaggttagtttaatttttcaattaaaataatggtttttaattttaaatattacttgttattctacaaaatttaatttcatttgctggaattttaatttattaatatttgaattagattacataattcatcatttaaaaataaattaattttaaattccaactatagaagttttgaattaatttataggtctattaaataatttttataataaaaatttaaaaagttaatagaaatgtgattttttggcgttgcattctttttttttgaccttacatgaaatgaagttttagtgaaatactagcgtggtcagcgccttcggcgcatcccccgcaaggcagtacgattgtgttatagaattaagaatgataaaatcgactggctcggccgcttcgcggcctcgcatcattttcttggctttttctccaatctctgggactcaacccaccagcatttcaatctctgagactcaattctcaggctttccaatcgctgggactcaacccaccagcaattcaatctctgggactcaatctccggcattccaaacaatgggactcaaatctccggcattccaaacactgggactcaaaacaccaactttcaatgacattccaatctctgggactcaacccaccagcatttcaatctctgagctcaattctcaggctttccaatcgctgggactcaacccaccagcaattcaatctctgggactcaatctccggcattccaaacaatgggactcaaatctccggcattccaaacactgggactcaaaacaccaactttcaatgacattccaatctctgggactcaacccaccagcatttcaatccctgggactcaaatctccggccttccaaacaatgggactcaaatctccggcattctaaacactgggactcaacacaccaactttcaatgacattccaatctctgggactcaacccaccagcatttcaatccctgggactcaaatctccggcattctaaacactgggactcaaatctccggcattctaaacactgggactcaacccaccaactttcaatgacattccaaacgctgagactcaacccaccagcatttcaatctctgggactcgaatctccgacatttaaatttcgagtttagtcatcaaataggtaggtttgtttaatttatttaattatttttgcttgaatatttaaataaacgtctaaattaattttcatattgttttcaaccttgtagatttatccaaatattcaagaatttgttttcagacgtgaatgcttgctattatgagattttaaatatcaatttcaatcaattcaattaaaataatggtttttagttttaaatattacttgttattataccaatatttaatttagatattatatcaagcgttgaaatataattttttaaatcttgtttgctgcatgaggattatggtgaagagcaccattcgtttttgctttttatgctggactatttttttcgagaaagtaaactgttatgccggccgatggcaaacaaacaatcaatatttatttgagcagaaaggaaaagaagacacaaatttggggaggaacatttaaataacaaaagagggaaaataacacaaataaatgaactgaactgggagggtcaacatcgcgggtatttaaaggcctcttttctgctgatcacacatccggcacgccatggttcatctcccaagctggcgatcacattctctccaacggcgaagttttgcttcttaccacggccgtcttttctgaagaatttcttctctttcttctggagcactccgttcactttggctgtctcagttcggaactttgaggcagaacattcctgatggagtccgacaatcccagtct

SEQ ID NO: 454 - DNA, 5381 bp, Heterodera glycines
  unsure (1)..(5381): unsure at all n locations
tctgtccatcatgtccattccgagtaagttctttgatccgtctttggaaacaaagaaatgcccaaacgctgaatgttctccaaacgaaaatgcagcttttcctttgccaacaaatggacgtgttgtcccatcgtggtacagagcacgttcttcacaacggctcaatttcaaagctccgattttgcgcaccgtgtcctcatgaagaacagttccttcggtgccgaaatcagcaatgaattccactttggtgccattcacatcaatcggaacatcgatcattccattcttcctctggttttcgcccttaaccaggaaaatttttccaacgcggacgttgttcaccgctttttccttctttcctccattcttctttaaccatgcctggtgcttggcacacatcctttccaagtggccattcttcttgcactttcggcaaaccgtttcttggtgtcggcatttcctcgacgaatggttccaaccgcatcgccaacattcgcgttgcgatcgatttctgcgccgtgtccctgtcgaaatgatgctcgcattcgacgaatggtccgagttcttcctcttcttttggcccttcaattttgctgtcaacaaaagcttcgaaatgtgtggctgctccaatgccttggcttcggcgatggtcgacatgtagatcttcaggtcgtctaccacaccgtcatacttgacagtgtcaccatccgctgccaacttggccaaaattcgtgaccgtagagtagcattcttcggcgatttcaaagaaattagcaaaaccatacagttgaataacagcttcaccttcaactcgtcctgaaggttcggcgttgcacagtcaagaacgaacataaatcgcttgagccagtcctcaatttcacagccactatgctgactagcatcaaaacattccacgtccgggagtgttggcaattgtgaggcgttctgtgccggtggcgtgttttgctgttgagcagccaacaactgctgcaaaatatccgtcaatcgttggattgctgcgtctcccatttttgtcgttcaccactctattgctaacagcgcctagcttgttaacagtgggtgcgcgtggatgaactgaaaagtgtcgccaatacacaaaatcagcagcgcaaattttttactactaacagtgcctaactgttagcaggtccaacaaaaatgttgtttattatcgcctagataataaacaaatgcagtccagcagcgatgactcagcaaattcgattgctgttgacctctccatccaatcaagagtcctaagttcaatatttatttggagcagaaaggaaacgaagacacaaatttggggaggaatatttaaataacaaaagaaggaaaataacacaaataaatgaactgaactgggagggtcaacatcgcgggtatttatgagcggaaaaaggggcgtaacataccaagggaaaagggaaatacaataaagcaaagggtcaaaatgggtaccggccaattgggtcccaaccctaacataaacatcataattttcctttccattattatattaaaaacataattaatttgtaattttgcctttcttagcacactactaatttttgataaatttgtatacaaaattcatttttaaattaataaataaaattttttataaattcaaacaaatgattaaaatacgaattattcacctttcttcctttgactgaatcggtttggaatgaagcatgcctctgctgaatttttcttgggtttatataggtatggaaaaatttaataattttgaatattggtactttatttgctttaattaattatgctaaaagagatgaaatatatatattgtgagttcgattgagctgccataagcacctgagaatagagaacaaatgaattttgtaaattaatgcctttattttctcttatcaacgatgcgttttcacccgctttttgatgaaatttataattttattaaataagatatttgtttaataatttattcgttttgatatattatttttaaagtatattggtagaaaaaatatattttttcttttattgggttttgtcttatatttgtaaaacaaaattatttatgttattttgtttttatttttttaatattctcatgtcccaagtaatcgtaaacttggtcttgtacgacggcttcttttactttttgatgtacggcttcttttttcaatagttacatttttattttattttatattttgcaatcaatttttgaaaagtggaaaaatcaaagcaaatcaatgccataaaagggatttggatttcataattttttttcaaatgccaccaaagggtggccaaattgcatccctaacaatttcaaataagtaatttgtttttaaataattttactttttgatttatttttagtaaaaaaatttattatcaaatcccggaaataatttcaaaattaatcttttggagtgattgaaatgatttaatttgttttatataaataacttcgaaaatttacaaaattttcgtttttgttcactagaaaatgtatttctgttttattttttatttttacatttattttttacttttattattttaggtttgtaatatcgcttttttatttacttttaaactcatgttttttgactgcttacctggacaaacagttgaaaatcgcaatttttaataatttatgtaattttatatttatttttgatttaaggatttttaaattatcatcttaaaagttctcattcggtcactaaaatctgggtattatttataaaaaataaaatatatttttataattattttctatcaaaaatggttgtttcaaaaatgaattatagcagaattgttttttcccatatattaatattttaaaaataactgacaatttccgatcattttttttattatttttatttttgctttaatgattatttaaaaatttatttaagagtttattactttaaaaagtaataatttacgatgatttacaaatacaataaacatttttttatatcactttttgttcaatttttcacgttctgttaactctgatgaacagtggaaaaatcgaaacaaatcaataccagaaaagaatttcataaattttgttttttgtccaataaaatagttattgtatgtatttaaattcgaaatcctccttataaatggtacaaatttttgagaaaccctttcaaaattaaaaaaaatttcagattataattaggtacttttccaattttacgggtaaatcagtaaaataaccgaatttgagtatggactttgaaataaaagcgaataaatctgaatgaaacttcataagaaaagcattttatttttatttgacaaaaatttaaattgcccaaggcaaattattttttcttacaataaaaagatagcccaacaaataataagcttattttaattaaattaaccaatttaaattttaaaataataataataattattagacaacaacaaaaaaaaaaaagaaaaattcaataaattctataaaaaactcaaaaaaaagatttaaatataaaaatcagttaaagttaaattcatcaattgaatggagctaattttaatcttcctcgatgatgagtaccggacatgaatttaaatttcttaatcaattattttcatgaaattgctaccaaaaacaacaataaataatattattacaaaaaatggcatcgaacaggaaaaccaaaattcaaaaacaaaaacgagagaataatgccaaaaaagcaaataaaatgaaatttggcaattatttttattagcttaagtttaaatataaattatttaatcaaaatgaaaaagaggaataacaaaatcaaaatttgtgttagatatttactaattaaaaaaaatattttttaaaagttgaaatagtcagacatatccttaaaaaaacaatcaaatgaagaattgcatataataaaataatttaaaatgcatttactataatttataatatttcattccaataaattagcaatttaattaaatacaattaatacgggttatttacttaattcaatattaaaaaataaattatcccgaaaaacaaaatggcaattaaaaataaaagcaattttataaaaaactgaaaaaatatagtaataatattttatatttcttatttgtttctttgtataccaatatcaaaaactagatataaagacaaaaatttaaaatagcttcattaaattaaaatacttatgagctataataaaattaaattatattaaaatattaattacatatacagaaaaatataaaacatgaaaaaaattaaatgcgctaaaaaatcctagttttggtaattttatcataagcacaatatatttaaaaaactgtactattaacagaaataaaataaaaacggtataatgaaagaaatcattatcaattgttcttcctaaatggcgaattcatccctttgacaacggaaaaggaagttcagccatgaattaattaaaagaagagaaaaaataataaaattattaaacaattacaaataagcaatgcaatgaaaaataatattttgtataaaataaaataaaatgcaataaataaatattcaaagtaacaaaattatgaataaaaatggaagcaaaatattatcaaacaaacaaaaaatagtaaatataaaataaataaatttatactgaaaaaataattaaattattaaacataattattatatttttgaagttactttgaaaataaatatgaaaatgtgatcattgtttcgcatgtaaataccttttataatagattttatttaagaggatatgtattttaaatatcatcttctatttttttttttgattttgtgaaattctctaaatttaaaacaactttttaaaatatttaaaactaaccaaaattggtaatatcgtaaaattgatgtacataaaaataaaaacatataacaaaaatcaaaaaattcaaaatgaaaaataatctgataaaaagattaaatattgtctgaataagatataaagaaaaatttaattaaatggaaaattcattggcaccaaaccagagttgccacccgaatcccgaaactcgaattccgacatttttctcgacccgaaacccgaatcctaaccagatgcttctgctgggtcgtgattcgggacaaaataagaatgtatattaaaatttttgtgaaacaattgtgttcaattaaatcaattattatctgngctcgtaatgtgatttagttttattatcatgttgtctcgtctatcttttattcatttctttgtgctttaaaaattattttttagatcacatagaaattttaataataatttatgaatttctttaattgaaatttttttcaaataaatacttagttttatttgcacaaaaat

SEQ ID NO: 455 - DNA, 864 bp, Heterodera glycines
caagtgtccgtttggggtactcaaacaactatggggagcaaaaatccaacgcagaattaaagtacaggctatagggaaggtattcccgaaggattcggtctccccataaatctgggcgcatcggttcagggtactgccccgaaatccaaaaaaaaattttttttggataaaaattatttaaatgaactgactagataatatttaaaataggttatttctcttcctttcagtatccctgctaagtttggtgcgcttctgatcagtttctgaaaagaaagttaagcctaaactttttggcctgtttaaaaaggaattaaaaattttttaaaatttattcatctccctttttgatagaaaaagcatcagagtgcctaaactaacatgtaaataaaatttggtgcgtttcagagcattttctgaaaaaaaatatttatgaattaataccacaccagcattatttttttttaattatttttttcattttatcacccaacgttctagactgatcagaagctcaccaaattttgcagggaaactgctgagaacccttcaaatgcttataaattttcttagaattttttgcctggaggaacacaacaccacccgaatcccgaaactcgaattccgacatttttctcgacccgaaacccgaatcctaaccagatgcttctgctgggtcgtgattcgggacaaaataagaatgtatattaaaatttttgtgaaacaattgtgttaaataaatcaattattatctgggctcgtaatgtgttgatttatcatcattttgctgatttcaagaagtctatgtgattttttttttgataatgatttgtgatttttgagaaaatttgctgatttttgttg

SEQ ID NO: 456 - DNA, 1069 bp, Heterodera glycines
tgtttgaggatgtctggctataacatagacttaatgtacctttatccaaacaaggtgcagaaaaaagtaaaatatttgattaaaacattttcatcctatttattcaacgctctagatataaaaaagattatttgttaacaaaaactaggaatatcagccttttaagtgatatggaaaagtttgctagtagtgaaaacagtggaatataaaaaaattatcgtaattttaagcaaaaaattaaagatgagcccaggggcataattgagaaaaattgaaatgttgaggggatttaagcaacaacgtgtaaatgttatgaatgataattaaccacattgcatgcgattaaacactgtggagtaattagagttatttttttaaatgtctttctaaattttgactatttaatataccggcaaaaggaataacaaatttgaagatatcaaatttgtttgaggatgctggctataacatagacttaatgtaactgctccaaaacaaggtgcagaaaaaagtaaaatatttgattaaaacattttcatcctatttattcaacgctctagatataaaaaagattatttgttaacaaaaactaggaatatcagccttttaagtgatatggaaaagtttgctagtattgaaaacagtggaatataaaaaaattatcgtaattttaagcaaaaaattaaagatgagcccaggggcataaaagaaaaattgaaatgttgaggggatttaagcaacaacgtgataatgttatgaatgataattaaccacattgcatgcgattaaacactgtggagtaattagagttatttttttaaatgtctttctaaattttgactatttaatataccggcaaaaggaataacaaatttgaagatatcaaatttgtttgaggatgctggctataacatagacttaatgtaactgctccaaaacaaggtgcagaaaaaagtaaaatatttgattaaaaccattttcatcctatttatttcaacgctctagaaataaaaaaaattattttgttaacaaaaactaaagaatacacccttttaagtggatatggaaa

SEQ ID NO: 457 - DNA, 7699 bp, Heterodera glycines
aatttgaagatatcaaatttgtttgaggatgctggctataccatagacttaatgtacttgctccaaaacaaggtgcagaaaaaagtaaaatattgattaaacccattttcatcctatttattcactgatgcggagacgaaaaaattgctctagatataaaaaagattatttgttaacaaaaactaggaatatcagccttttaagtgatatggaaaagtttgctagtattgaaaacagtggaatataaaaaaattatcgtaattttaagcaaaaaattaaagatgagcccaggggcataattgagaaaaattgaaatgttgagggggtttaagcaacaacgtgttaatgttatgaatgataattaaccacattgcatacgattaaacactgtggagtaattagagttatttttttaaatgtctttctaaattttgactatttaatatacaggcaaaaggaataaaaaatttgaagatatcaaatttgtttgaggatgctggctataacatagacttaatgtaactgctccaaaacaaggtgcagaaaaaagtaaaatatttgattaaaacattttcatcctatttattcaacgctctagatataaaaaagattatttgttaacaaaaactaggaatatcagccttttaagtgatatggaaaagtttgctagtattgaaaacagtggaatataaaaaaattatcgtaattttaagcaaaaaattaaagatgagcccaggggcataattgagaaaaattgaaatgttgaggggatttaagcaacaacgtgataatgttatgaatgataattaaccacattgcatgcgattaaacactgtggagtaattagagttatttttttaaatgtctttctaaattttgactatttaatataccggcaaaaggaataacaaatttgaagatatcaaatttgtttgaggatgctggctataacatagacttaatgtaactgctccaaaacaaggtgcagaaaaaagtaaaatatttgattaaaacattttcatcctatttattcaacgctctagatataaaaaagattatttgttaacaaaaactaggaatatcagccttttaagtgatatggaaaagtttgctagtattgaaaacagtggaatataaaaaaattatcgtaattttaagcaaaaaattaaagatgagcccaggggcataattgagaaaaattgaaatgttgaggggatttaagcaacaacgtgataatgttatgaatgataattaaccacattgcatgcgattaaacactgtggagtaattagagttatttttttaaatgtctttctaaattttgactatttaatataccggcaaaaggaataacaaatttgaagatatcaaatttgtttgaggatgctggctataacatagacttaatgtaactgctccaaaacaaggtgcagaaaaaagtaaaatatttgattaaaacattttcatcctatttattcaacgctctagatataaaaaagattatttgttaacaaaaactaggaatatcagccttttaagtgatatggaaaagtttgctagtattgaaaacagtggaatataaaaaaattatcgtaattttaagcaaaaaattaaagatgagcccaggggcataattgagaaaaattgaaatgttgaggggatttaagcaacaacgtgataatgttatgaatgataattaaccacattgcatgcgattaaacactgtggagtaattagagttatttttttaaatgtctttctaaattttgactatttaatataccggcaaaaggaataacaaatttgaagatatcaaatttgtttgaggatgctggctataacatagacttaatcctttctcgttcgggtcgaccagcggcggaggcgtgaattgtgcgttgccatgatcttctccctcttcaccataaaggaatttgcacgaaatatttttcaaaccggtaaacttttcttttctacgatcggcacatttttcggcattttttatgacgtcacaaaaccatgcaatgtttgtgtaattcggaatctcatcttaattttgtgctttttgtgtatgaaaactttttacaaattttttgttaggctaacattgctgggcctcggctgttagttttagtttaattttacccgtttattattattatttattattattccccgccccatttgatgggccgtgccggctgaccggttgtgcagatgcttgtcacacaatacttcgcgcccttttgtgggcactttggatccgtgttgttaaatttttgaccatttggcttgatttctgctccttgttggcagttcagacctttcaatttaattaattaataattgctaaaaacattttagcaattacggtaactgtccctatacaacgacaaaaagcgatattccgattttttttcttgtccaaggtttttcacaaatttttaaatcaaaatttcataccgttgagacaatcggtcgtgtagacgaagaagatgaaaagcggcagaaacaatggcagagactggtgcattttggaagtttttgaaaatacaaatatttaaaaagaatgctttttcgttttattttgttcacttttcttttatttttggttaataaagtgattccgccaattctaaaaccgagtggagaaaaatgtgatgcgatgggatggatggtgctgagtcagtgggaatgcatttaataaattttattatcataattggtgatttatagggatgctaattttatgtaaatacatttttttcctagattctccataacctaattagtaggaaaatcactttcttttttgtgtttgcgaacaaaagttgagacttttatttacatattttcggatttttctacatattacatatgtgagtcgggggcgtttgggccccagtttttgggcccccgcgtttgggcccccgcgtttgggccctcgtttttgggccccagggtcgtttgggccccaagtacagaaaaatgaaatcacagtaaaaacaactttttaaatttcagcataaaaatgtaaaataaacagtttaaaaataaattcaacaataattttaacaataaaaaatgtaaaaattaacagaaattcacgggttcattcgatagttgcgagaaattccccggagaaactccaaaataatgtgaaattgattgcgattgtggtaattgtgatcatggttgatgttgcctgcattcatcgggacgtaaaggcgcaccaaattaagaattcgttcatctgtcgccaaaaactttcgcttttttggtggtggctcctctccggcaatgaatgacgcgtatttgacgtctgttgtcttctgctcacgacgtagcacgtcaatgaagtgaaaaatcgacgggtgtcggcaattgaaggcgccctgtaaacgatgatgctcttgtataaatttgataaaaaagtggcggcgccaatgaaaaggtcccgtcaccgaagcaagcttccattcgatctgcccaccggccaaatgactcgcgtccgaacaacaaaattctataacaaaagaaaaataagaaaataattgtcattttacctctgtgggttctcatttcctcgttcataatatacgccgctgtctcctaacaggaactgttcatcgatgccgtccgtcggtgtgtacgtctgatacgccgggctgattataagctgctcaagatttgcaggaacgacgggggggggcattcacttctcggcgagctcttttgattaactaaattggaattgtttttattatatgaaaaatattttgttttcacatcttttgctgcttgttttgacaccaaaattgccgacggagacgggacattttgaagcgcttctgctctgatgacagaaggcggttcgaaggtggcaattgcgcgccttttgattgcggtcgtgaccatttgagcatcaacacgtgacgcatctgctggacatgtgtgcggagttgcgaggcgaatgaattggtcgtggaggtccgtccagattcggccgttgcatttgtcggtgctgtttttgaactcgcatctccaaaattttgtcatcccatcagaactcattttagcaaagtgtaaaggtggccttcgtaagacaattttactttttgttttttggttgcaattgggttagccatttctgaaaaatgtccaaatcagaatgtacatcaaattggttaactattaaaaaataataggatttggaataagtaaaattgtaaaaaatgagcgagtgttaattaaacctaacttatgccaagtggcgaggcatccctcaggcttagtttttagaatcttaattttaaaaaaagcacattttccgatttttgggttggggcccaaacgaccccggggcccaaaaacgggggcccaaacgaccccggggcccaaaaacgggggcccaaacgcgggggcccaaaaacgggggcccaaacgctctggtccctgcctattaacctgcaaagtttcaaaaaatttagctgagaaacaaaaaagttatggccaaaagaactcaaaaaattgcattttcctggccattttggcgcagcgcgccatatcttttttaaaacctaatataattttttgaaattttgcaggctaataaagaacatttagacctattgattaatatcaacattattttatttggtcgaattaaaaaaaagttatgaatctttaaacttgtctgcgccaaaatggcctgcgccaaaatgaccccgaccctatattgtggttgcctgtattcaatttttgcacatttattatcaggtttattacacacattgaacaatgaatacaaacactgtacaaacacacaaataacgaatatgaagcagcacattaatggatattacacatacatacatattttgatcacattaggaaggtcgctgatcacatggaatatgtacaaaatatggggaacggacttcacacaaacaacagcaagcagtaggggggactgatcgtgaagggtgaggtcgtgcaccgtcgtcgttctcatcgctggctattcgtccgcttgggtcgtctccgctgtgctctgttctccggcgttagcggctggctcggcggcgtccttcttcttgtcctttttgtccttcttcccgtgcttgtccttcttggaacggcggttgctgtcgtcgctcttcccctcctttgatttgtgtttgtccttgcgcttctcctccttcttgtccgccgcagctgcgccgtcgcctttcttgtccttcttctttgccttctcctctgcgtcgccgccggtcgtggcttcttccttcttgggcgcttctttgtcgtcttcgctcttcggtttctccatgtacgtcttcgcgaagcactgaaaatttgaaaaaattttgtttgagatgtaaaatttggaccgaaaaacaacaaaaaaaaacttacgattcccgccccgaaggctgcagcgccgacgagaaagtgagaagtcattgtgttgttgttgggcgcactgaagtcgttcgttcgttgattgggtgttgtgtcagcagcaagtgtgcaaatggacgaaaattcccccttttatattcattttctgttgcactttttttcagtgggaaatttgaatataaaaaggcgtgaaattgagagaaatttcattctcgtcacattcttaattctattctctgcactattacatctgattgctgctgctcaccgactccatcgacaacgacacgcgatggaagaactcgtggcgctctcccctggaatccgcgtcggccgctggacgatcacaaagaagctgggcgccggagcattcggagccgtctacctgtgcgtgaacgaccaaggagagcaggccgcgctgaagacggagccggtcaacacgccacatccgctgctcgtcatggaggtaggcgggggaggaggggcggaaaattggcaattcaatttaaatttttttttcaccacccaggctcacgtgatgaccaagctggacgcccttcgagacggagacgggaagcacttctgccgctgcttggacctcgggcgcgatgagcaaagggaccaacaatcgggacaaatgaagaagttcaactacatcgtcatgtcactcgtcggtcgtggcctggacggagtcgtcaaggatgccggtggccgcctcagccttggaagcgcagtcggcgtctcgatccagatgctcgccgctctcagaggactccacaccgtcggctacctccaccgcgacatcaagccgggcaactcgaccatcggacgtccggaatcaaacgaaatccgcctgctctacctgatcgacttcggaatggcgcgcaaatacaccagggacgacgtgagtttgagtgaagcgctttgaaaaaacaaaaataatttgttccctttcccccctttttcaggggagccaacaccgcccgcgcgctgtcaccaacttccgcggaagcccccgttacgctgcgatcagcgctcatctcggacgcgaatacagccgcaaggacgacatcgaatcgtggttctactgcatgatcgagctcttaaaaggcgcacttccatgggccaacgtgggggaaatgaaagcggtgagcgaatggggggggagggataatcagaattctgatttcattgtttcttttttacagataggcgaggcaaagatcaaacgccagaagaaacaaccggaagccgttcgacgccaggcaatcgccgacttgctctccggatgcccgaacgagttcggccaggtcctcaaatacatcgtgagttcgttcgttcgttttttccaaaattaataaactaacaaattaaattttgcaggacgacatgaagtacaccgacaagcccgactacgactggatcatcgcgacattgcgcagcagcctcagcaacgccggcgtccaggaattcccctacgactgggagacgggcaagcgcaacgcggcaccgggcgctggaggcggcggaggaggagggggaggagacagctacttcaactgatgagccgtgcagcagcagcagcagcagaagaatcgccaagaagcgtcaccgtgctgaattgatcatatgaccactattactgtattgtatgtattattttgtgtccatgctgccatccccgatatacacatgtattgtattgttgacatatgtattgattgaaattgttgttgcataactgtgtttgtacatatgacttttggcgaaataaaggacattttgtatgtttcctcaagttcattttctcgaaaatatatgtagcataggtattttgatcctacttataggagaataagaccatttaaaaagtgaatggggaggaaaaacggagcaaatccaaatcgaaatgggcaataaaaatgccaatgattgcacaaattagggatttcgatcgaaatttctaaatgagcaaaaaatttttctgttctaaaaagtcgtgaaaacacgttttatggggtttttagggtcgctggtcacaaatctaacattcattttgatcaagttcgaatcccggacccgaatttgaacaaaaagtcgaaaactccaaattttcgaaattcttacttttgttcctaaattgatctaaataagctaaatttagtcaaaaaccattgaaacatcaaaaaatggtcattctgtacaggtacgaacataaaacctattttgaaaattttgagttttcgactttttgttcgaattcgggtccaggatt

SEQ ID NO: 458 - DNA, 863 bp, Heterodera glycines
aaaaaaaaaatttccaaaaaggggggggactatcggtagtattccttaatttcttttaatcgttttttacgtttattcgatcaaaatgtattaaaatattttatatttttgcttcccattatagattttaacaatcaaaattatgaggaaacgtggcatttaaaaatttattgctcgatacatcacatatatacaatatacatacaataattgggggtcggggtcacttcggcgcggaccatttctgcgccgcaaattttgaaatgctataacttttttatttgtcagtcaactttagccattctggcatcatttgaaagctctatgtgtgctctatatttacatgccaaaatagaaattaatgattcaacaataaaaaagttatggcacgcggcgccgaaaaagccaagaaaaagtcaatttttgagataaaaaaacatttaaaccatattttagactaaaaatgcgatatcgaaaaatctgaattttcgactttggttcgatagcgctttacaaagatgttgaacgagttggaattgatgctgacatatttttgtggtggaaggaaaacggacttcgctttcctgagttggcaaaaattgctcaaattgtgcattcaaattatgaaaatgaaatgattaatgatgattaaaaatattgagtcattttacctgaataaaatttaaaaaattaaccttaaatagcgaaaagaaaaaattgaaaaaccccgaccccgaaccccgaacgatttggcaaccccgaccccgaaccccgacacttccaaccccgaacccgaattttcaaaccccgacgtcggggacgcaaccctaatcgaaactattacgaaaattaatttacaatta

SEQ ID NO: 459 - DNA, 3612 bp, Heterodera glycines
aaagagaggggttgtggcccgtgtgagtctcgatatataatagccctaacatacaatacaacacatgggaccaagtggaaaaacgggggggggggtccaacaattctccacagtgtacggatcgccgccaaagtgaccacgctgtttgcccgaggctacttgtgctgcttttgccctcctccttcgtcatttcgtcaccttcggcatcgctcttcgcttcccttctctctgctgctgtcctcatcattctccaatggacttgacgatgatccttcacgcccctcgccccgcccgttttctctcttccccccttccgttcgtccgtcactctctcatcgccaatttgtcactccccaaacattgcgtcgtctttcgttgtcaatttatttgtccatctcatgccaattcatgcgcattcgtccattttcggatggaatacataaatcactgcttttataagtgatttaaaatagcaaatttgtatgcattttctctccacttttactcattttcatcagtaaaaacccaactcgtactgggatggatttcagataatttcggtttttcacattttatgagttgagggtttcgtccattttcactatgagaagagaaataaccgaagttgcgaaaaaacaagtcaattggcgaagaaaaagaaaagaaagccgaaaaaacagagagagagaaggaaattttgcgattatttgccaagaaaatggaaaagcgccgtttgaggctaacaaatggcatggcattcagttgcccgattctgttcacttcctcctaataattggttgttttcgttgtgccacccattcgtcgccattgctaatgcttttgggaccaaattaaaggatttgctgatccatgcccaccccccgcccctccccaatgacggattattacacttaatcctacgcccactctccgttaattaccataaccctgcgtcttcgtcccgccttcgttaccataaccctcctcagtttcacaccgccaattcgttaccataatcctccgtcttcgcctaatttttccgtctttttaattagacaaagtgaataaaataaatagaaaaagataagcgatagaaagctaaatacaggatataaaaaacttttcaaaagtaaaaaacactcccctaaaatggatgttttcaaaaattaaaaaattcatttaaaattatcaaaaattatattttaaaaaatcaaatttccatttaaatcctacttactttggcagattttaggtccgaaaacatcgcccttctcataaaatatcttttttatgtcttaaacaatttgaatgattttctaaaaaatgagaataaaattgaaaataaacaaaatgtcagaaaaaaacttgcatgaggaaaaattgatgaaagcatcacaatgaaatcagtcactaatccttccaatcgctggcggacaattgacacctctgggaaattgccttgagggcaaaatgaccaccggcggaggaaatccgccgaaaatgccggggggggggaggaaaaagtgacgaaaagaaagaaagagagaaacggaaaccgattccatcgaaacatttgcaatttgatttgcgtgtgatttttggggtttttttttgtaatctccagtgatcactgattgagcaactgatcaccaaccattgatatcactatcaccgacaaattctcattattagtcatcactgatcaaatgggaaatcaatcactacgacagagaaatagaaaatgcaaataattaaatattaacgaatttgattaaattgtaattttataacgaaataaacaaattcgccacacggcgaacttatcgaaaagtaattcataagcacatggaagggtgatctgctgataggttttcttttcatttagcattttcttaccttttgtcttttgccagtttttcctcctttctctgactgtaagtcgcccatttttcccccgggggaacgttcggtcgtttcttttctctccgcccctccggcgcccaattgggcggttcattcgcatttgcgtttctttctccccttatattattactagtattaagagacaataaatgatttttaagttgaccaaaaatgcatctgctttaatctcgaaggttgatcccaaagatggcattaaatttttgaaatttaacatcgaaatggccatttaccatccctcattcttcttgaccattcctctcaaattttcttaattctcgtcctcctctctctctttctctctccccagtctccccttatctctctcccctctctccctttccctttatctttccaattctctttccccactctttcccccttctctctctttctctctctgctctctctttctccctcccttcgtctccccttatttctttccccttcatctatcctctctcgctccctctgtcactcccgctctctctaactcatccaatcaaatcaaccacaaaaataaatttcctggcccatgccgcgccaagccgcttaactgctgtggacggaagatcccttcccattctgattgttgggattgcatttgctccccttttatcattccgcgcatccaatcagtcctttgaaggctacacggggcaatccttctgtttttctattttcaattcaaatatttttgtcggtgtcgttaataaagcgataataaaatgtgtcttttttcccaattttaaaatttgtgcatttattcgttctaatccatcgtacgcttaaataatcattgaacttttttggcacttttagtgccataaatgctactgccaccaccgtttttcagtttgcagatggtcgatgaaagtgccgccccgtccttcgttcctccgaatgactgtccgcttccgtccgtgctcaactcctccgctttgtctctgccgttgctgtccggccacgcgtcctttcctccggcgtattccgcgcattcactcgcccccgcccacggtcagtagctgcccccgctgcacggcacgtgtccgaatgccttttcagcgttccattcgcccttcggatactttccgtcctcgcgcgccgacccttcgccgtcgtcgtcacactttaattaccatcattatgccaatccgtcctcgtcctccgcctcctcttccaatgctaatgccaaccttagtcccttcgcttctttggcttgggtggcttcggtcgctgcgaatggcctttcgaccgttggggagggcagcagagggaggaggacgacgagaagcaacgattgcagaaaatggttgcaaaattcgagttgcagagatttttcggaaacaaagcgactttcagtgacagcgacgaacgccccctttccaccgccgccgcttcagtcccatcggttagcggaaacagcgaattgagcagaaggggacgccgggaaaggacgacgtacagcaaggtgaaacgcggaacggatggaggcaggggggggggcaatggtcaaatggaccaatctaagacattcccccgcccattagtgattggatggaaaagcacatggcccaaaggcactaaaagtgtaaggggatagagagagagaggggtagacaagcagaaaagcaattggaagggatgagagagagagggagaaggaaaggg

SEQ ID NO: 460 - DNA, 1102 bp, Heterodera glycines
agaaggagtgagatatagacggtaagagagggagagagagagagaggggtagacaaggaggtgatcaattggaagggatgagagagagagagggagaaggaaagggggagagaggggggggggggggcttggtcacttgcttgacattttaaaaagaggaaaagtgcaatttgaatagaaaaatatttttgacataatgcccgtccgggtagcaattgtcggactgtctttaataaaagtgccgcatttaatggaagtaatggtatgacaattcctgaaactattacaatacaggaacagctgaagattctcgaagagattttcaaaaagacgacggtatggccttaactttgctcatgtcgcggcatttcccttgctacccaagcaatatccggacgtgaacatgcgcgaggcattggcgacgcggattcagctgcctgaaagtcgcattcaggtgggaatgggactgaatcagcagatagtctcaatgttcaggtctggttcaagaacagacgtgccaaatttcggtgtgccattcccaagaaatcgaatagcaatcgaattgtttagtgccaataaaaaaagcgaggaaattgcgcacaaaattcatcagttggcatcggcgaagttcccctcgggcaatgccaatgattcgccgcccccggccgaaccgacggtggccaaaaatgagtcgctgaagagggcacagatggaaacagcaataacattgagcaccgcctcgggggaacagccggcatcggaagcggaggaagcgaaaatggcggagccaacagcggacgatttcggcacaatgttcgccccttccgcactcaaattggagcctcaaactacccatgccatcgcctcagcctccctccccgtttcggtggacagaacaacgatggcatctactctttgggatggcaatggactggcagcggtggagtcgacgaatcatttaacgacgggcggagcaaacggaacggcgatggattggttggcagcggcacaatggcacaaacaacagcagcagcagaatactcaataccagctctcggtaaaagtcaatggcaaaacacaaagtttaaagtagaaccggacg

SEQ ID NO: 461 - DNA, 8152 bp, Heterodera glycines
  unsure (1)..(8152): unsure at all n locations
ccaatcatgatgccttnttcgacgttcactcgagctgaaatcaattttggttttcccaattccacccnccaaacaatcaaaagcaattgtccccaattgcagtggggcatcatttttacgccattaatttagtctctttgtaggcgtttttttttcccttaggcaaagttgagatgtccggtatcccttttgggactttgaccaatcgttcaatgggcacttttattggttcatctttttgcttatcaattggtacaactttagctgaagattcgccaatttcaagtattaagaatggaccgaaatttgaccaaatgagttttttatgtggattccggcggtggagcccgggaaaaatgaccattacgcgatctccgactttaaatttgttggctgttacgcgtggttgagagtcaaaccataatttattttgtttgcgcgcttctaaagcatttttgtttgcttgttcaagcatatttagaaggttttctctaaacagctgaatgtatttgtccgaatccaccgtataagcgggatttacggaaaaaggtacgttttgatcaaggggaaagcgcgcaatccttccaaacatgagagcaaaaggtgaaaatcctgtggtatttgaaggtgtgatgttatatgaaaaagtagcataagctaatcgttcgtcccacgtccaattgcttgcagttgacctttttaaaattccaattaaaattcggttgacacgttcagcaagaccatttgcctgcgggtcataccctgccgtaaatgacctttttatgctcaacatttttgatatttcttccatggttgaattcaaaaattctttccctctgtccgaatggaccttttttggcgtaccataaaccaagatgaacttttcgacaaaaattttggccactgaacctgcagatttatccggaattggttctgcgaccaaatattttgtgaaatgatccacaattacacaaatatattttttatttgaatgacttggccccacatctaagatgtccatacagatcaactccaatggttcggttgatttaacgacatttaatggcggctcattagcacgcggatttcgagtgtgcgcacaaattcgacatttttcgtgtgctttgacgcagtcggcaagcatattgggccagaaatattgttcggaaagttgtttacacaacttttttccactcatatggccagcacagtttccttcgtgatgagctttgactaattcctcacgaaactttttgggcacgaacaatctcatattgcttccactttcaaacagatacaaaagcccactgatgaccgaatatttatgacacttatcaaaaatgctttgctgttccctggggtccttcggtataatcctacgttctaggaaatcataaagtgcacccatttcgcttaatttggtttcttcgacccaaccctgataattgtgcgccaattcgtcccaatttggctcaatttctcggatttgtccgataattgcgatctcttcgtcattttgacagatttcaggggtttttggtgaagcaaacgagcgcgataagacatcggctattatattctttttaccgggttggtattcgactttcaagtgaaatctcgaatttaattcaagaagccaccggtccacgcgcgcatttcctgtttcgttttttcttttaaacatccaaattaatgctttgtggtctgtgatgactcgtgttggaatcattgttacaaactgtgcaaattttttgacaccgaaacgaactgcgagtgcctcaagttctgtggctgaatagcgtgcttcgtgctcgttgcattgccttgaggcaaaataaattggtctaacattattatcaaaatccggctggcttaaaatagcggaaatccctgccttactcgcatcagtcataataatgaactgccgatttgggtcgttttgtgcggcctcgaaatcaggaaaatacaatactacgtcctcaagaattttggttttcaaaatctctatgatttccttttccttctctccaatttcgaatttgactttttcgctcaacattttgaacagcggtgctgcaattgtaccaaatgaatgtatgaattttcggtaataagtaaggaatccaagtaaggaatggagctcctttttgttgctcggaataggtaaatcagttactggcttaaccttttcgatgtccatttttatgccttctcgggtgagaatgtgtcccaagaatggaagctcatctgcgcaaaaccggcacttggacaatttcagtttcagtcctgcgtcttttattctgctaaagacgataccaagatgctgcaaatgctcttcaaatgtttcagaagcgaccaaaatgtcatcaatgtagatgaacacaaaatcattgatcactccttcaaaaaggcgtgtcataaatcgttggaaagtggcgacggcgttagttaagccaaacggcataacaatgaactcaaaaaggccatgttcggttgtaaaggcagtcttttcaacggattctttatccatttttatttgccagtacccggtcatgaaatccatggtactgaaaaactttttaccacctaacattaacagggtattgtcaatgtttggtaagggaaaactgtcctttcgtgttactgaattgaccgaacggtagtccacacaaaatcgaagggacccgtctcgctttggaactatcacgatgggactggcccatggtgaaattgacggttgaataacacctcttcccaaataatcttggatcatttctgcaatcttttcacggtaagcatatggcaccggtctcattttgagtttaattggtgccgcatctcctgtttcaattcggtgttcaaccaaattcgtctgcgtcaattcattgtcaactaccgcaaaaatctcagtgaaatctttgctgagtgtccttaacctggctagttcattttcagaaagcatgccagttttttctttccataaatcccatattttcagattgggatttagctcaatggaatccaactgtttgcataatgacgatactattaggggatttgccaaaatgtcgtcactttcaccgatttccgtaattgactcgaattgaccaattttttgttttccttccaaagtaattgtggtcatggacaaatttgtaattggggcgataacttttcctcctttaacttttcctatagtaggctcgatgtgcaacttatcggtttgaacggaactgatcaaaatttcagaatcattgtgattttgatcaatttcgaattcgacaatttttgttgaacgtggctcaattacggtacggtatattacagtgagaaaattttgtgctttcgctttcgcttcgaacttttcgaattcaaccatttcgtcgttcagattgtcatataatttaaagccaagttttgccaaaccgttcgtacctatcagtaaatcgaatccaatcggggcttttgttacgtgcgcaataatgttggttggaaatttaagcccgcgacggcataacggcaacttcactgagaaaaggcaagaaaggtgcttgccatttacgtctaaaacacgtgcaagtgatttcgaaggcttaagcgtgcccaaatcgactttttcctcctttagtaatttgtaaaggaaatatgcgctaataagggaaatttgagcgccaccgtctaacattgcttcggtttcctgtccaaataattgcacttttaccgccatcactttaccaattgcaggaactgtctcatcctgacaattttccatattctcaagaatattgtcaaaaaaatatccatttctggggcaaactcaattttactcagacaaacatttggttggatttcttcttgttgggtgatgcaatgctgttttagataattcgatgaattaggcttagtgctatttgcattacgatttgctggcgttcctgccgcatggttactgttggtcccaaaatttgggttattcctgtccgatggaattggccagtttttttgaaactgtttaggcttttggcaatttctagaaatgtgtccaaaatcgccacagttatagcattgccaattttggctggaaaaatgctgttctgatctgggtgtaaaatttggctggttgtcagaattcgcagggaagcgatttgcgaaaaatctttgccttccatagttagaatattcttgcttagtcttttcccttcgactataggacgatgacgcataacgcattgcggcgcgctgagttgactctgccctagcagctaatgagacgaaatggtctaaagtcatgcctggcattctaaccagctccaaattcaaggctagctcggggttatccattgcacgaatgagaaatttaattgagtattcatcagacaaattactggtcaatcccgggtatgcacttctgactaatgttgaaattctgttggctaagtcatcgatcccttcgttgggctttctgcatacgcccatcatcaattcgtcgaacgcattcagatttctcgaatctgtttcttccatttgttgaagcatttctctcctaatgcattcataacgaaatggttgtgttgacaaagcagcttctaaggctctctcagctttttcatatactttgctttgaagtgccgaaatacgggttttttcgggccatccttcggtgtatacatcaaactttttgaaaaattttcgaactttatccattccctcttttccagtaagatcgggaattctttccagtaccaaatttaattcgagattgcttggaacagtcgtatcagttttcgaatggccaaaaatcgggttaggccgctgcgtttgattgacaattgcacctccccgattttgaggaaggtttggaagtgtttccacgcgcacttggttatttctttcgaaaaacattggattttgttcgggcagttgccattgtacacctttttcaaacccctgcccatgttggaattgaaaggcaggaaaagcgtctgcgtttactggaatctgttgacgtaactgttgaattggaatcgcgtgccgattttgcactctttcttctacgtttctaatgcgtgcgttattctgttcaattggtacaaatggagccaaagggtggtgacttaagtggtgattttggtgtaactgtcggttacccatattgtattggtcaaaaacaccgactgaagaacgctgaatattgtgggtaagaccattatcaggtaatggtgtcgatgtgcggtggttattctgaggaatattttgtgctaaaaccaccatcgaatcaaattgcgcaacttgtcggttcattgcgacattttgggtcccaaaattgtcggggtcacgccctctctcgttatttctgtcgatgactatcccaatatttcgaaattccgcaatacctgtgacattgccttgttgctgctgttcggcaccgagcacattttgttggcgtgcatgacttggctcgattgacacacgcagtaatgcgtttcgaatttcgtcgtcgcccataatttcgtcttcactaaaatgactttgattttggttatgttcctccaaattatgagttatgtttggggagatcgggttattagtaaaattcgtattgtctctgttttcttcttgattttgttgcgttgcagcagcggccggccgattttcgacatttccgaacatacgcaggttaagcgctctttggcgagtaagaggtggcgagcgtgttatcatttccaatttatcttttacaacactccgacccggatatgttcatacaattcacttttctgcagtttccaactttatgctgtagcaccgacccggtgtcaacaacggaagaaataggcgagattcgacccgaacttttgtcgtttttttttttttttttttttcttgttcaagtaagacgcgactcgccctttcctgggtcaagctttttgttgcacacttcgttaattatcgtccgtcctggatcgataactcacacggcgaagtctgcttagtcctatttttccgacctcccccaatcgtttttacctgcttcctcaggagcgccaaatgggatttttcttcaacttttggttcgggattcaaggaaggtgtcaaggcttctcagagagtttatttattccaaattaaaaaaagaaacaatcaattttctttggagaagacaaaacataaaactaatgcaattaaattcgaatacaagaaaaggtgggaaaaacggtcacaaataattaaacataatgccaaacaaatataaaaaataaaataaaggtcaaaaagtccaacactttccctccttcgttgttgattgaactttttaaatgtttacaatgctcggagcagggctggagcgcgcacagaaaaaaaccgcggccgcgcatcgcgcattcaaattgccgcggccgcgaccgcgcatcgcgcaaaaaaaaaaaaccgcggccgcgcaccgcgcatcgcgcattcaaattgccgcggccgcggaccacgcatttaaaaacaaaattatcaaaattttcaatttaatcaataaaattttcccaagtgaaagtttttttgaaaaaaaatttgaaaatttgactgcactttgttacgaaaattgcctatattaaaatatgtactcattgggggaggcattcgaagaatttttccattatatagaaatttttttttaaattttcatgcgggggggggggaatcttggattttctgagtcccaaaattctggatttttttgaataaattaacaatctattaattttttaaatcgcgtttttgtgggcggttccaaaaaactttttgggaacattgtgggggggggggggggggcggcggtgccgataggcgccgccggaatattttgatattttcagcgagattagttaacataatttgtcaaaaaatgaccaaggttaatttgtgattttaggctgtttaaaaattaaagaaaaataaaagttggaatattttctttattaattaaatttcaattgaaataatgtaaagaaaatatgaaaaaactttctgttccgttgaggaattgaacccaagagacaaacactgaaggtcagaaggtttagccactacaacacataagattatggaggaatactttaaataaaataaaaaaaatattttttttctaaaaaatttctcattcctctccaattcccttctcttttctcaccagacccccattcttaccagtgcttaaaaatgcgcggcgcaccgcgcaaaaaaaaaaaccgcggccgcgcaccgcgcattcaaattgccgcggccgcgaccgcggatcgcgcaaaaaaaaacgccgcgaatcgcggatcgcgcaaaaaaaaacgccgcgaatcgcggatcgcgcatcgcgctccagccccgctccagccctgttgcttatcaattttttcagctttcgcattcataggtttcatattcatacagaaaatgctcaatgtcaatttttatgttatattaattcgattattttataagaacaggtcagaggtcaagaatatttccttatatttttatttcgaatttttttatgtgaaataaataatttataataaatatcatttaactttaaattggacaaatttttattatggtatttaattttaaaaaatattttaagattttgaatatgtttagttgtaatacaaatattatttatatagaattgtattcttattctgtatatccttatttagtttaattgacaagcttccattttattacatatcttcatttattagttttttaaaggcttgctccgatttaaatgaatatggtaaattcttttaaatactttattattttgtttctgttttttatacaaattatttcttttaaatataatatttttgttaaaaactctaaattttattaaatttattggattttatttattaaaaaagtgagaatcgcattgtccggatcctcatttacttacttatgttcttttttagaaattttatattcatatattttttaaatatttcttgcgtaacttctaccatgaataatttaatgcttgcgaatacttatcatttctattttaccgccatttttctgttaaggaaaacccatggatttatattctttgaaacccgcagtcaaacgctactggcattgatctcactgattcaaaagggtgagg

SEQ ID NO: 462 - DNA, 2511 bp, Heterodera glycines
attaaaaaattcaaaaagaaaacttgttctaagaatctaaaaattaacaaaactaaatttccaacctaggaaaacaaattaaaattcatttgtttacccatgcaaacaaggttctcattcaaatattaaactggaattatgggagagtctaactataatttaaaacaaaagggtaacccttaaacaattatttcaataaataatatattaatgatttttaaattgggattgacaattaaagttcattatatattatattcaagataatattatttaattacctcgaataattttacatacccgtataaataaataacaattttttatttatctgacagaaaaaattaatacaaaaattgaagcactaaaataaaatttttaaaatgattctgtaatctttaacttcaaaatctcagaaggactagcagcgtattcgttcctatattaggaatgtcaagttagttccagcatacacatttgcagtgcagccggcggtgccgataggcgccgccggaatattttgatattttcagcgagattagttaacataatttgtcaaaaaatgaccaaggttaatttgtgattttaggctgtttaaaaattaaagaaaaataaaagttggaatattttctttattaattaaatttcaattgaaataatgtaaagaaaatatgaaaaaactttctgttccgttgaggaattgaacccaagagacaaacactgaaggtcagaaggtttagccactacaacacataagattatggaggaatactttaaatgaaataaaaaaatatttttttttctaaaaaatttctcattcctctccaattcccttctcttttctcaccagacccccattcttaccagtgcttaaaaatgcgcggcgcaccgcgcaaaaaagaaaaccgcggccgcgcaccgcgcatcgcgcattcaaattgccgcggccgcgaccgcggatcgcgcaaaaaaaacgccgcgaatcgcggatcgcgcatcgcggatcgcggccgcgctccagccctggctcggagtccccaattccccgaattagtgtttatttatttaattttatcgatcactgagttttttgtggaacgacctagcaccggactaaaaattcgagggtggggctcaattgttcaaccctttttttttttacaaaaattctatgattttatgcaaatttttttccaataaccaaatttttatttacctaaatttgtttataaaattttttaacttgaaatattggatttaaaaaaaagtttcgatatgggcctcggaaatttaggcgaatgtttgaaaattcataattcactattgtggaataaattatagtgcaaaaaagcatttaaaaatagagaaaaatctgtttttattttttagtaaaaaaatatattaggtacataaatttgaaaaactcaatttttcataaaaataattcctatcacaattctgaatagtattcattctggaaaagaaatatactaaaaaaaaatccgcaattcttcctcaataagcttgtgtttattccatatttttattagatttttgaaaaaatttacaaaaataaaatgatttttgaattcgggtcataggggaggggagcaatgcttttgagtcacttttttcttctaaattattaaaattgttttttttggagtattttttcagatttcagttgccttggtaataaaagcctcagaacccattcgtatctgtggctggctctgagagggaaataagcggaactgaactgcacggttgaatttgacacatttcgcccaattctgaacccttgacccgaactcaaaacccaaatatttaaaaatggcaggcaagtggattcgaacccatgacccaaaaacccattttaactaacgtgcaactgtttcgcttatttccctttttcgaaaatatatttttcaggtttttcaatgtgcaaaccaaaaagatcccccctcccttcgttggtcacgagtgtgaatttgatttccattttttaataggatttagataaccaagggtgtaatggatttttttagagaaataaaaattgcaattttttattgagaaattttgtaaaattagtcattctaaaatttttttatgaattttttaaaaaatttaaattttattgaattttttgaaaatattttttgtttattttaatagatatttaaatagcaaataaatatgataaatttgccatatttttctccatctttaagcttttattcatgtgtttgtaattaatttgaagtggttatgaattttacattttagaaaaaatcaatcaaagattttccaaataaaatttataagaataccgtatttcctcgattataagccccggggcttctattgttcaacccccctccaaagggggcttatattcgagggggggggggcttccaatcgagggggggggggggcttttattgttcaacccctttccctatataaattcttaaaattttttgctttctgcataatggtacaatttaa

SEQ ID NO: 463 - DNA, 2309 bp, Heterodera glycines
  unsure (1)..(2309): unsure at all n locations
tttcggaagttggaattcctaccccaaaaatgtcggaaatcggaagtctttccgtgccatacctggtgcctatcgacatctgcgagaaattttatgaaatttaatgcgatttggtaacagattttgtctaaaattgaccaaatgacgcagtttttgactcaatttctacaggattattaagaaaagcctatccggcggtgccgataggcgccgccggggaaatttcacaaattttgaatgaaatttgcgatgaaaaatgagttaactttaattaaatttattatttaatttatttaaaaatatttggcattgtcttagaaaaattttcaaaaaaatcaataaaatcccgcataatcccgcacaaaaaatcaaatttgcggatcccgctgcgggattggaactcaaaattctttgcgggacgggatcccgcgggattaatcccgcaaatcccgcattttccaaaaaatgcgggattgcggactgggatcccgcaaaatcccgcgcgggctcccgtcccgcgccgggctctacaatttaaatcttaatctgaaatttttgaattgaaaagatttttcattttttggcccttggaaatttaggcgaatgtttgaaaattcataattcacttctaaatgaatcaattaaagtgcaaaaaagcattaaaaatagagaaaaatctggagcattttatacctttttagaattttctatcttcaaaatgaagaagttattacataaattttggaaaaattcgttttttgagaaaaaaaaaattaatagcgctgttctgaaaaggttttttgaaaaacacgaaattcttcctctataagcttctgtttattctatatttttataagacttttgaaaaaaagtacaaaaataaactgattttggaattcgggatcatagatggaagcaaatggtttttttgtgccatgggttcagatccacttgcctgtaaaaatgttttttagggtttttgggaccataatcaagaacttggcatccattttgcccaattccaaagccttgatccgaactcgaaaccccaaaaataattttttaaaaatgttgcaggcatgtggatttgaacccatggcccaaaaacccatttttaacaaaacaaaaaatatattgggtataatatttctatatttgcttgaaaattttttagtgattttcatcaaaatcttttccagtgcaatttattaacagaaattttttctaagctattgcttcgctattagacaatttccaaaaaagttatacatgaaaattgcgaaaagtcgaaatttttgaagttttttcgtaataaaattttttccaggcttgaaaatcttttcgcttttggtaaggctaatagagcatgttaagagctttcgagtgataccaacaatgttttatttggatgtcaaagaaaaaagctatcatggaaaaagagctggcgccgaaacgcgtgggtcccgtttgtacatttagtctttctaaaatattttatgaattttaaaaaaatactatttttttcagaaaatttttgtgttttaaaagtatttaaaataacaaataaatattataaaattgtccataaaaagcgacgaagaaattgatgcagaagtttcctaatattttttttgttaatgttttattaaaataaattgttcaatagtttttgcacgtttctgacttcaaaagttttgaaaaaaaaatttttttgaggggggcttatattcgaagggggcttctactcgagggggggcttctattgttcaacccccctacaaggggggcttatattcgaggggaggggcttccattcgaggggggggcgtataattncgagaaatacggtatatcctaagattatgtttatttcttgcatatttgattaattaattttttaaatttttttcctgaagagcgaacggcgttgacagcatttcttttcaattatacaaatgattgcatgtatgtgctttaaattgaaaatcagtgttgccaacgacgttgtcccacttggtaatggtagtgatgaacactacaactcaaagcctcattttgaaaatttagtctcattgacctatcaaaaaaccacataatgaggctaaagcctccgatctgcgagccctgtttataccactgaaccacgggtgaaaacagacgaaatttatacattgactaataatgacaagcaatgtgtattttaaaaagaaaaaaaatgatgcatcaagttgttatggtatagatttcttttccttatctcttattttaaaataaataatgatttaattaaattaaaaaataattgcaat

SEQ ID NO: 464 - DNA, 3609 bp, Heterodera glycines
ttgtttttaaggcgtgaccaatgcggcggcggagccccctggagggcgacatcggagtacaggacccatttgaggtgaaaggaagtaaaggcaaaccgaagtgaccatcgttggcactttgcaggtgaacagaccatccaaaagggactcttccgtccgaattttgtgccgacttcgcctgacagaaggtagagaaagaattccatttattacttctctctctctcctctctctctttccctctctatttccctttctctccctctctttctctgtttccctttctctctcagtcgctttcaattttaaatgccatcccccaaaataggtcggcaatgtgccgcaggagaaccgtccccgtcctcccatctccaatatttcttcgatgccaaggtttgttttgcccagtggttttggcatcgaactgaataatgtcccccccccccacccccccaggagaggaagtgcaaagtgttcttccaccacggctgtggcggaaatgccaaccgattcggcacgaggcaacagtgtgagaggagatgtgggagcagtacagcaccaatagcagcggaaggagcaaacattgaggggaggacggacaaagacgacgcccataatttaattacccatttaattatatgctaattatttattgattgattattcaacgctaatttgcgcatttggacccaaaaatttgtgtgtaaattatcgctttatttgtgtggacgaaacgccaaatttgaattttaagcattgtgagcggatgagagaaatttgagcaaggggaaagtgaaggcaaaagggaaatgaaatggtaagctacagtaatctgtaaatctgtttctacagagcacatcataaagaaaggaaggacgacggcacaataggaagaatgaatgcgcttccattattcgaaccatccctatattatcaccataattagggtcattatcatcgcatcctttagcacatcggtcgccgccgccgccgcagttggccatcctcagtaataggggtagaaatgggcatagacggacgtacggggcgcggaaccggagcgagcagaggagtaattatggctacgcagcaagtccatctgcttgaccgcctggtcaagctggtagctgactgtcgcgtatttgttgcgcaactgatcagagggggaagaagtgatcagggaaagggaagagagtgacagaaagagaggagaaagtgagcaatcagggagtgatcagagaaaattaaagtgagtgatcagagagagtaatcaaaaagaggggagaggaatgatcaaaagaagaagtgacaggcaaaggataatcggaaaaatgagcagaagatcgcgagaggggacaaatgttgcaagcaaaaaccaacccgatcgcgctcgtatcgtcacgagacagactccgctggaggccgccccgtggtgcgacttttggggatttgtaacttggggacccgacatttggggacccgacttttggggatcccgacatttggggacccgactttcccgacttttggggatccgacacttagggattccgacatttggggattccgacatttggggacccgacttttggggatccgacatttggggatcccgacatttggggacccgacatttggggaccgaacgacatttgagcaaaagacacttaagaaaaccacggacatttggcaacccgacatttagggacccgacatttggggatttcaataaaacaaaaaaaaaattaaaaaatttaattctaagccacaaaattagacaaaattacgtctgctttagccagagttaattccattgcaaaaaaaaaataaaaggttaaaaatctttattttttgaaaagatataattattttagcttgcgaagagaaacagatcttaaaggactttttcccatttgtgctcactctgaattcttatgaattcagtgtgaatgttgatgactacaaccctggatatatttttggaaaaataaaacgaaatagggcgaccagtggaagagatttgttttgcaggtcagccacaacaaattaattcgttttaaaaaattcatttaaagcaccgaacaaagtcactcaaaagataagaaaccgaaaagatgacctcggcattttgttgctgtacgcaattagacagcaaagtcggctggaactttttgaatgtccttgacggatttctgttcccgttggcccttgggaaaggcactttaaataaaaattggaaaaaggtctactgtagttaaaaaatgtattgtggtttgtctattgtgttgtggttagtatgggctcaaaattctgcgcctcctcgcggtgagtccggaaacagagttaatttttaaaatattaattaatttttttgcaatggaattaactctggctaaagcagacgtaattttgtctaattttgtggcttagaattaaatttttaaatttttttttgttttattgaaatccccaaatgtcgggtccctaaatgtcgggttgccaaatgtccgtggttttcttaagtgtcttttgctcaaatgtcgttcggtccccaaatgtcgggtccccaaatgtcgggatccccaaatgtcggatccccaaaagtcgggtccccaaatgtcgggatccccaaatgtcgggatccctaagtgtcggatccccaaaagtcgggtccccaaatgtcgggatccccaaaagtcgggtccccaaatggcgggtccccaagttacaaatccccaaaagtcgcaccacgaatttgaacattgtccaatttacattgggtgagagcagaaacatcggaatttgattttgtcgagaaatttaaaaaataataatttaggccattgtcgccaccagcggatgaagaaaaagcggatcaaaaagtcgtctgacagcgtggaagtgaattaattaattaaatttgtgaaatgatcgatctcaccaattggaatttgatttgatgctctctttttacccttatacataaatgcttttgttgattcttacattaaatcgcaaaatatgcgcatatcaacctgaaaagcgaaattttcgcttttttgcttatttctgacataaattaacgaatttttaagaaaattgaatttaatcaatatttttgacaaaattttgataaaaaatgtctttttcggaaattttttcggtctttaggggtcaaaaagtccaatttacctgatgggggccgttttaataggggttttttgaaaaaatgccaaatatgcacataaaatatgcacaaaatgccaaaatatgcacaaatatgcacataaatcgcgaaatatgcacaaatatgcaaaatatgcatatggaaagtcatcctagaagcttcaaatcaagctaaaaacatgtttttcgtgcgtttcaggcctcccacagtccagggaaaaaatatgcatgtgcatatttttggatgccctagtaatgaacatccgtatcgtaacgtggcattttcttcaatgccagcttttcttttgtccgttcgttcaccaattcaaatggtctaataataatcaatcagtgaccggactagagaaaggcaaatcaacatttttctcttagcgaacattgctttaataaatatcaacattg

SEQ ID NO: 465 - DNA, 6734 bp, Heterodera glycines
  unsure (1)..(6734): unsure at all n locations
taaatggtttaaaaaanttaattaatattaaaaaaatgtaaaacagtaaatgaatagaaaaacgatgtgctcaattactttgaaattaaaaaaaaataatttatttttaaggtgagttcagatgcgcaaaaattagcttaccatatcaagttttataatttcagaatatcgtttaatgtaaaaattattgttccaataatactattttctaaatataaatatttattaattcggtatttagaatttttcaaaataaaatattaaaagtttgtattctaattaaataatttcttaccatatttacagagtttacgagaaaataataaaatgaatctttccgccggcgtataacgggggaattatgataaagaaaattaattttcaacatttaaaaaattacatattttatctatttgattttttgatttttcccattttaatggtacggaaattaaatttttatgaaccttataatattttcagcaaaatactttaaaaaatgccatttttgcctttattcaattcaattaatttcaattaaaataattttatataaaatcgcataagtttatgaacaaaattttctattgccttagaaataaattataattctttagtagttagagactccattttcaccggattacggtagccccccataggtgtgggaggggtgcatggccaactgagcgccagccatttgagcgccgccaagtgagcgcgggccatttgagcgccagacttttcagtactgaagccaaaacctattgcgcgacttttttttgaaacccaaacctattgcgcgacttttttcttgcaaacccaaacctattgcgcgacttttttcttgcaaacccaaacctattgcaggggggtgcgcgacttttttttggtgcgcgactttatgcaaattattttaattaaatttatttaattttaaattattttaaacgtcttaaaggtcaaagacgttgaatttaaattcatttaaaattctccaaaaattccccgcaccgagcggatccgaaccccaggggggcggccagactgacgcactaaccactcggccacattggcaatggataataaacattaatttgctctcataaagggaaaatttgacgtcaccagcggcgggagggggggcgagagcgggcggcgagaatggggaggcggggccaaataaacatattaattaaggaggggtgggggtgttggaaaggtgccaaataaacaaattaattaattggtcgcgtactttgtggtgccgccgtccttcccgcatgcccattatgtaatttgacaccttcagacaataaactatttattaattgattttttgtccatttggtcattttcatttcatttaattcactttacggaaggaaaagccaatcaataatccattatcatttatttatgccttaatttttccttctttggcatttgtttacccatttacccattactttttaccatttatttattgtcagattggtattattatggcaccattttttgccaaaattcctaaattgttcattttcaatttttggcattgtttttcccccttttttttcacattttcatttgccaattgctttacattttgtgccaaaattcattgccatatttttagcattgttttgtcaatttttgcacatttttgtgccaaatttccctatttatttcttaccaaatttttgcacatttttgtgccaaatttccctatttattttttttgccaatttttggcattcttttgccacaatttttaaccctttcttttgccaatttttacacatttttgtgccaaatttcactatttatttcttgccaattttttgcacatttttgtgccaaatttccctatttatttcttgccaatttcttgaatttgttttccccattttctcatttaaaaaatatttaaattcttggcattctgtttttttcaaaattaaattatggcgttctgtttttcaaatttaaaaattattttcacatcttggcattctgttttttcaaattaaaaaaaaaaatatttcaacccttggcgttctgtttttttcaaatttaaaatttatttaaattattggcgttctattttttaaatttaaaaattatttaaattcttggcgttctgttttttcaaatttaaaaattatttaaattcttggcattctgttttttttcaaatttaaaaattatttaaattcttgccgttctgtattttgaaatttaaaaattaattaaattcttggcgttcagtttttttcaaattaaaaattatttttcattaattttccgcttttttcttccaaattttaattatttttgctttccctctttaaaatatttttattttccactcttttttcctttttttttttttattcattttccccttgttttttattcattttcattgatcataagtactttgtactgtcctttctcaccccattttgttattttgctggtttactcggtactaaacccctttaggatatttgttaagccttttcaaatatcctgggggccatccttaaaccgaggagtcctgccccggtactgggttacttcccagagtggtgggcacgggcgttcactgtccacggggcttattccgctggtatccagggctgcggcagtgactgaccgaaaccatgtttccgtcatagcccgccgtgtgtcacagcgatgtttaagcccagccagatagtcggtctggtgtggacgggggcccttcactcgctggccttgagggtgaaggtgtgcctgttcctagcagcgggggtggcggttcctagccctaatgtgccctgcctacgggctgcattgttacagcgagagaataaccgggactggctggcccggaggaccgtgagtcactgagcagtgtcgaacgcgcagctgctcaaactcaacaccccggattaaaatccgcgtagacggaacacatatgtgctgtgggcgttggcgcaaatgctctgtgaagggagtaattacccgacacagagatgcctacaccatacctccgcactttggtatggtagtgccacacactttgtgttccatgagcggttccataatcgcttgctatgatagtcatagttggtgggcatgccctccaatgtgatggcttgggctggaaggttaaaaacacgtgtagggggtgacctatgcgcgtttttggctctccaaaaatggcccaaaacatcgctcaggagacgggtcatgcccgattttttttcatgcagccattttctttgcagtttcgccatatactattgttttttcttttcttaaaataaaataataatactcaattcaattttagaataaatgagccaattttccgacgattccctcccccctacccttgatggaccgtattcccctgtcggggatgatggaaccgaactgatggatgatgcgccgccgctggaaaacgtcatcaaacacctgccaaacaccgtacgtttttgcgaaatgtttttaaattttcttttctaattttgtgagatcgtttcaggttgtgccgtctgaagagaatgagcgcaagacccgcagggagccatcaattacccgcgaattggacgcggaattgttcaaccgagatggatttgtgtgtttatccgccgcacaggcggaagcgggacggttcaaaggtgtggttgtacaactttttttaattttaaaatttctaactttaattaattattcgctttatgctatgaaaagtatataaaaaatttttttttatttgtactttgattaattgaggtattttaaatgatgtttagcgtttcgattcattggccaatttttgctgagcctaacgttcggcgctgtttttccggaggacattctgcgcaacctctttaccatgtgcctttcctacgcagtcgagggggccgaatcgatgaaaatatctgcggaccacttcattttccttctgacgtcaaaacaccttgactacgaagtggctgtacactttaaaaaaatcgacaacacggcgccggagaggattctgactcgttttgaaatggtcgaccaaagcaacaaagcgaaagaaagaccgtcgctcctcgaagagccttttgtaatagacataacggcaatcgagagcaagtgtgccaaaccgaaaatggctggaaaagggcgtaacgacttcaacatcgactaccgtattaccgatggtgcaacgtatgagcttctgaacaacgacaatctctgtctcttccggtcatttgaaatgcttcggatgaaattcatccttgcgcaacaacgtttttcggaatacaaaagggatgagagaaagcagcttgaaggcgttcatgctttgtgccgggggtgcaacattgacatcaacctacccttctattcaattgaggaatacggagaatcaattcaggcaaataatttgtttattaattgactttatttttatgcattatctgttaaggcttattatgaggcgataaatcccggcatgtttcggcttttttgctttgaaacctttggcaaaatgaaaccttcatggaaatcaactgtggacaactataaacatgaactttccgttatttttattgatggtgaagacggcggcgaagggcattacgacccggttaaaaatgttggaaaactgttcagtgcccgcaactattgttttggagtatctataataatatattttatactgtaattaaataaatatgttacagtgtgagatgccatttcatcaacaaacgcaacacacagcaaaatgcaaatggaaatgccacaactgcctgcgtgttgggtctgcctttcgaggaaactgcgtccaaggcaatgacaacttttttgagacctgcttggggtgcaataaagtaaagttatttgagtttcgtttcaaagaattttttttgtttagacatttaaaagtcgtgaatgctatgaacaccatgccaaatgtacaaactacagggtcaagcgtgacaacgaacatgaaattgtgggaaaatcaatttgtaaaagctcgaagaaatgcgtcgactgtggcgtgatttaccaaattcgggttattataaaataaaatttttttattttattaattttctctttagcatcaccaacaaaaagagcatgtttgcggtcaaaaattctgcaaaatttgtctcggcttccatgccccgcgagactgctacataccataccggcctaaagtcaagaaggagaagcgcttcgtcttctttgactttgagtgcactacggatttcaagcccgacccgcaactcatgcggttcaagcaccaggtaattatttttttttgaattcaaacaatttaaaaaaaacaaaggtcaacttctgcttcgcccatgtgacatgcacccgctgcattgagaagggcatttgggaccaggagctggagcgggcctgcgctctctgcggccgattccgaacttatgcctggtctccgtttgagttctggcacacggacgtggaatgccgcaaggtcgtcgaggacccactggctaccttcaccaagtggttgctgaactttgaaacggaagtcctcggcatggagcccggagcgaagaagcgcagaaagaggaaaaacattgacaacaccgacggcgatgccatggagggtgaagaggacgaggacgccgtggatgaggacgccgagaacaactggatgttgggctatgaggaagcgggggaaaagcccgagtcggtgacgtcgtacgcatacgcacacgccggtaaattgaagattgaaattattttttaaaataaaataaaacttaaaggttcccgctacgaccatgtgctgatttatggtgaaatgctgcgcatgggtgtacgccctgaactcatccgccaaggcaaccatctcctggaaatgaaggcacgcaaaacgggagtgtacacaaccaccatctttcgcgacaggtaaaagtttgaatataattattttttaaatttttgatcgctttagctacaagctgatcccgatcaagcttgccaattttgtcaagacgttcggccttgaaattgagggagtggacaacaaaaagtacttcccccacaaattcaataaggtaagggtaatttatgaaattaattaaaaaaaaaaaaatcattaaaatttaggcggaaaattacggcactgttttggacactctcctgccaatggaggactactacccgggtggtctcttccctgccgaacgcgcaaaattcgagcaatggtacgacgagaaccgggaaacagggtttgagctgaacgaagtgatcgccgactactgcaaaacaggtaaaagttctggaaaaaaacatgcaaaaatattcaaaaaaaaattttgaagatgttcaaattctggcacatggtctggtaaaaatgcgacagctgttcttatctgagactcggcatgacatcaccgattcggtcaccatcccatccggctgcatgaagtattgggttcaattggcacaccacgacaaagagcgcgtcgccattattccacatcttggctatgagaagcgcggaaaacagagcactattgccagaaaatacttgaaggtgtgccaaaaaaaaaattaaatttattttaccttttcatttctctctcagtggcgtgccgaagaagagttgcgggagaatggccgagtcctccgccatgtcgaaagccctggaggggaagtcaaattcggcactacagctttggacggatgatggagcg

SEQ ID NO: 466 - DNA, 2671 bp, Heterodera glycines
  unsure (1)..(2671): unsure at all n locations
aaatttcaaaagatttggtcaagtttgagcaaagttatggccaaaagtacccaaggaaccggttaaaattttgcaggctaatagagggcacttgaacggatatataggaatatgtgcaaaataaaatattaaaattacttttaaccatcacttcttaggtgtgaagaggaggagttgcgtgagaacggccgagtcctgcgccatgtcgaaagccctggaggggagttcaagttcggcaactacagcttggacgggatgatggagcgccctgatgaggacaaaaacttggccatcgaggtcaatgggtaaggaaagaattcgaaaaatgtgccaatttacccattcaaaaggtgctattggcatggatgcccaagctgcttccctgacgatgcggcaattgtgggcggtggtgagacagcaggagccctccgggcccgggacgcaaaacggactcgtgacattgcgcgggagttcgaggtggaaatcatctgggagtgccacttgaacgcaatgctggaggacaacccggctatgaaagcgtacttcgacaactgccctgattcaggcccaattgacttccacgacgccttctttggcggtaccttttccatttaatttttaactaattttccggcacaggtcgaactgggcccgaatacttgggcgcttcggtgatcaaccctgagacgggcgactggaaaagccgcacaatcaaagtgaaggactttaacagtctttatccgtcgcggtaagaaatgtcggaaaaaaatgaatagttgaaaaatcttttgcactttaaggaatatgttcaccaattatccggttggccacccgaccgtggtgcagtttgacaaggacgtggaatggaggcgtccagaggacgttgttggcgacgacggcatccgccttgagggcatcatcaagtgcttcgtagtgccgccccgccactgccactacgatatcccggtccttccgtaccggctcaacaaccgcacgctgtttcccctctgccggacgtgttccgaaatgtacccgcgcggcttgatcgaccccgagtacaattgcgatcattttgaggactctgaaaggggtgagtttgaagcttgtaattaagcaaatattttttcttaataggcttttcgacaacagtcacacacattgagctggaagccgctctccgctcgtggtacaaggtgacgcatgtgtaccgtgcctatatctggcctctggcgtgcgattggagcaatgggctgttccactcgtacctgctgaagtttctcaaaatgaaatttgaaggtaaaatttgaaaaacttaataaaaaaattaaacaaacaaaattttaagcaagcggatatccagcgtcttgtacggaggcgggcatcagcgaggaggagtcggcacggagaaagcaggaacacatcgacaaggccaaagaaaaggcccaagtccctcttgaggcggaccgaatcaaacacaaccccggactccgctacctgtccaagctgtgtttgaattcgctgtggggccggttcgcacttcggtaaaattttggttaagaattatgaaaaaatacaaattatacagaaaccggcttaccaaaaccgaaatcgtcgagtgccatgccgagctggccaaactgctcaacgactcgaagattgaggtcagcagcattgatcagctgacggaaaagttctggatggtctgctacaaggccaaagatgagcatgtggtggagcacagcacaagcaatgtaagaaaagttttaaaatatttaaaaaagacaattgaaattttctcaggtggccattgccctatggaccacctctgctgcgcgaatccacttgctggaatcgctgaaaaaggtgtatggccctgcaccaggtgtagagcgctacgacacccgcattctctacatggtaaaattcagaaaataaaatgaaaatgtgaagtaattttttaaaatcaggacacggacagcatcttttacgactacctgacgcggctgggggacccacttccgggtggtgagcagctcggggagctcgccgacgagtaccgaaccacacgattatggaattcatttgtggtaagactcattaaaaatagatcaaaataaatggaaattttttgtttagctgggcccaaggcgtacggattgtggctgcgcaacaacgcaacgggggaggacgagtacaagctgaagctgcgcgggatcaccctggactcggatgcctgcgagcgcatcaccttcgagaagatgaaggagatggtgcagaacaagctgggacagccggacaacaacgtccgcttcaactacccaacgaagaacttccggatcaccaagaagggagagattttcaccgtccccttggtcaagcagttcaacccgaccgtgaataagggggtggtcagggatcacgggttgaaggtggtgccctttgggtacagcgacgaagagtggtgtaagtggaactgccctggcgcttgtacctgtctgttcaacccagacctcaatgtgaacatgttcacagaagaggagctgaatgaccccgacattatgccataattgttttttttttaaattgaaaggcgtgattttgtaatatttttattcatttatttcttcatagggcacccaantatttttccgngaaatccaantaaatttca

SEQ ID NO: 467 - DNA, 2013 bp, Heterodera glycines
cggaacgtgggaatggggctggttttcccatatggcagccagatcgccgcacacccagtggatgccgtagccagcactttaaaggtgtatgggggctttcgcaagcgtttgataatttgaccaaacaggaatgtttttcctgtacctccatcgccgaaaatgaagaaacggcgcggcacagtctggtccttcgggtccgactgtattgccctcacaacagcatcaaagaccttttgctggtcgctattgaggggaggtggggtgttttgttgtggcctttgatttggctggccatgcggcatattcagaccatcatcaccaaagaaaaattcttcaactgccaaattggtatttttggcttttgaatttggtggatctggcaggccacagtgcacacagcttaagttaaagtagtgcaatcgccaatctatgtcggctaaggcttgcagctcgcgtgcttggcgtatagctgcactggtgatgccctgtgggttgtacatttggtctttatacttgttccacagttctatggcattgctcggctgcccaaagacgaggatgctcacaaagagccatctcatctggtccggccagcgatgcaaggctgcctcaccgagcgttttgtgccaaatttggtcatcttcaagaagcccatgctgtagagcggcctctgtaaaggtgttgtactgctggccattgaccagtttcaagtggtcaggatcaccgggaaagtgacgcatcaacgcataaagtgcaaatctttcccggtccgttggaggcacaggtacaacacgaccgattgggggcctcttggcaggcttccttttatacggaagccatcggtcttttgcccagcgaaattgctctgggactttttcaaaaagcatgtccttgagcgaaggaacatgctgccattcagtttgccattgcttccaataggcagagcatggcgtctctggcagctcgcctcgctgaatttcctcagctttgctcaccagttggaatgccctgtagacaacgggctgctggtttggcaaatgaatggacaaatgaacaacctggtgcgagagttttgcaaatggtattgaatgcacaactgcaaaagcttccgtagcaccacggaaattcattttggcatattgagccggctcatcgataccgattttgctgccggactcctctttgcactcgacataacaatgtccgggccctttgaatgggtatttgagtgcatatttaatgtttgctttgttaccgtaagcaaacaacacattatgatgcactcgataacgcagcaaaatgtatgggttgtacggcacgacttgtgagttgtcgtatattaagccgtttacctcaatttttgcaccaccatcgcttgggctaggccggtaatataacgcgggcctgtccgggtgtagtatcgtacatttcgaaaaaggggcaggaaagccctttttgcacctcccaaagttggggtcacgtggaccgcaccaactatcactgcatctgtgcagttgcatatgcattagttcgcggacttcgcgatgcattttcgcaattggggagtcatcatctttatctggcaaaggtggaatatgagcccatatgtattcctggatgacttctggaattgcgtccaggtcagtctgggctacaatgtgtgcgtgtgggccaccacgcccctggaactccatggactctcctgagccaaggatagtcccaaagaaacccttctcgtagagctcttggtggaagacagcaattttgccgcaccacactcgcatccacatgtcaaaacggtcagtgaacatttgaccatttttgtaaatgttctccttgaattctggccactcacggttgttcgtgaatgtgataaagagccgcgccttttttgcgtcgtgacagcgcgcaaaaatggtgttgcagtcttcatacatttttttccaatactgaagagaatttacatttctctcagaaaggcgaacaacgctgccaatgtcatcaacactcttt

SEQ ID NO: 468 - DNA, 2099 bp, Heterodera glycines
aatgtgatgtattgccactccaatttttcatcccttattgcgagatgatatttgcaataatcgcgcagggagacaaatctttttgatttgtcataatgactggtctctgactgcatcgatgcttcagatccggcatctgactctgcaattgactcagtctcgcacatgtcatcatcggacattgcttcagtgtcaagcatatcagcagacatgttgcttttccgccttctttgtgcgggtttggcatatggaatgccaattgtatatccatcgtctcctttaggcttaatcaatggataggtcaagctatcagtccaaggactgaatggggcaatttcgttcaactggccctgcttgttttcgacccatatccctttaggtgccggggcaccagtgggatctgcatgaattgcaaacatcccttcacccgttgagggggtgattatctggtggggatgcagcttcgggtctttcataccacccggagcagagcgctcattcaacaaagtcattctgaaaaaccggagctcttccgtcctttgttgtcttaacaactcttgtagctgttcacgagcctgcttgtaagcagatgcagctgggtgattttcttggatcattttttccaagatttcaagggtctcatcattaagctgatgaccctgcacaaactcttcctcgtttgtgattttttccccagtaaacgtgggattttttcgtcgctgctccatggcttcgactgggtccagaatgtacaactgaccaaagccaggaatctgggttgtgccagcctgcatgctgcttatgcggcgatggaattctccgttgagaattactgccatcggtccgccagcagggcatggcttattgccagccgaaacactcgcaaattggagcaaattattgtaccgcgacatattccgaacaaactccttcccttcgcggggttgtttatcgcacacgatgagctcttcaagctcttttgggtgcgggttaagctttggcaaaacaactcttccttgacgacagcaaactctgctgtcctcatgcgggaagagtagtgctccacaatgagagcacttcttttcaccaagcttaccagaatttgaatatcctggataatgctttgctgctgcggcagcacagcaccaacccttgtgggcaaggtagcaacgctgcgtaaatgcagtgactttctcaacagcctttgctgataagctgcgtctcggtgcgggtgaaggcgaacggctaatcgaagctgattgccgtctgcctatgcgcgatgatcgcctcggtggcgtcttcggtctgacaaatattgcatcgtctgcctgcgcaattggctcttgcggaacacaagactccgaaaccaaaccaagcgtgtcgacttggttttcaccatccacttgggcttgggtgagaatggcattagcagcctgtccacttgtctgtggttcgatgatcattatgtcatttttatcatcaacttccattgactcagcggccttggatgtcgactgcgcttcatccgtatgtcgatagacaatggggcaaggtgttggtactccttccctcggatggtacggcacattatcagagccgtaaagctcattgatgtgccataaaatgcgtttcttttcataattaatggataaatcaggcagaacaaatgtgcgattgttcataagccatgactcagcatacaggcacacgaagtacccgcagctatttccatcgtgttgttccgtcagattttcgacattaaaaatcccggtcaacactgttgacgacaaaatgtcagaaataatctttctaattttatccgtcagttgcggatccaacctgccatatggggtaggcaaagaatcggcaaaatgagtaccgaactggacatcatggacaatgagagtccaatgtccagggaaatgtactggcaaaagtatgacttctgccggaacgttggggtcatacccaaatgtcatatttttgtaaggcatgaccctgtccaagccacttctccataccattgggtcgactacgaccacttttcgttgtgatatggttgccaagtatgctaaatatgcggcagcaaagccgtcatt

SEQ ID NO: 469 - DNA, 5688 bp, Heterodera glycines
aaggagttggcaccccctaccttggatgatatgccacattatcagagccgtaaagctcattgatgtgccataaaatgcgcttcttctcataattgatggataaatctggcaaaacaaacgtgcggttgttcataagccatgactcagcatacaggcacacgaagtacccgcagctatttccatcgtgttgtaccgtaaggtttaccgcattaaaaatcccggtcaacactgttgacggcaaaatatcagaaattatatttttgattttatccgtcagatgcggatccagcctgccatatggggtaggcaaagaatcggcaaaatgagtgccaaattgtacatcatgaacaatgagagtccagtgtcccgggaaatgtattggcaaaagtatgacttcggccgggacattagggtcataaccaaatgtcatgtttttgtaaggcatgacacggtctatgccaatttgccacacaattggatcaacaacgaccacttttcgcactgatatacttgccaagtatgccaaatactcggcaacaaaggcatcatttagaaactgtgtcagatcattccaacaggtctcaatgaattttgggccagagcgtgggccttgttctgtttcgccatcacgctcgtaaaggccaacatcggcccatctgcgaattttgcaggccatatttcgcgatgtggcgaaattaatttgcactgtgctgaagtttatcttttcaggcacagttggcaaaacggccactgatgtggtagcttcagagccctgatcaattgaagagctttcgctcattgaatcatttgttttgcccctgcctggtcctcgattttttttggcgggtcgtccacggtttcgttgcgtggaaactggcgttgaagcaattgcttcattagcagacatgggtctgtcaacttcgttgaccttccattttttactgctaggcgacgactcaacattttgagtggccgatgtaaattgccgccttttacttccaatcgaagaggccggggtgcttaattgcaaagcaccaatattgggcgtggtagtgcccgggtgtgataccaccccattctcatctgcaaccaatggtttgtccaaaatcggacagtttgaattgcccttaggagggcaatttgggataggtgagcgacctggactaacagatttctccgtgcgccgcaggtgctcttctttctttctcttcttcagcatttcttgcttagaaggcatctgaaaaacaaaatcaatgggataatacgagtgtgacaaaaggtatttgaggaacattgaccaattattgtgcacaatttaaacatttataagcaaaaaatatatgaatgtgtaaaataatgatcatcgtcgtcgtcctcagccacagtgaagtcgctgccgaaatctatcaggcaggacgctcacatacccctaattgcacaaagggcattgactgcagaaacatgtcagaaaccacatctcccggaggaacagtttccaatttgtttgcctgaaactacatctcccggaggagcaggttccaatttgtttgcctgaacacacatctcccggaggagcaggttccaattgtttgcctgaacacgcatttcccgaaggagcacgtcccaatttattggcctgaacacacatctcccgtaggagcaggttccaattgtttgcttgaacacacatctcccgaaggaacaggttccaacttattggcctgaacacacacctcccggaggagcaggttccagttagttgaaaaatgggtccgttatttatcctaacgtcacctctcacccgtccactggtcttggcaaagtgcgggaccagcttcgcccaggatgttggccggtaacgatggggaaaaagaactgaaccaaaaagtctggtcgtgaatccaatatcctggtcgcaaagcagaccgatatggatgccatggtcgctaagcagaccggcactgtatcatggtcgcaaagcagaccgatactattggctatggtcgcaaagcagaccagcctcgccatggtcgcaaagcagaccggcgtgtgcactacatatcatggtcgctaagcagaccgatatgttgccatggtcgcaaagcagaccggcacgtgcacaaatctcatcatggtcgcaaagcagaccgataagatttgaaacaaataaaaatgtgagtctcaaaagggtcataaggacagaaatctttacaattgactgaataatatttttaaaaatttaagaacatttttttctgtcaagtgtaaagactacttaattctattttggagcttatgcgtgacaaagtgtacgaaacttaattcctaactaacctcagatttgggttagtaaaactattggcttagtgtacaccttgccataatttttgtatatatgagcatctaaaaattttttcttattttattcatttcatggtcgaatcgatgaattttaaagatttaaaccggccaaacacagcaattgcctgagagaattttttaattttataagaaaattgaaggatggaaatggtatcacccatcaatgttaagcgattgtcgattatcaaaaaaatctataattgatttttgtttggaattttaaatttaataaactaaaattttcttcaactataggaaaaatgtttacatttttcaatttttgaattgtcgaattcaatcaataattttcgagactataaagcgtttgaccggttaatttgagtaaaattgaaacttgcgcagcaatccgcttttgtcattgaaatgtttgtccactaaaacatggaaacggagcgaaagcagtgccaatttgagtccgagttgaggacggtcaataaaatggaaaaatgtccatccaaactgttacgcagttgctgaattgttgagcggttgctgaaaatgcagaatttaaaatcataaaaaaaaatgcaaaaacactaaaaaatggcgcttttacaacaaaaaaaccgaaattggtctttaggcaaaaattctagaaatagaaggcccccttttggcacaaaatcctttaaaaaacaacaaaacactaaaaaaaattcacctttttgccatcggaatgttgtccgccaaaagttcgaaacgtggcgaaagaagtgccaatttgagaccgagtttaggacggtcaaaaaagggaaaatgcccatccaaacatcgctctgcacatcaaatgaaattattgaaattaataatttagcggaaagggaagcaataagggttgaacaaacttcttagtgaattttacacaaaaccaaaatttttatattaaaaagctaaaacatacaaaatttcaaaaaaatttttgccatgaaattcccaaataaaaataagaaatttatgactataatggaagatataaatgtaaggcccagcttaaaaatcattaaatccaaaaaacataacaattaaatgctaaaaaacctgacagaaacaaaaaaataacgaattttaaaaatttttaattttcgggccatttttcgaaccgagaaaactttttaaaaacttaccgcattcaaatttgtccttgcaatttctggtccacagtcattttgcttttccatcgagatgtttgtccactaaaacatcgaaacggagcgaaagcagtggcaatttgagtccgagttgagcaaggcaaaaaagggagaatatccatccaaacgtcgttgcccatcaagctgaaaaaaagtcgcgaaagattttataaaatccaaaaaaaaattaacgaaaaactaagaaattttgtatttttacacaaaaaaaaaaatctgcttagctggagttgataaatcaataacataaccaaaaatcccttaaaaaagccggcactctaacacaaaaaatcaaaatgaattagttaattttgaaaaaaaaataattttcagccattttttgaaatggagaaagctttggtgcccctaaattccataaaaacactattattttaagtaacaaaaaaaccaataactttacaaaaaaaagaaactaacaaaagacttaccaaaatttggaaaaacttcgcctttgacatcaaaatgtttgtacactaaaacatcaaaacggggcgaaatcagtgtcaatttgaggccgggttgaggacggtcaaaaagtgggaaaatgtccatccaaacatcgctgcagaccaactaaaattatgaaaaataataatttagcggaaagggaagcaataagggtggacaagattttttgaccgaagctctgagcgaattttacacaaaagcaaacttttctaaaatttctaaaaaaaaatttttatgccatgtaattgccaaactaagaaatttatgactataatggaaaaatataaatgtaaggcccagtaaaaacatgtattacggggttttcggggtcgctgatcccgacaatgatacatgttttggccaattccgaacccccgacttggattctaacaaaaaatcgaaaattcaaaattttcaaaactggtttttatgttcgtatcattacagcatgaccattctttgatgttgcaatgtttgcagtaaatttaataaaaaaaaactgacacaaacaaaaaaatcaaaaaaaatatataaattttgattttttttaattttcgggccatttttggaaccgagaaaactttaaaaacttaccgcattcaaaattgcctttgcgatttctggtccaccgtcattttgcttttgtcatcgaaatatttgtccaccaaaagttcgaaacgtggcgaaagtaatgccaatttgaggccgagttgagcatggtcaaaagagggaagaatgtccatccaagcattgtgcgcagttgctgaaaatattaaaatataaaattgcaaaaaaaagcaaagaacctaaaaaatggcctgaatttggttttaggcaaaaatcatttgaaaatgaaggcccctttttggcacaaagacaacaaaaaatttgtcctaaagtcgccaaaaccgtgcgtttgcggtaccattagattcagctcgctgagctgagtaaaacggtgccttatacgcgcagaaccgttcactcttcgacaaatgccgaaagcgtaaatttcggtgaccagtgattttttcaaaaaaaaattgacacttgctatttgtcttaaagtgaacagttttgcgcgtattcggtaccgttagactcagctcagcgagctgagtctaatggtaccgcatacgcacggttttgttaaattttcggcaaatgccgaaactgtaaatttggtgaccactgaatttttcaaaaaaaatttttgacacttgctatttgtcttaaagtgaacggttctgcgcgtattcggtaccgttttactcagctcgccgaactgagtctaatggtgccgcatacgcacggtttcgttaaattttcggaaaatgccaaaagtgtcaatttggtgaccactgaatctcaaaataaatatgttggcattagctcgttgggactgcccggaaaataaaaaattcgattttttcaagcgtccgcttggggtactgaaacaattatggaggagcatatatccaacgcataattaaagaaatagttataggaaagctattccggaaggattcggcctcaatataaatctgattgcataagttcgtaggggactgccccgaaaatgaaaaaatcaattttttcaagtgttcgtttggggtactctaagaattat

SEQ ID NO: 470 - DNA, 1352 bp, Heterodera glycines
cataaacgacaccattttacttagctcagcgaactgagtctaatggtaccgcatacgcacggtttcgttaaattatcggcaaatgccaaaagtgtcaatttggtgaccactgaatttaaaaaaaaataaattgacactttcggtatttgtcgaaaagtcgacaaaaccatgcgtatgcggtaccattagactcagttcgctgagctgagtaaaatggtgccgtatatgcgcagaaccgttcactcttgacagatgccgtaataaaaaaatttctaaaatttgtgaccaccaatctttgcgtatgctttgcgaaaccaagctaattttgtaaattattgtattatcctctcaaaaaccaaccattgcacatttgaagtatgtaaaaacaattcatttttttccatcgaaatgtttgttcaccaaaggatcgaaacgtagcgaaagaagtgccaatttgaggccgagttgagtgcgatcaaaaagggaaaatgctgaaaatgttaagaattaaaattgtaaaaaaagcaaaattcctaaaaagcgcacttttacaaacaaaaaaacagaatttgaaaaaaattggtgaacactgatttctttaaaaaaaattgacacttctgctatttgtcttaaagtgaacagttctgcgcgtattctctactgttttactcagctcagcgagctgagtctttaaatcaaaaaaacataacaattaaacactaaaaacgggggcttttaaatcaaaaaaaaaaacgaatttgaaaaaattttaatttttagcgttttttacgcaaaaattcattgaattggaggcccgtttgtttggcacaaaatccttaaaactttgggaaattaaattccttaaaaacactcttagcaaaaagtaaccaaaaaccaaacagctttataaaaaatcaaaaaaaaaaacttgccgaaatttgaagaaattcgctttttccatcgaaatgtttgtcgaccaacgcattaaaatgtgtcgaaaaaagtgccaatttgaggccgagttgagcatggtcaaaagagggaagaatgtccatccaagcattgtgcgcagttgctgaaaatattaaaatataaaattgcaaaaaaaagcaaagaacctaaaaaatggcctgaatttggttttaggcaaaaatcatttgaaaatgaaggcccctttttggcacaaagacaacaaaaaatttgtcctaaagtcgccaaaaccgtgcgtttgcggtaccattagattcagctcgctgagctgagtaaaacggtgccttatacgcgcagaaccgttcactcttcgacaaataccgaaactgtaaatttggtgacctactgaatttttcaaaaaa

SEQ ID NO: 471 - DNA, 2990 bp, Heterodera glycines
  unsure (1)..(2990): unsure at all n locations
aaaagcaaaattcntaaaaatcgcacttttacaaacaaaaaaacagaattttgaaaaaaagtttttattttcagtgggttttagacaaaaaacgtttgaaattggaggcccgtttttggcagaaaatccataaaaaacaataaaacccctaaaaaacaattcacttttttgttgccatcaaaatgtttgtccaccaaaagctcgaaacatggcgaaagaagtgccaatttgagaccgagttgaagtcggtcaaaaagggaaaatgtccattcaaaaagttattatgtacacaaccagctgaaaaaaaatcacaaaaaaagccaaagagggaaatatggatatttttatataagcaaatacccgggacaacagtgattataagagaaaaaacttggaaatacgatgattgaatatttatttaaattaaaaaattattttttgacaaattctaattgaaaatgcaaatgaattatttaattgaaaaacaaataaatatttaattaaaaaaaacttattaatcataaaataacttaatttaaaattaaaaaatttttaattattaataaaagcaaaacatttaaattaataaaagcattgaaaaataacccaaaatataaagaaaaataatgtacaccgtccggcttcgaacttgccccacccaaaaaaattatgcccagaatccccaatcacacagggattctgaggtttaacgatgtcttagatgaaatctgatcttcgcgctttggtaacttcgctacctaggaacagaagaggtacaacagtgatgagaagaggtacaacagtgatgagaagaggtacaacagtgatgagaagaggtacagcagtgattagaagaggtacaacagtgattcaaagaggtacaaccatggtttaaatgaataaataagagaattgttttattaaatataagagtaaaaattggatgcattaaaaaattttaaaaataaaataataatccttttcattattaaaataaacttttaaatgtataatatgaaaaatttattgaaattgaaaggaatttatttgttgaaaagtctaattaaataaaacttttattcatcaaaaaaattaaacataaatcaaacaaagaatatttaattaattataacaaataaataattaattttaatacaaatcatttatcaaaaattttttatttaaattttaaattaaaatttttattaatttataaatcaaactattttaaattaattaaaaacatgtaaaaataagctaataatatatagaaaaataatatacaccgccctgcttcgaactttcccccctcccaaaaaaatgatgacccagaatccccaatcacacagggattctgaggtcttaagtatgtcagaagtaaaatctgatcacgtattcgtgatcagcgtcctaaattggcccaaaagacatatttttggaatattttcggtgaaaaaatttttccactcaaaaatcctggtcacccccctttggtcccgaaccccaaaatcacttttatttctataacttttttcaaaaaagtgataaaaagctaaaataaaatttataaaatagagcaaaaaattgcggatttttatattattttacttttccaaaatatcttttcagaaccgagttcagaattttttactgaaaattcgaatttttccagaacttctggaataactttttttagtttcatgatagaaaatctaaataaaacccataaaattctcctgattttttgctatttttaaagctttgttgtatgaaaattgacttaccctgaggttagttatgattttcaaaatttaccccaaaatcccgagggtcaaaaaaattggaaaaaatttcgaatttttagaaaattctaaaaattatgaaacgaaaaacaaaggtcatattcgtaatcagcatctcaaaataccacagaaaaaaatttttcaccccccttttcaacccaaaaaaaattttcaaaaatttctagggggcctagctcgaaaatttttgaaaatttccgaacatttagtacaccattcgatagaactttaaaagctctacaattttgccctagggcaatttttggctataaccaacccccgacgagttatgggcccgggactcaaatgtcccgctgaggccaaaatttttttctatttccgtgaaaaaatcgaaatttttctaaaaataccaccaatcgatagagctcgaaaaacgatgttttggaagtggtctccgttttcccgggaaaaatcgttaaaaaatcttaaaattcaaaaaccaaaaaatcgttttttaggcctagctcgaaaatttttgaaaattttcgaaattttaaaatttgcaaaaatcgagctcattgagctctacaaaaagtctgctggcgccccctggcttagatcaaacccgggcgtgctattcgcctggtactgaagtgtccaaaaaaagtgattcttacgttgcctaacctacaggtcaggcctttgatctgatcgaaaaatttttgctggcaaagttgtaggccatagttggggcatttcgcttttggggtccgctaagctctgaaagcaaaagcaaaaaatttcgtaacactgagactggcggcaaagtcagttttcgagccgctgggactcagttggccaccggaccaaaaaatccgtatttttcccggatgccccgtcccagggtgcatatgtatgcaaaatttcagcctcctacctattcccgatcccgagaaatcggttttagcaacgaaaccccttacctatataacatatatataactagcgtgttggaattgacgggggcggcgtaggcaattggcttttggatgaagagaaaatggacatgctcatttgttattttaaaacatacaaaacattaattgcattagtgtgctgttttaaagcgctatcgcgtatgggggacgcggcttcgccgcgtcgctagaaagtgatgttatttagaaattcatcgcagcctcaggacgg

SEQ ID NO: 472 - DNA, 5593 bp, Heterodera glycines
ccgaattggacagattgatcgagttgggtgttctccatttgttgactacagcagatgggccgcaccaattgtggcagtgcgcaaagcaaatgggaaagtgcgcatatgtttcgactttagcactggactcaacgcggcactcgaaccacatcatcacccgctcccacggcctgagaaactttttgccaaattaaacggcgcaaaaatattttcccaaattgattttaaggacgcttatttgcaaattagcgttgatgaacagtcgcgtcaactcttaggcgttaacactcacaagggactttatcaatgccaacgcctggcattcggaatcaaaagcgcaccaggcatttttcaatggacaatggatcaattggcaagcggaattcctggtgttgttggctatatggacgacttcatcattgcttcaagcacagtgaacgagcatttttcaacaatttttaaattttttaagcgaattcaagaattcgggttccgaattcatatggacaaatgcaaatttttagttaaggaaatcaaatttttgggtcaaattgtttcgtccgatggtatccgtcctgatcaaaacagaacacgagcactgcaggaaatgccagcaccgacggacatcacaacactccgatcattcctcggggcaatcaattactatggaaagtacatcaaaaacatccatcaaatcagagcaccactggatgaattgctcaaacagggagtggaatggcaatggaatgaaaagcaccgcgaagcttttgaacaagcgaaatcaattcttttgtccgatttagccttaacgcattacgacccaaatttgccaattattgtcacagctgacgccagcaacaaaggaatcggcgcaacaatttctcaccgttttccggacggaaaagaaaaagtttttcaacatgctgcccgaacattgtcaaagacggaacagaattattcgcaaattgagaaagaaggacttggactcattttcgcaattcaaaaatttcaccaatacatttttggtcgaaaattcattttacgcactgatcaccgtccactgctggggatttttgggtccaaaaacggaatcccgattttttcagcgtctcgtctacagagatgggcactgattctactgaattacgacttcagcttggaattcgttcgcaccgacaacactggacaggcggatgtactgagtcgtttgatcagcgaacagcgcaattctgcagcaagcgaagacatggtcatcgctcagttgtgtgcagaaactgagtcggaagttgagcatcttttgaatgtgcagttggaacaacttccggtgacagtagacgaaattcaaacagcacaacaggacgacgaattgatcagggaagtgatcaaatttactcaaaacaaatggccaaaccatggcattaatcccgaaatcaaaccgtttttctcgggaaggcagaaattatcaattgtttcaggatgtttggtgtttaatggtcgatcggtcatacccccatcactcaggcaccgcgttttgaaggcacttcacttggcacatccaggaatcgttcgcatgaaaaatctcgcgcgaactcttgtgtactggccttcgatcgattccgacatcgaagaaatcgtgcgaaaatgccgccaatgtcaagaagcagcaaaacaaccgcaaaaacaaccgctacaaccatggccaacaacaacacaagttttccaacgtgttcacattgacttggcaggaccttgtagtgatggaaacacgtatttggtaattgtagactcattttcgcggtggcccgaagtgtttatgcttcgccacacgtcatcacaacatgttattgaacaattacaatggctttttgaccgatttggcattccgaaaacgctagtttcggataatggtcctcaattcagttcatcccattttaaagatttttgtgacagtaacggcatttgtcatctcttttcgccaccataccacgcacagtcaaacggagcagccgaaaagtttgttgatttcttcaaaagacagttgaagaaatgcagtggggataaaaattggttgaaacaatcacttttgtcttatcgctccatcccaattgcagttttaaacaatcgatcaccagcagaactgttcctcggccgaccactcaggaccaaactttcgctcatgaaaccggaacggccgaatccattcttccgaggcccgtatcaacaacgcatggcacaacagtttgataagaagcatggagcaaaaagggtagagtttaacatcggcgacaaggtgcaatttgtgaattaccgtgatggaaaaacattatggttatttggggaagttgtcaccaaaaaagggttaatttttggcattcgttccccacaaatcgcaaacagaattgtcactcgccatgcaaatgccatacgactcacacaagcattgggcactgatcaaacatggccaaattttgatgaagagcccaagaagaacaaatcacccgttcgagcaccacaaattcagcgaaatgtcacaccaacaccaccagccgaaagaaaccatgatcaatttgaacagaacgaagaagaacagaaccaacaacaaacaccagtgttgcggcgatcagaaagggttacaaaacgtgtccgtttcctgagtccaaggatgacgggacaacgacacaatattcgccagtgatcagacttttaagagagggaggtgttgtgtgggcaatcatggacctattatttatatttgtatgcattcctttttcctcttccaaacattgtactctgtacccaatcaataatgccctccacagaccaagtgcataaatacccttcgcttctcctctccctcgtctcttctcccattcattattcaaactcattcctcttccgacttctctcatcacttcttattcccttttcatttattatttgttgtgtgtgaaaataaagtttttacaaagacacaacaaaacacatcccctcccgacagtaaattctttaaactaaatttaacgattttaaatatgtacaattaattattagatgaccaacagcaaactaatccatctcaacaacgggaaggtatctgcgataattgaaaatattttaattatttttatttaattattaggtaataaccagcagtcaaacagcagcgccctcaagaaatgaaattttttttcaattattatttgtttcaggtgctcagcagtaacgcaacctgactctttaaagcattaaaacggaaaaaggaaaagccgaaaaagaaatcataacgctataaataatagactaattaaaagcatttaaatttataatttttttattattatgacagtaaccactggccttagttctatttttcataaatatttatcgcataaaaacccgataattaagtaagaaatttgttttaacaaaacaaatatttttttataaagcattagagaaattttctaatccatgtgcaaaaaaaaaagagcttttcgagtgccctcccctaaaaattttttctgggtactgtttcctatgatttttttatcaatacattttgtgcaattttggccatttaataaatttgaatttttttaaaaatattaaaaatttcaattccaacgtggactaagattaaaaaatgaacccaaattaagaagaaaaaaaatgaaaaaatttatatggaaatgcaaccggttcaactctagctaaattaagatgaacatcaaattatgtcaaagttcttttggcaaggatttcaaaatggtcgggtgaaagtggataaacgccgtagttatcgcgagatcttgaggagaattaagcttgaacttcaaataaaagggttaatttttggcattcgttccccacaaatcgcaaacagaattgtcactcgccatgcaaatgccatacgactcacacaagcattgggcactgatcaaacatggccaaattttgatgaagagcccaagaagaacaaatcacccgttcgagcaccacaaattcagcgaaatgtcacaccaacaccaccagccgaaagaaaccatgatcaatttgaacagaacgaagaagaacagaaccaacaacaaacaccagtgttgcggcgatcagaaagggttacaaacgtgtccgtttcctgagtccaaggatgacgggacaacgacacaatattcgccagtgatcagacttttaagagagggaggtgttgtgtgggcaatcatggacctattatttatatttgtatgcattcctttttcctcttccaaacattgtactctgtacccaatcaataatgccctccacagaccaagtgcataaatacccttcgcttctcctctccctcgtctcttctcccattcattattcaaactcattcctcttccgacttctctcatcacttcttattcccttttcatttattatttgttgtgtgtgaaaataaagtttttacaaagacacaacaaaacacatcccctcccgacagtaaattctttaaactaaatttaacgattttaaatatgtacaattaattattagatgaccaacagcaaactaatccatctcaacaacgggaaggtatctgcgataattgaaaatattttaattatttttatttaattattaggtaataaccagcagtcaaacagcagcgccctcaagaaatgaaattttttttcaattattatttgtttcaggtgctcagcagtaacgcaacctgactctttaaagcattaaaacggaaaaaggaaaagccgaaaaagaaatcataacgctataaataatagactaattaaaagcatttaaatttataatttttttattattatgacagtaaccactggccttagttctatttttcataaatatttatcgcataaaaacccgataattaagtacgaaatttgttttaacaaaacaaatattttttataaagcattagagaaattttctaatccgatgtgcaaaaaaaaaagagcttttcgagtgccctcccctaaaaattttttctgggtactgtttcctatgatttttttatcaatacattttgtgcaattttggccatttaataaatttgaatttttttaaaaatattaaaaatttcaattccaatgtggactaagattaaaaaatgaacccaaattaagaagaaaaaaaaatgaaaaaatttatatggaaatgcaaccgcttcaactccagctaaattaagatgaacatcaaattatgtcaaagttccatcgtaattgttttcaagaaatcatgtcgaatgcggatttgggataaagaaatttagaaatattgttgaataaatataatagcccaagatagcgccattttaggtgcgcaggatttggatggttgccaaaataatgtctcaacggacaaagtggacatcataaaaagcagtgttatcatgctgtgaaatgattttgtttcgctgtagtgtccagcgtgaagacaccatgaaggccgcattccgttctcatataatccctttctttttatcagtaatacccataagcagtcgatcatgcagactttttatcaagatttcaaagtaaaaaatgccgtgtaagctgttcagaaaaatcggatg

SEQ ID NO: 473 - DNA, 1714 bp, Heterodera glycines
ttataaagcattagagaaattttctaatccgatgtgcccataaaaagagcttttcgagtgccctcccctaaaaatttttcctgggtactgtttcctatgatttttttatcaatacattttgtgcaattttggccatttaataaatttgaatttttttaaaaatattaaaaattttaattccaatgtggactaagattaaaaaatgaacccaaattaagaagaaaaaaaatgaaaaaatttatatggaaatgcaaccgcttcaactccagctaaattaagatgaacatcaaattatgtcaaagttcttttggcaaggatttcaaaatggtcgggtgaaagtggataaacgccgtagttatcgcgagatcttgaggagaattaagcttgaacttcaaataaaagggttaatttttggcattcgttccccacaaatcgcaaacagaattgtcactcgccatgcaaatgccatacgactcacacaagcattgggcactgatcaaacatggccaaattttgatgaagagcccaagaagaacaaatcacccgttcgagcaccacaaattcagcgaaatgtcacaccaacaccaccagccgaaagaaaccatgatcaatttgaacagaacgaagaagaacagaaccaacaacaaacaccagtgttgcggcgatcagaaagggttacaaacgtgtccgtttcctgagtccaagcatgacgggacaacgacacaatattcgccagtgatcagacttttaagagagggaggtgttgtgtgggcaatcatggacctattatttatatttgtatgcattcctttttcctcttccaaacattgtactctgtacccaatcaataatgccctccacagaccaagtgcataaatacccttcgcttctcctctccctcgtctcttctcccattcattattcaaactcattcctcttccgacttctctcatcacttcttattcccttttcatttattattttttgtgtgtgaaaataaagtttttacaaagacacaacaaaatggcgcagtcagcctaggtatttaatatcatcaaaaagcaattggcagcaagtcgaatattctttaattctaattttattcgaacactcatttcgcccttccttttcccgtaacacatccttactgatcgttaagtcgacaagtagaccgctgacgttaacagttaaggaaaaggctttcttgaaatcgcaagccgtaaaaagcctctgtgatcactcttggaagtaaagtcggaattgggaacacacaagtcaaagcgaccgctgtatgcagctcaaattcgcaacttcccatttcaagggcttgtcttttcctgtttcattaacaatcaccatcatcactatcaccgaacttgcctgccaattaatcatcattcaaatataaatatctgacggccaaatcattcatttcatttcaaaatctctctgtcatgtcaatcacctcggaacaattaaaagccattttggctgaccaacaaaatcaatttgtcaaattgctacaaaacatgcaattaaacaccggccaaggacagcacaatcaagcacagtcctctgatatggacttgttttgtaaattgagtggccaaatttcggaattcctttacagtccagacgacaaccacacgttcgaggaatggtacgagcgattcggtccttttgtcgaacaggagggaaagcacatgctggacca

SEQ ID NO: 474 - DNA, 1005 bp, Heterodera glycines
  unsure (1)..(1005): unsure at all n locations
ggaaagcacatgctggaccagaataaagcgagactcatgntgagtaagttgggccctgacgagtaccgccgcttcacggaagtcatacaaccaanaaacaccggatcannagtcggtttgaatgagacgttagcaaagttgcgacaaatttttcccgaaatcaaatcaatttttattaagcgcttcgaatgttttcagcttaagtgtggacaaaaatcaagacgttctcgcatttggctcaacagtgaatgccatggccgaaagatcgaaactggacctgactaaagaccaaatcaaatccctcatttttgtgacaggtttgggagatcacaacatggagttgcgacaccggtgtatcaaattgttggacaacaacgcttcattcgaccagctcctgtccgagtgcaaggaagtcattgcccttcgccaaagttcggccgcactttccagcaaacaggatttcaattccaatgcaatccaaattcgtccgcataaaattcaggattttccaaagaaaaggaagccgtcgcacacacgcacaccgtcgcgcacacgctcgtggtccagtcaaccaaacaacaactcaaacaccccgcatggttgaacgcgtcaatcaaggacatttccaagcagtccatgcacacgatgtggtggtcgacattggaattcggactgccggtatccgatttcggttgtgtcacatttgtggtaagaccgggcacatttcaaccatttgccgggctcggaaacccaaatcaaataattttggcaaaaacaccaatgtagttgagtgtctgcacattacgccaaccgaatggcaatgctcatggtcaacagcaaaagtcgaacacgagccttacattgaacaggacgtggaatttgggacaaagagcgtaaaaatggttgcggacaccgggtcaaagttgacaattttgacaaaggtaacatggcataagctgggaaaaccgaagttattcaaaacaaatttgtgtggtcgatcatata

SEQ ID NO: 475 - DNA, 5392 bp, Heterodera glycines
tttccaatatttttccaaataattttaatccaatttgaattggtttaatgaacttcctttttaagtgcgggattctatgtaataaattatactttttcataatttcttatcctttattcataaaaatgacaaacccttgaagtaattatgtaaaccttcatatagtttaagagtatttccattttttaataattactaacttcatttaatgttgccatgtaaatatgttttaatttttatttatctaatcgctttcaaatataaatttcaaataaatttataattcaatttaatccaattaaatttataaattggcttacgcaatgtgatttatcctttctaacttaaactcgctgtacttgatcatgttgttacattttaccatgcggaacattatacaacaattatcatattgctttgtaaaaatttttacgttaatgtgtgaataaaataataataattttgtatagttttttcattatgtattgaaaataatattttttcgacttaaatttcatctttcttttacttattttttagccttatttttaaaattttctgtttttgatacgcgctctcttccttcgcttctgtaaattaatatttaaaaatttgagctcaatagctaaatttatttgaaattaagatgaattgtattatcattttatttttatgattttatcaatttagaaaaacctgaagtcttcttttattttgtttatgttttattgatatttaaaaatttttggtctcatgattaatatacacaattgttgtgttcgttaattatttgaattaacgccaaaagatgctcgtttatcgatcatccttttgacccttcgtgttgtccatttaaaccccccttttccctcattccgtgctttttctccctcattcatttgttgtttccatttaattgtgacccgctccctcccttcgctatttattatatttatttgtgtggaataaatcaatattattccattgactgttgaacggacacaacagttgttggcgcagtcagcgaaagcaaagacgagcgaaacaaaagtggagaggaacgacgcaacaaatcgtcaattggaattgctaattccgagttggaatagcaattgccaaatcgtctgagaataaagctaattcccagtggaatagctgcatacccaggaggttgcattctcaattactggtgttaatccgagttggataacagccagacgtcaatcgccgaatttggagaatttctacattcaattgttaatccgagacggataacaattgcgaatcactgttaattcgagttgaataacagtgaccgtccatcatcaatttcattgttaatccggttcggataacaattgacaatcactgttaatcccagttggataacagttgaccatccatcatctttaatttgatcctagtttggacaaattataaaacgcaacaatggcagcggttgtaaaggctggcaaaggaccaggcccttatacatcggaaacgtcgtggaccatttgggaagaacgatttgagtttttcatcaaactccgaggcatcactgatgcggagacgaaaaaattgctcttcttctcggagattgggccaatatacaaagagcttcgccaaatggcgttgccagacgacgtccgcgacatgtcaattgatgagatcaaagcgctgatggaggaacgatttggcgagacgaagacgattgcggcaaaaaggtttgagctgttttcagccaaacagacgttaggactgtccattcgggattactcaatccaacttcggaccttaattgccaaagctgaatggcataaggattcagtcgacatgtgcctgagcgctcttttcatcaacggccttaaaaaggattcaattcgggccgagttgataaagaagggagtgaacgaaatgaagttcaaagatgccgttgaaacggcagtgcttctcgagcagtccgacttggacgcagagcaaatcggtgggcataagaaagcggaagtggcgaaagtctttgctccaaagggaggaagaaagagtagcgcaccaacgcagcaaatgcaatgccatcgatgcgggaggaatggccaccgcaacaacgagtgcccgaacaaggactcaaaatgccgaaagtgcggcaatgttggacactgggctgtgatgtgcaagacaaagcagggctccaattggccaaggaggcaagggaagccggttcaccaggtcaacactgaaagccaaaaagcacacgatattggaacactggccaagtctgaagaagtcaaatcgatttcggtgccaccagcgatgataaaacttcagctgagtaaaaaggcgacagatttcgaattggactgtggcgcagatgtcacactcatcactaagaatgattggatgtccatcggaaggccgaaacttggacaaacttcaggattgatggcatatggaaaaaagccgatcaaagtccttggatcgttcaaaacggatgtggtgtacaacggcaaagaagtgaatgccgaaatttatgtcgtggacggcgaaggcaaaaatttgtgtgggagagatttgatcggtgaattgcaaatcgatctcaacaaagcgttcggaatccgatcgatcaatgaagtcaagtgcaaggcagtggatcgagagctgggagcggtgcttctaaagtacggtgaggtcttcaatgacggactcggccgatgcacaaggcaaatttcgttgaaatttaagccggaagtgcaatcgaagaagtgcaagccacgccccgtgccttttgcattgagacccgaagtggagaaggtcatcgacaactgggtcaaagatggagtgttagagcaggtgacaacgtctgagtgggcaacaccgttggtgattgtacccaaagccggaaacaaaattcgcttatgttgcgactacaaagtcacggttaatcaatggctcgacattcatcaatacccgttgccgcgcccagaagaattgttcagcgtgttgaacggaggcgaaaagttttcaaagttggatttgaaggaggcttatcttcaactaatgttggatgataaagccaaggaatgcttgaccatttgcacgcataaaggcttataccaatttacgcgtatgccttatggtgttgcgtcagcgccagcaattttccaacaagtgatggaagacgtccttcgtggaatcgacggagtcgccgtctacttggatgatattgtggtgacagcccccaacgacgcggaacatttgaaacggctggaaatgactctccaacgcatccaaaaatttgggttgcgtgtcaaaaaggaaaaatgttcctttatgcaaaagcaaattgcttatttggggcacatcatcgacaaagaagggattcgaacgtcgccggacaaagttgaggccatacagaaaatgccagcccccaaaaacttaaaggaattgcaatccttcttgggcatggttgggtattatggcaagttcattccgtcaatggcaacaatttcggagccgttgaacgagctacgccgatcagagaccaaatggcattggggacaacaacagcaaaaatcattcgaacagatcaaaattatgctgtcgtcgaacgagctgttggcccattttgatcccaaaaagccactttatttggcaacggacgcatctgactatggagttggagcgatccttttccacaaagatggaaacacaggaaagtttggcgtgatcgcatacgcctcaagaacattgagcccagccgaaagaaattatgcgcagaccgaaaaagaaggacgcgcagtaatcttcggcgtggagaaattcaaccagtacttgtacggtagaaaattcattctacagacggatcacgagcctttaaaaaggatttttggaccaaaaggtgaattgcccgtggttgcggcacgacgacttcatcgttggagtttgaagctcatgaattatgacttcgaaatcgaatattgttcgacaaaaaatttcggttacgccgatggattgtcgcggttgcctagtccagaaattgatcaggtctgtaaggaaagtctcgagctgaacaaaatccagcaggagagccaaaacgctttgccgattactgcgaaggacattgcgaaagaaattggcaatgatccggtcttcgcaaaagtaaaaggttttgtgctcaatggatggccgacaaggatagaagacgagaaaattcgcccattttttctggtaaaagacgaattggagctgaataacggatgcctaatgttgggatgtcggacagtgattccgagcaaattccgtgagaatcttttgaaattgatccacgagacgcatccaggaatcgtccgaatgaaggcattggccaggcaaaaagtttggtggccgggcatcgacaaagacattgaaagcatgaaaaagaagtgcaaaatttgtcaaacgaatgcgccggaaatgaggaaagtccctctccatccatgggaagtgccagaaaagccatggcagcgacttcacattgacttctgtggcccatttttcggaaaaatgtggctgatcacggttgatgccaagacaaaatggccagaagttgcaatgatgaaaagtactacgaccgaggccacgattgaggcacttcgaaaattgatttggacccacggattgccagaacaaattgtgtctgacaacgggccgcaattcgcgtcaaaggagttcgaagaattctgctccaaacgcggaattgaacgaacgctgacggcaccataccacccgcagagcaatggggaagctgagcggtttgtccaaacattcaagaaaggaatgttattggtaaaaaaagacaccaactgggacaacgaattggcaaagaaccaattcttactcaaataccgagtaactcctcattctgcaacaggacggtctcctgcagaaatgatgttcggcagaaagctgcgaacactgctcgacctcgtgcgcccgtccgaatcgaccaaaattgaaggaggagaagagaaggcgaaagaaaatgctgaaaagcatggccaaaaatatttggctcgcgccaaaaagaactttgatcgacggacgtggaaacgatcgtttaaaactggacaaagagtctttgccaggaattacagagacggttcgaagtggatggcaggccaaatcatgagccaaataagcccatcactgtttcttgtccgaacagcccgtggggtctggaagcggcacttagatcagctgaaatcggacgagacgaagcctgatctggagagcaacaccgacgtggactcaacatcgtccataggtgatcagacggaggatgaaaaggacggaggacagcagacggacgtggaagaagagccgaatgatccgccaaatttgcacgatccgcccattgaga

SEQ ID NO: 476 - DNA, 3773 bp, Heterodera glycines
gtccgtctcgtcgtcctcaggccggcgggaagcgcgtgattgtgtggctcaggtccggcgcgatcagcagcgtggcgcccgtgttgttcttgccggtgtagcggggggccgagaacagggtgatcaggtggcgattcgcgaagtattccacgccgtccatgacgagctgaaaaagaagggaaggggaaaaattattaaagcaaaagtgaaatgaaaagccaaaaaaaaaatcacttgatgcgctcgaacgatgtagtcgatgccgagcaggttgcgcacgctctcgaccacgtccgcgccgaacatgacgccggctcctctggtgttcgggatgacgccacgaactccgcgtacagggtccgaccacaaaagatcggtctcgagcgtccgaagcggcgggtcgatttgcggacgattcaggcggctgagctggtcaggctgcggatctgatcggagatgccaccgtgcatgcctgaaaatcagttggaaaacagttattgacccccaaaaattgccctcccccaaaacttacagaggatcttctcgccgaccagtccgacgaatggcatccaggcgaagacttgattgaagaggtcgaagagtcgacgagcgcccggtcgcgggtaacggcggtcgatctcatcgtagaagccatacctgaaaatggggggggggaatgattaatcacaaaaaaagacacacaaaaaactttttcacttacactctgttgatgttggcgcactcgtggttcccgcgcagcagcatgaagttggacgggtatttcacctgaaaaatggggggaaatgaattacattttttgggggttccctccccccatcccccaaaaaccacaccttatagcagaaatgctgccttcgcggctttgaagagctggcggatttcatcgtcactgatctgttggggaaaaaaggggggggggggaaattaatatttgaaaaactcaaaaatttttctacctcatccgtgaagcgatgaggaggcgaacggttgacctttgcgatgatcgcgtcaagggaggcgcttgacagggttccaccacgaaggcgcaatacgagatgaagagtagactccttctggatgttgtagccgggcaaggttcgtccgtcctcgagttgtttccctgaaaacaagggatttgtttaaaacaatggttgcctgaaaagcaatttggtcaaaaaatccaccggatttcaactgaaaagcaatttggtcgcgtaaaagcaaaactgatcacaatttggtcaaaaaatccaccggatttcaactgaaaaattttcaagtttctggaacagattccaataaaatacagacactaaataaaacaattaaaagtttctgttcctaaacaagcatagaaataaaagatatgtgcatttatttgtgcatatgttaatatatgcaattttcattaatctccctcctttttatcacagtggagaattgggacaacagaatgatatttgggtttagatttccttcgcaaacagttttttctcctaattaatttatactttgtgccaacaaatcaaatagagttcccatcccctgaaataaagcccccccccctttttgagatggattgaaaaatagagccccagggggccctatttcaagaaatacggtaactttttaaatgcgcaaatatttgaatcccgagcggcaatttttctatcaagaaatcccggcacattttgccaatcccgagcattaacatgctctaattagtgcccggacagtgtagagttttctagttttgcatttttaagcaagcactgccgcttccgttgacaatagcacacaatccaccgccgtggagcatatcgcttttcaaacaccaaatggtatcaattggttaattaattaattacataattaattaatagcatttatattaattaacgtacactaatggcattttaattataaaaatccttttaaattaaattatttcggctccaatgcaatttacgcgcccaatcactgaccaacctcggtttcttaagccataactttttttttacttggtcaaaacttacattcttggtatcaatcgagagcttaaagttcactgaagtttttgtatagaaaaatgcctggataaaagcaatagacaaaaaattactgttgaatatacgcgaaaaatgatgaattcaggtttttttcattgaaatttttttcgtaatgcaaatatttgctcttttcttgtacttataaattctcgagactttaagctttcaattgataccaaggatgtatggattgaccaagtaagaaaaaagttatggcttaagaaactgaggatggtcattgattggacgcgtaaactgcattagagccattatttttgctcaatttttggctgaaaattatgtcactatttcggacttcttgtcactatttcttcactattttggcatttttactcactattttagttaactattttttgaaaaaacgaattttgcctatttttttttttgcttacaatgtttattcacacacacatagcatatacatacatacattcacacacgcaaatattgaaatgacaacagtttttgggggagttcatcatgtgaaatgggggtttacaatacaatacaacaatggggggtcagatgatccgatttctccacacgcatcgctctccgggcagttccaccatccttctgtgtgcagttagtgtgtgtgcgcgttctgtccgtccgtctcgtcgtcctcaggccggcgggaagcgcgtgatatcttctcgccgaccagtccgacgaatggcatccaggcgaagacttgattgaagaggtcgaagagtcgacgagcgcccggtcgcgggtaacggcgctcgatctcatcgtagaagccatacctaaaaatgggggggggaatgattaatcacaaaaaaacacacaaaaaactttttcacttacactctgttgatgttggcacactcgtggttcccgcgcagcagcatgaagttggacgggtacttcacctgaaaaatggggggaaatgaatttcattttttgggggttccctccccccatcccgcaaaaaccacaccttgtagcagaagaggaggatgatcgtctccatcgattggggccctctgtcgacgtagtcgcccaggaagacgtactgctgctccggcgggaggccatgcgttgagaagatcttcttcaggtccgcgaattgtccatggatgtcgcccacgatgacggccggcgggtggattctgacgagcgtatcctgatctcgaaatgctgccttcgcggctttgaagagctggcggatttcatcgtcactgatctgttggggaaaaaagggggggggggggaaattaatatttgaaaaactcaaaaatttttctacctcatccgtgaagcgatgaggaggcgaacggttgacctttgcgatgatcgcgtcaagggaggcgcttgacagggttccaccacgaaggcgcaatacgagatgaagagtagactccttctggatgttgtagccgggcaaggttcgtccgtcctcgagttgtttccctgaaaacaagggatttgtttaaaacaatggttgcctgaaaagcaatttggtcgcgcaaaagcaaaactgatcacaatttggtcaaaaaatccaccggatttcaactgaaaaattttcaagtttctggaacagattccaataaaatacagacactaaataaaacaattaaaagtttctgttcctaagcaagcatagaaataaaagatatcgcatttctgcat

SEQ ID NO: 477 - DNA, 2093 bp, Heterodera glycines
gggggtcagatgatccgatttctccacacgcatcgctctccgggcagttccaccattcttctgtgtgcagttagtgtgtgtgcgcgttctgtccgtccgtctcgtcgtcctcaggcaggcgggaagcgcgtgattgtgtggctcaggtccggcgcgatcagcagcgtggcgcccgtgttgttcttgccggtgtagcggggggccgagaacagggtgatcaggtggcgattcgcgaagtattccacgccgtccatgacgagctgaaaaagaagggaaggggaaaattattaaagcaaaagtgaaatgaaaagccaaaaaaaaaaataaactcacttgatgcgctcgaacgatgtagtcgatgccgagcaggttgcgcacgctctcgaccacgtccgcgccgaacatgacgccggctcctctgttgttcggggcgacgcctgtgatgctcgtcgacgggtcggcccagaggaggtcaatttccagcgaacgaagcagtggctcggtctgcgggcgaagcaagttgctgagctggtccaggctgcggatctgattggagatgccaccgtgcatgcctgaaagtcagttggaaaacagttattgaaccccaaaaattgccctcccccaaaacttacagaggatcttctcgccgaccagtccgacgaatggcatccaggcgaagacttgattgaagaggtcgaagagtcgacgagcgcccggtcgcgggtaacggcggtcgatctcatcgtagaagccatacctaaaaatgggggggggaatgattaatcacaaaaaaacacacaaaaaactttttcacttacactctgttgatgttggcgcactcgtggttcccgcgcagcagcatgaagttggacgggtacttcacctgaaaaatggggggaaatgaatttcattttttgggggttccctccccccatcccgcaaaaaccacaccttgtagcagaagaggaggatgatcgtctccatcgattggggccctctgtcgacgtagtcgcccaggaagacgtactgctgctccggcggcaggccatgcgttgagaagatcttcttcaggtccgcgaattgtccatggatgtcgcccacgatgacggccggcgggtggattctgacgagcgtcggctgcattcggaagacgtccgtggccgctttgcagagctggcggatttcatcgtcactgatctgttggggaaaaagggggggaaaattaatttttgaaaaactcaaaaaatttttctacctcatccgtgaagcgctgaggaggcgagcggttgaccttcgtgatgatcgcgtccaggaagccggttgacaggccgtctccttgcacaaggtccgatgccgctcccgattgacgccgagactgctcagccgctgctgctgccgttgcgtcgaaacagtaatcctccattgaagttgttgggccgggcacgtccgcttcgtgtgtgatgaagtgttgtagacgatggacgataataataataataataatataatatgagggcgatggagtgaattgtgaggaaaagtgaggaaatgtcgcccttttatacaacttttttccccttaatttcggaatttttttgcttgtctatataaaggcgagcattgcaaaattttctctcattcattgcgtccgttcacattttaattcttcaattatgcgcaagatcgtctacttcaaactgttgcaaattgtgctcagtttggccttcgtgtggcaacttctttcacttcaccaattctgcggcacatttgtctgtccaaaggtgtgctgctgcttttgttgtttttgccaattttcattttcaatttttttgtttaacgctgtttccatgcttttcagcccttcgatcatgacatctctgttgttcactgcaaacgcttttcgctgatcgtaaaggactcaaagacgggcgaattcggcgctgtgttggacgagcgcataatgacacaccaggattcagagccctcatagcttactagctaacctctaagcaaagttatgccatgttttgtcgaaaaattcgctaaaatctttaatggtacgaaacgaccctgcacgacttgaaaatcttgtt

SEQ ID NO: 478 - DNA, 3870 bp, Heterodera glycines
  unsure (1)..(3870): unsure at all n locations
aaaaaaaacacttacgattcccgccccctcctatgcagcgccgacgagaaagtgagaagtcattgtgtccgttgttgggcgcactgaagtcgttcgttcgttgattgggtgttgtgtcagcagcaaatgtgcaaatggacaaaaattctccccttttatatgcattttctgttgcactttttttcagtgggaaatttgaatataaaaaggcgtgaaattgagagaaatttcattctcgtcacattcttaattctattctctgcactattacatctaattgctgctgctcatcgactccatcgacaacgacacgcgatggaagaactcgtggcgctctcccctggaatccgcgtcggccgctggacgatcacaaagaagctgggcgccggagcattcggagccgtctacctgtgcgtgaacgaccaaggagagcaggccgcgctgaagacggagccggtcaacacgccacatccgctgctcgtcatggaggtaggcgggggaggaagggcggaaaattggcaattcaattttaaaatttttttcaccacccaggctcacgtgatgaccaagctggacacccttcgagacggagacgggaagcacttctgccgctgcttggacctcgggcgcgatgagcaaaaggaccaacaatcgggacaaatgaagaagttcaactacatcgtcatgtcactcgtcggtcgtggcctggacggagtcgtcaaggatgccggcggccgcctcagccttggaagcgcagtcggcgtctcgatccagatgctcgccgctctcagaggactccacaccgtcggctacctccaccgcgacatcaagccgggcaacgcaaccatcggacgtccggaatcaaacgaaatccgcctgctctacctgatcgacttcggaatggcgcgcaaatacaccagggacgacgtgagtttgagtgaagcgctttgaaaaaacaaaaatgatttgttccctttcccccctttttcaggggagccatcaccgcccgcgcactgccaccaacttccgcggaagcccccgttacgctgcgatcagcgctcatctcggacgcgaatacagccgcaaggacgacatcgaatcgtggttctactgcatgatcgagctcttcaaaggcgcacttccatgggccagcgtggtgggcatgaacgaggtgagcaaatgggggagggagggataatcagaattctgatttcattgttttttcagatcggcgaggcaaaggtcaaacgccagaagaaacaaccggaagccgttcgacgccaggcaatcgccgacttgctctccggatgcccgaacgagttcggccaggtcctcaaatacatcgtgagttcgttcgttcgttttttccaaaattagtaaactaacaaattaaattttgcaggacgacatgaagtacaccgacaagcccgactacgactggatcatcgcgacattgcgcagcagcctcagcaacgccggcgtccaggaattcccctacgactgggagacgggcaagcgcaacgcggcaccgggcggcggaggcggcggaggaggagggggaggagacagctacttcaactgatgagccgtgcagcagcagcagcagaagaatcgccaagaagcgtcaccgtgcagaattgatcatatgaccactattactgtattgtatgtattattttgtgtccatgctgccatccccgatatacacatgtattgtattgttgacacatgtattgattgaaattgttgttgcataactgtgtttgtacatatgacttttggcgaaataaaggacattttgaatggaaaaacggagcaaatccaaatcgaaatgggcaataaaaatgccaatgattgcacaaattagggatttcgatcgaaatttctaaatgagcaaaaaaaatttctgttctaaaaagtcgtgaaaacacgttttatggggtttttagggtcctggtcacgaatctaacattcattttgatcaaattcgaataccggacccgaattcgaataaaaagtcgaaaactcaaaattttcgaaattcttacttttgttcctaaattgatctaaatacgctaaatttagtcaaaaaccattgaaacatcaaaaaattgaaaaaaattttccaaaaagggggggggcatcggtagtattacctaaatttcttctaatcgtttttacgtttattcgatcaaaatgtattaaaatattttatattttttgcttcctactatcgattttaacaatcaaaattatgaggaaacgtggcatttaaaaatttattgctcgatacatcacatatatacaatatacatacagtaattggtgaatgacaatatatacacatatgtacagtgaacaaaagcagggcaaatgaacatagagacatcgttaatcacatacaatacatacataagtataataatatcatcactcagagggcatcacatcacatcaaatgtaccattcgcccgtttgttgctgcggcccttccggcggcggtgtcgctggcggttgcgtcccctgttcttccggcggttgcgtcgtcctctgttcttccggcggttgcgtcccctgttcttccggcggttgagccctctgttcttccggcggttgcgccctttgttcttccggcggttgcgtcctctgttcttccggcggttgcgtcccatgctcttccggcggcggttgcgctcccggtagtattggtgccgtcctcgctatctccatctccacacgtcgacgcacttcctccctgtatcgtgccgggtcgctgcggaacaaaacctgaaattttgnatgaaaatgatatatattcattcatatgccgaagaatcattccacttacggcagcatccacattggccggactgttgaagtttggctccaccaacagcagttgaatggacaccaaaatggactccacggttcggttgcgattccaacgctcggccgcctgctcgtagcccagtggatcagtgccaggctgatgaagaatgctgatgcagactttgccactcgtgtcaactgaaagggacgggtgggggcttttgctgggatttgatgaatcattgcgcgcttttcttactgttcggatgaagaatgtcggtgaggaaagtcattgttggcggataagacgggaacgaagctgggaatttgagcagtgccgtaaacgtgcatcccgcgctaaaaaaaggagaggggagggattaatggggaaacaattaatttgattgatttgcacttttcctctgccgccgccgcccactactcactatggtgtatccggcggaccatcgatgaaaatgcgccatttgaagatctgtttaaagggatgggactgaaatattcgtaacggaaaatcggatcagatcagttcggtcggtcgctgcttctctcacattgccatcgttgatacacgcacggaatccgatgttggcgttcgagttctgcagcagcatttcgaactggcgcatcagcacacgtctcgggctgtccctggcgttggtcctcgtcgttgttgtcatttgcggacggacggagtcgagtcgaacacaacacaaaaagtcacacaccgcagcagcggcgatcggagcggattggcggcagaacagcagcacagagaggtgagttgcagcaaaaaggcgctgaaagagaatggagaggtaacagcaccaacagcaaatgaaggaaagagagggagggcaagtgatgcgaaatggcgtcaatttcgaccaactccgcagcctggacccgaattcgaaccaaaagtcgaaatttcaaattttccgagtttcacatttttggttcaaacccgacttaaatacaaggaaacaaaacataaaagtcatgaatgcttcaataaaaaaa

SEQ ID NO: 479 - DNA, 3210 bp, Heterodera glycines
tgatcactcttttccaatcttccatcaaattttgggcattttatttttttccaatggattagtcctttccaataaaaatggtcttccgttgcccggtcaaaaatgccattgacgatggcccatcgtccgtccgttgtccgtctgttccgccaacggtctgtcaactgcgacccgcaatggctgatcagatgcccgggccgagtgaataggatcggcgagcacatagtctacagtgactactccgtgcttcagatggctattgagcacagcacatgggtgggtcggttgatatacgacactcactctgatcagaggatcggcactcactctgatcagagggtctttactttgatcagagggtctttactttgattagaggatcgtcactcactctgatcagagtcccaattgggaaaattcgaattaaatttttgattcaaaaattcttgactcagattttcacttttggaacctttatttttcttgagtagctcgacccaatggtactcatttctctgatcaggtcgctgttggaccatcgccggaacggacggtgcaattggtcaacgaagaagaagaaaaatacccgtaaatgaaaattaatttttaaaacgtttgaaaggagaataaaacataaaaataaaaattaattctttatttttagtataattttcgaaagtgaaaattgaataggcttttaggcttgataaaattaacaaatataatttaaaataattaattctttatttttgaaatttaaaatcaaattttcgcttcttaattaatttaattatttttatcttaaatagtattaaatatttctaaaacaattaattaatttccttccaagtcccttcactttggtcatttccgattcgttttccggcgcttcctccaatggcgccgtgcccaaatggcaccactattttttggcgggttggcgcggcattttggagagtttagcccaacgggagggtgtcaacacagagacagaagccttacaaagagttttagcttcgaaaataatcaaaatttcattgttttttttgtgcgtaggccaaaggaatgcgtgcggtggtggccagtcgaattccgccaagtgccggactgagcagctcttcggcattggtctgtgccgcggcattggccacgctttgtgtgcaaagtgccgactttggtggtggtggtggacagcaaatttttgaacacatttcgaaggtgtgccaaagcggggaaggaaacgcgcaaatttgagcaaatttgtagggatgtgcgagagtctcgactcgagaaatttctcgggtttttcgcgtctcagtctcgtccctcggggtcatttctaagtctcggtctcgattctcggtaaaaaatcatttctcgcacatccctacaaatttgggaacaatgcccgttactctttttaaatttggcgaattgttgcttgcagaaagaattggccgaaattgcgacccacgcggaacgctttgtcggcttggagggcggcggcatggaccaggcgagcaaatggcataatttcgaattaaaaaacaatttttgtgccattcattctccgtaaggcgtgcgaatgtttggcgcgtcggggcgaagcgttgcgcattgacttccgtccgctgggctggcgagcagtgcaactgcccgagaacgcgctgttcgctgtgctgcactccaacacggagatgaacaaaacagcgagtgcctattacaatcaggtgggagaagggaggggggggggggaagtgatcggacggagagacaaaaagtgatcaaagtgaactcaatgtgaagcagggagggaaactgattgatcagtggaagggggagacatgttgagaagcaatgatagagaactaaagatcagagagagagaggagagatgatcagacaaattgatcactaaaggagccattgctgaggaaaatgatcagaaacaaaggcaaaataaatttaaaatttaactaaattatatgaccaatgaatggataagaaaactttgatcaaacacataagttcattgatcggaaaaacaatgatcggcactttgttcctaagagggttgtcgagtgccgaatcgctgcccaagtgattgccaaacaaagcgggtgtttgccggcggacactgattggcgttctgttcgaaccctgcggcagggtataaagttgggtggttagacatgattcggatttctcgggacccgaaaaacttttcttggccaagtttcagttgctgcactgctcggcaaagatggccatccggagcaaatgttgacgctggtggacgagcacttggcaaaacggtgccaacgccaacagcagcagaaattggcggatggcattcacacgagggaggaaatttgtgccattttggactgttcagacgcacaattggcccaatggtcgttgaatgcgaacactcagaacagtgaggagaatgatctcgaatcagaacaaatcccagggtttcttgactctcacaattaaattcgacttctacccaatgatttaaatgccaatttgagacttttctcggcttagaaattggatgcttaatcagaattgcgacattgctttttctctcacttcatttaattcatcacaatttctccaaaaagtgactgagttttggctggccaagcgggcacggcacgtttatgcggaggcggcacgagtgttggaattcgaatgggtgtgccgtgaagggagagaagacaatggcacagtggcaaaattgggcggtaaattgagacaaaattcatcattcaatgaccaatggtttcccgaacagaactgatgaacgcttcgcatttgtcgtgtgcgcaactgttcgagtgcagttgccccgagttggacgaaacggtggccaattgtttgagtgcgggatgcattggtgcccgactgacgggtgattttcacggagttttttgcctggtttagtggaccaaattctataaattttggtgccatcattctaatccattcaaaatgctttaaaagtgatgcttgggccctacttttgtaggaaaattatacaaaatttcattattatttggacgtccaaaatgcgggtcatggtcgttttcgtacgagcccatatttttggctataacttttttattttcaaccaaatccaacactgttgttatcattcgatagccctatgtgtcctctataagcctgcaaaatttcaaaaaa

SEQ ID NO: 480 - DNA, 9916 bp, Heterodera glycines
aggggggggacagctttacaaaaattacccgtgttttgctcatttccaaaaatggtcttaaagccgtacaacgaatgtgccaaattcaattttacaaattaccaccccctcccatcaacaaatggtgaaattcgcctttgtccgctcacctcgagattgtaacgcatcacggactgctcgtgtatcttcttgtagtgttccttgcaactgacgccgagttgcagcatttcgccttgcattttcaggatttgctgctgctcttggaacgccaaaggcatccgcgagtcgagcgactcgaccgcctgaaagagttacgggaaagtcagtgccaagagctgaggagccaaacctcgatcaaattgttgacgaccgccggggtcgaagtgacggtcgggtcgatgtcgggcaaaggcaatatttgaaaggcatcgtcggccaatttcctgcaaagaaacaaaatcaaaattttaacccaatttcccattttgccggacttgaatatttctggcacttaggcacgctctttaacgctgaactcagacttcgctaccgacgatacattggtggaatggacatcgtctccgatactcggagtgaacgtgacgtgttttttcatttttaaaatcaaaatgcaaacttaaatgcttaaaaaactcataggttgtaatttggggcccacctcgtttcggcgccagcatgattttggctatagcttttttctttgtcatcaaaacccaacattgttgatatcattcaaaagcttaacatgtctaaagctttttctaagctattgcttcacgattagttaactaccaaaaaagttatacatgaaaattgcgaaaagacgaagttttttaagttttttcttaataaattttttccaggcataaaattttttgtttttttagcaaggctaataaagcatgttaaagctttcgaatgataccaatattgttggatttggattccaaagaaaaaagctaccgtggaaaaacgagctgacgccgaaacgagcgaccaaaacgggtgggtccctgtaatttgcaaaaagccaataagagcgaaataggtactaaaaagataaaaaaaaaagcgtcgcactgaaatgtacggcactaaaatggcactaaccgtaaacttttggttgactaccgtaagaataaatttcattttggcagcgccaaatacataggtaatttgagtaagtatgctcgtcgatgcgactgctacgactgttacattatttctttaatgtgtttgaaatccgaacaaggggaaggcaaaaaaagaacccaaaaatggtgtctgtcggttacataaaagctgcatttagggttttcgtttctttttttgataatgtctgattctcaaaaggatgaatacagcttggagactcccgtcccagtaagacaacactcaaatttggtttgcgttatgtcgaaaatgtttttttagtctccttactcctcttcaccgccaccagttccgccatccatcatgcatcatccactgatggtgccgccgcacacaattatgaatttggaagcttctcaacctcaatggatgacagattcgtttcttcccacaatggcttctcattcggtgatttgtgctccgtcctcttctgctgctgctcctccacgactgtcacaaatccaacaaatggcagcaagaagtgatgatggcaccacgccacaagcatcgaaggtaagaaattgatgattgcaacaattttggtgcaatggttgttaaactatgggtgggttaatatacgcggggatgacttgtcatgtttaggctactgagaagtcggtagaagttggaagcagcaacaccgccgccgccgcttttcacgattatttggcatgtgcgcagatggtaagaaaaggcatttcatataaacatttgtttatcggttgtgtgtaagtataaagaattatttttattatattttttctttaaaatttctcaaaattgcataacttggtcatactttgacaaaatctgtcaacaaatcacccttaaattacaaaatttttccctccgaaccccccccccccccccacaaaaaaagttttttttaaaagcgccgcaaaaaaccttttaaaataaaaatattgtcgcaaatttgctcaaaatctaaaattttgaaaatcaaatttcgatttacatgacaggacacaccccaaaacgtcgccggacaaaaaaaaattaaaatttttcagcaatcgtcatcatcggaccctattcttaaccacacgccgccgcctcctcctccgccccttcggccttttcatccgcctccacttcctccacaaggcaaccgcaactttcttcggtcaccgccgtgtcttctcccaccctctccgtcggggactgtcgcctttttgcacacgccaccgcctcctcctccgcaccctcgggccgcaattcctcctttgatgatgcagatgtcaacagcgactacaccgactgcaatgcgactctaaggttgctcacaagctccttcgctgtaaccgcttcgggttacatcaccgaccatgttcgcccgttccgccggggcaccatttccttcacacatgactttgccggacacgatgatgcattttggcccacctcatacttctccaatgcctttacggatggcaccgccggacacaatgatgcattttggtacgtctcgtcttgctccgatacctcttcgtatggcagcgaggccaatgttccgatctgcctctcattcacaacttcaacaaatccaaccaatggtagcgacaactgatggcaccatgcaacaatcattggaggtagcagaagcacattttctggttcaatagtttaaaatacgcagcgggctgatttgtcatgtttaggcaactgagaagttgggagaatatgggtgcaactccgccgccgccgcctctgttgatgatgatttggcatgggcacagatggaaattccgcccgagtttggacagcacaccaaattcttcagcaacaaggaattgttggaagataacaggtgtgaggaaggagagggtggggtcggcttttacaaagtccatggcatgttttattgttaattgttctaaggattggttgctcatcgtcaggcggcagacgcggcggtggtgcgggtcgaaaaggcggcggacgcggcggtggtgcgggtcgaaaaggcggcggacgcggcggtggtgcgggtcgaaaaggcggcggacgcggcggtggtgcgggtcgaaaaggcggcggtgttgcgggtcgaaaaagcggtggtgtggatagtaaatactatcaggtgattcttttattagtaattaacacaccaacaaagagattgttataggaatttacaatttatgcattgttcccatgacctttctttctttatccccttggttgcaaccctattccatttataatgagaaagtccatctcattttctccattcactattttttgaccaaaaatgaaccctaaaaagagtaaaattccacccgagttacttttcgagcttgtttcttttcttccgtttgacattctttgggccatcacaagggtttcctatgtttttgatcgttttctatgggacaggcaattttggtggattcgaaatgttttaattcgctgggaggcagtaaggcgaaaagctgtaaaattttttgtaaattaacaattatttaagcaaatgacattctccggcgtttgcgcacgacttcgtgcatcctcaaaagatgctcccgagactgttcttatttgggcaaaagaaagtatatctttagccacttaattcatgaacttattttgaaaattcagaaatatgtgctcatttttccatttccatcggaacttttaacaacgaagaattcacagaaaaaatgaaatatttgtatggactgtacaaggatgtcagtactgaagagctaaagatccattgcgaatgtaatttttgtagttttttatcatttcattttgaattttagttctgtctggcatttgtgatgaaatgaaaagacacaaacgaatggcttgggaatccggaataaacatggcagtcaattctccacgggactgtgttccctccacttctggtcagtctaacattgtccatacatcgccagaaaatgtccatcaatcgaaaaagtgtcgccgagacgaacaggtaacggaaattgattgctcagaaaacggggaattgtcactgcattatattatttcatatccatgcgtctctttttagattccatcagaggagtcagacgaagatggaaacgatccgacgttcggttggaagggaacggactgaaggtgctgtttggagcgaaccgtgcgaggacatcacgttttcccattcagtggatgagatgaaattcacttgaacaaacagaaaacaaaaatgtgttttaattttatttaaccgtaagaatttttagtttttaagttatgatgcttacttttatttacctgtttgtcagttcgaattatgtaatttatatcgttaactttgctgacataaaaattaacataccgttcaagaaaaagttttggtttgcagttttttaatatatagtgatgaaaattttattatcataaaaattttgcaaggcaagagagtctccctccccctattgtttttgataaaattcaaaagtccattttttaagtagtgccgaataaagttatttagcgtatatttttatagtggaaagaaaaaacattttatcaaataagtccatcatatgttccatctcaatcgacgcttcttcatccgtcatttgtttgccttggccagcaacgcctccgccttcgctaccatttcctcgtacgcactcttcgccttcaccaatttctgcgcgacaactgcgccctccttcagatcgtcgatgtttttattgacactcttctaaaaggggggacgatttaagataagaaaaatgacgaaattcccattttaaatagttggctttttgggagatcatttgtttcattaatcaaaatgaatttcaattcgttatcagcggtacgaaccccccataatttgtaagaatgttttatgaccaaatttttatattttatcaaaaatggaggggtgggacagccttacaaaattacccgtgttttgctcatttccaaaaatggtcttaaagccgtacaacgaatgtgccaaattcaattttacaaattaccaccccctcccatcaacaaatggtgaaattcgcctttgtccgctcacctcgagattgtaacgcatcacggactgctcgtgtatcttcttgtagtgttccttgcaactgacgccgagttgcagcatttcgccttgcattttcaggatttgctgctgctcttggaacgccaaaggcatccgcgagtcgagcgactcgaccgcctgaaagagttacgggaaagtcagtgccaagagctgaggagccaaacctcgatcaaattgttgacgaccgccggggtcgaagtgacggtcgggtcgatgtcgggcaaaggcaatatttgaaaggcatcgtcggccaatttcctgcaaagaaacaaaatcaaaattttaacccaatttcccattttgccggacttgaatatttctggcacttcggcacgccctttaacgctgaactcagactccgctaccgacgatacattggtggaatggacatcgtctccgatactcggagtgaacgtgacgtgttttttcatttttaaaatcaaaatgcaaacttaaaatgcttaaagaagcacacagaagattgtaatgtaaacaagagcaaagtaagtaaacaattggatcggacccatcgatcccacgatgagtcaccgtcggtgtcgttttaaaaaaagttaaaacggatcgccaatctaatgtcagattcgagattagcgtcctttgaaaactccaagttgttatccaaaaataacaaaagaaaacatgggaccctattcttcacgattgtcgacatttcatattatttgccagatttaaattctaaattttgtcagaaatgatatcctttaaataaaatatcatgaaatggaaatgttgatatgaacagcttaaaaaattaaatagattttaggatgcaagtatcttaagtattgaaaatgctttcattgtacacgatgctcgagttttccctgttggtgctgaacggcattgcaattataaaccgtgaacgagttctgaacaaggttaacaaacacattgttttttatccaatcgttttccccttattttaagtatttgaagaatcggcagcacagtttcggagcagaaagtgaacaatcggttgtattcaggctcgtcaatttaatttttgcagttcaaactgttcttagaggttccgtttaattaacttttttgctttattaaaagtttgactcttttagtgcctctcatcgtcatgaatattattgttatcatcataaagctgttgtttggatgaaaatatgccttggccataatcatatatttatttgcagtttattcgttcgttccttcggttgtcattaaattttttcttgttactgactgataatcttttccgaattttctatatgccaatgaaaaattgacttaatcattccaactattttttctcacatttgaatatgtaatttgcttttttcgtggtcatgtttgtcagtattggtgctgcgctgtcttcgagtcgtttttttcgatgttcaacagttgcgaaagcattgtcttgcagaagatcatcccattttaccttttaccccacagcaaacacggaatttccaaacgacaccggaaaaggtcataagatttgctcgaattttgaaatgtcaaaacattgtaccccccgcccccccatcgttcctctttttaaaaaaaattgacgtttatattgctaaacaacgaaataaatttaagttactgaacgtctcaatttgtgccagtcgatcaacaaagctatgcacatcgcaatggaagaggacaagaacacaatatgttttggcgaagacgtggctttcggcggtgttttcaggtgttccgttggtcttcaacaaaaatttggtaacaattttctgggtcgattgtttatgcgaatttaacctgctgaatcatttagatacttattgtttaaatgttacaggcagagaacgtgtgttcaacacgcctctctgcgagcagggcattgtcggttttggcattggctacgcggttgccggacatcgggcgatcgccgagatacaatttgccgactacattttccccgcatttgatcaggttccatgcaggcaaatgtgatttctgggtcattaaattcaattttgtattccagaattttgatacattttaattcgagatatttgactataaaatgtccgttcccacagattgtgaacgaagcggccaaatttcgctaccgaagcggcaatcaatgggcatgcggaggactgacaattcgtgccacttggggcgctgttggtcatggtgccctttatcattcgcagagccccgaggcatactttggccacacgcccggactgaaggtgagatgtcacttattgttaacctcagtgttttgataccacgaaaccatttttggcataggcgcaaatgagtgaacacggaaaaaataaattaattttttatccgtttctttatttctcgaacaccgccaatttccattaattgggtgcttccgtaaatgtccaagtgaagtgcacattatttaaattggcaaaaaaagagaaaagcgtttgcacttaggtgcgaagtgccatttggcatcatttggtgccaatgtttaaaagctttgcatcagtacaactcacgcacatttatcataatgtttcaccaacttcaacctatgattttcatgataaaaattgactaaacgactcgaaattctttaggttgtcataccccggggtccaatccaagccaagggtttgcttctgtcgtgcatcgaatctcccgacccgtgcattttctttgaacctaaaattctctacaggcaagaattatgcaaaaaaaaagttattcattactggaaattttacagaaatgccgttgaagaagtgccgatcgacaaatatttgctgccgcttggcaaggctgaggttgtcaaactgggtcagtgcattttaagtacaattagacgtaaattacgaggcaaataatccttaatttagggactgacgtcactttggttgggtggggcactcaattgcatgtactgcttgaaaccgcagaattggcacaacaacggttgggcgtttcgtgtgaagtcatcgatttgcaaacaattttgccgtgggatgtggaaacggtggccgaagtgcgaaaggacaaatctctagaaacagtcaaattatagtcctagtttcagttaaaaataatttcgactcaattaaattaaacgctcttcacagatggatcaattttaggatttgccttttcaagaaaattttccgagattttcccgcttttgcttttcagagtgtggctaagtgtggacgactgttggtttcgcatgaagcgccgatcacttccggcttcgcggccgaaatcgcgtccaccattcagcagcgctgcttcctcagcctcgaggcacccattgcgcgcgtctgcggctgggacacgcccttcccacacgtgtacgagcccttctatctgccctcaaaatggcgatgtctggaggcaatccgcggattgatcgattactgatttttcaccattactgacactgtggccctctcttttgccggtgtgtctcgtgccatgtcattatttcccctttttgctcattgttatgtttacacttatttctttaccaatccgacgtgtcattttgctatccgtttttcatgccctgtgataattttttgtattattgtattttgttcgccttattattgtacacttttttcactttgtgttaataaatccaagtcatttaatgtaaaccttaacaatcaatggttttttcccccttagaatatttaattttttttatgactattatcaacaatactgtgtccatttagggttacatcgctggcaatgttcgcccgttccatcgcttctccaatgcatcaacggatggcgccgtcggtcacaatgatgcattttggtacgtctcgtccttctccgatgccttttcgtatggcagcgaggcaaatgttcccatctgccgctgctccaccgcaacggatgacggcgcccacttcggttctgcccacaatggcttctccccctccggtgatttgtgctccgttctcttctgctgcgcatcctccaccgcaaccgcgccaattgccggctgtgcaggaggaaaaagacgagcgaacgttgcgcattgagcggatggccgaccaaattttggatcagcgacagctgcgggcggagcgacgggcgcaggggataatgtacgacgaggtcagtcacaaaacaattgaaaaatgcaattatatggggacaacaaattcatcttttaaggagatcatagaaggacgagtagtgcggttcaattatgccggcgagttttgtgaacagcggggcattggcgaaatacatagacaggtgagcggtatctttattaaaaatattttaaattgtcttttcagttgaggcatttcatgatcggctggtgagttattaacgttgttacaacagagaaacactgaaatcaaatggttgcgaaacaattttttaggatcggttaaaattttgcaatcatatttttaaatttggccggaaaataaggaaataaaaaatttattcgcagtaaattttccccattttcagtgcattggtcggtgcagtcacatttgcttttgtgaagattgaccttaagaagaaacggaggaggaaaatgtgggaaagacagaatcagttgtacgaagcggggaaggaagcaatgaaaaagcagaagcagcaacaatt

SEQ ID NO: 481 - DNA, 3307 bp, Heterodera glycines
ttaataaatccaagtcatttaatgtaaaccttaacaatcaatggttttttcccccttagaatatttaattttttttatgactattatcaacaatactgtgtccatttagggttacatcgctggcaatgttcgcccgttccatcgcttctccaatgcatcaacggatggcgccgtcggtcacaatgatgcattttggtacgtctcgtccttctccgatgcctcttcgtatggcaacttcgtttcttcccacaatggcctttccccctccggtgatttgtgcttcgttctcttctgctgctcatcctccaccgcaaccgcgccaattgccggctgtgcaggaggaaaaagacgagcgaacgttgcgcattgagcggatggccgaccaaattttggatcagcgacagctgcgggcggagcgacgggcgcaggggataatgtacgacgaggtcagtcacaaaacaattgaaaaatgcaattatattgggacaacaaattcatcttttaaggagatcatagaaggacgagtagtgcggttcaattatgccggcgagttttgtgaacagcggggcattggcgaaatacatagacaggtgagcggtattctttattaaaaatattttttatatttaaattgtcttttcagttgaggcatttcatgatcggctggtgagttattaacgttgttacaacagagaaacactgaaatcaaatggttgcgaaacaattttttaggatcggttaaaattttgcaatcatatttttaaatttggccggaaaataaggaaataaaaaatttattcgcagtaaattttccccattttcagtgcattggtcggtgcagtcacatttgcttttgtgaagattgaccttaagaagaaacggaggaggaaaatgtgggaaagacagaatcagttgtacgaagcgcggaaggaagcaatgaaaaagcagaagcagcaacaattgatgatggccacatgagagaggcgtaattttggcgtcgtttggacggatagtttttttttgtgggcacccggacccgacatatccgtacatatacaaggggtttcttgagacagggggagtggaccgtaacgaaggtagagaggaaattgcgcctagaagtccttaaaaaatacgatcaaaacgcgcaaaataaaaggaggtttgaatagcaaaagaagggtctccgtcggagaagatttggaccttcgtatgtaatatcggttccgagataccccccaaagacactctttgtatatgtatggacggacatatccggaaaatgtttcatctcaatgtaatttgctgtaaagagataaataaatgttcacaataaatatttcaatatgtaatattcttttgcagcttccaaaagtccatattcctttttttttctatattttacagctcttttcccttgactttggtgtcccaattaattcaaaacaaggccatttattcatttttgaatgctttccattcatcatatcagccaattcccattgaatttgttttgcttttatgtgagaaaaaagaaagaaatggaaatggcatttcgcaaagggaaaacgaagaagtgacgggagagaaagagagagtcggagagagagtctctcttttcgcttctcttcccttcgctgaaatggcggccattatccatttttagttcttcagtcatttctcattttttcattcattccattcaattcgcaagggcaatgggaggggacattaagggctcaatgagcaaaggaagggaatcattaaccatctaataataataacgtcattttcatttggttttttatctgtgtattttcgcgttttacttaattagataatttttttaattccgagctttttagtttcgagttttaaatgcttttttttgtaatgtctccaacagaaatttttggtttttaaaatctcgacaaacaatagtttaacaaattaattcaaatttttgagtatttacttcgaacacagcgttttcacgtttgtctgccacccccttttcctccttataattataacaaagcaattcatacatagccaactgacatcgataaaaaaatattcatttttagtgttcaatttctttttctgggtttgcttaaaagtcgctgtgcaaacaatgaatgaattacgcaagaaccccacaccaacaaaaaaagaaaaattcaatgattcttcttttttgcttgactcattaaactgtcatgcgttttggccatttctttctttatctctctccattttccctttttgtatattggcggaattgattgaatcatcctttacgatattcttttctgccatttactttttaatcgaagtatttttcagacagttcaaccaaacacctcaaagcttcattctcgagttgtctccctgtttatcgcattcttcgagtccgtaatcgcttccgggatagggcgtttatggacgtgtcatttgacgcgactaccctcaaaaccaatccaaaattacaccggaagagcctttagaacatctattgcccttcacacttccttcggtaagcattgtatgacatcaatttcgactgatttgtgttaatttttcagtttgtcgtccttcgcttggcactgctgaaaagtcactgcaccgaaccgcggccccgaacccgggcctcacaacacttggacgtgaacgcggagcctccttgggtttgtgtcgtccattcgcattacaatttaaagtagttgttctttaggaccctgatccgaacgcaattacctgacattcgttcctgtgcattggtgaaattgtcctccattattgttaggtttgtttctgtggacaggggatatgttattcaaattagaacatgcacattaattgggggttggccagggatgcttggtaatttggattagtttttaggaaggggtggctgatttggattttggcttttttaaaattaaattttaattgtccgtccatttagtgtcccatctattgtctcatccctttgtttctgccgacttcgtctttgaagcggcgttcttattcaacacgccaaaattcgtctcttttccaaccccaaaggccttttcctactccgtctttcgtcctcttccttcgtcactgtgcgtccccatcagttgaaggtcgaccaggagcgtctctcccactttcggttccgaaagtcggccgccttcgtccgtcgtctgaagcgaccgccctaatttgtttgtcctttcattcattggcaactcggcattatttggttggtactttaattgcaatttgcagatacacccaatcccgtcctaccatttataaa

SEQ ID NO: 482 - DNA, 1468 bp, Heterodera glycines
ccgttgcactgcttgaactttgggcccagtttctcccacgcgtgcagcccttttatgcgctcaattgcaacgctgacccaatgctgcttcgcttgatggcctctcatcagtctgttgggttcagctgctcatccggcgcagaaatgctcaatgtgaaattcaattagttttcatttataatgctgagaaataacccaaatcgaaaattttttataaattttttgccaggctctccattatgtgtcggctgaccgtgtgtttggcgcctttccctgttggactcggtcggcactgcgccaggcggaaacgtgtggcgtgtacacgctgtgtttcgacagtgagcgcgacttggaccgcatcttggccaaccactcaaacgccaggtagggaagacaatgtttggattactggctaactacatttattgtttttgtggaaaacggatttttttggtttctcgtatgcccttttttaattaattcatcgaagttagttgtcacactcttaattggccccgctattcattttcagattgcttttgcgtatctgcgtggacccctgcgcgactgatgcgaatgcgttgttcggagccccgcttgacgaggcagtcgaactgttgaagctgtgcgttcagttgggcctcaattgcattggaatttccctctcaactggcccttccactgatgataattgcaatttgtcatcatcgtctcttttccatttctcttccgtctatgcgtttgccattgaatgcagtgcgcgtctgtttcgcattgccattgacttgggcctacggatggacgtgctgaacattggcgatgcttttgcttgtccttggtcatcagcatcgactgaaaccgacgagtcactggcgcatttcgcggaggtatgaaccaaaaccgaagggacggaatagtaatcacttctttttcagttttgtaccgaatttaaccggtccttcgatgtccatttcccgtctgatggcattggccgtgggcttcgcattatggcaacccctggccaattctttgcgcgttccccattttcattggtcaccaatgtgatcggaaagcgaagcactgacgcaagtgcagtgaccaacaacggtacagaaacccaaagcattcgcttctttaacccaactcattaaatgcaaatttcagattttgatgctggcaaaaccgcttttcattaccagactaatgagagttattacggcacatttggctgtcgaatgatggtcaacaccgaaccgcgttgtgcaccgctttttgtaagcatataatttattttttctaataaaactgctgggaatccgattttcgtcgagattttgtcatattcctcaccagggcgcgattacatattaagtcactgaatttgaatcatttagaatgacttcgacatggacacggaacagaaccaatgcttttattatggaacagtgtttggtcagtcgggctttgac

SEQ ID NO: 483 - DNA, 3597 bp, Heterodera glycines
  unsure (1)..(3597): unsure at all n locations
aattttacccgatcaaaatgtcgttctcgcgtatcncacgctttctgctctggtagagaagccgtgcacgcagcacatcgacaggcccttttttggtggcacaatcggtcgaagcggtgccattcccgacggaaaaacgtttaaaaagggccgataattgggagctggacgcacgtggacaaagcaatgagtgcattctcaaaattattcgaaaaatccacaaattgtctttttttggtaatttgaaaaatacaggaatagacacaataaatttacaatttcattcatttatgagatttcaaacaaaaatagtaaaaaaacaatatttaaaatccgaatcatccaatcacttagaatttatgggcaacatcatcatcacttgactattttttgacaaaaaaaaacaaacaatttttgaggcacatttgggcataaggaaaatgtcacaatgaaaaattaaattgaaataaacaaaaacagagaattttttgttaaatacgatgaatgtaatttaaggcaatgaattgcaaatgatttaagacgatgatcaatcaattggatgtgcaaaattaactcatgaatgacaaaatgacagcttttgttgcggtttgaattttaatttctgagcccggcaaattttgactgaccaaaaatagaatttctgaaaattaccttctgtcattaaaatgttgttaatgaaaagaataggtacgtgtaaaataaagaaataaatacttaaaagtggaaaaaagcaacaacagcgcgctttttgagtcctcagcggcaaatgaacgggaaatacacacagaaaacggtggtacccatgaaaaagaggatgatgatggcgaccacaatgcagatagccaacattattttcagctaaaaaattggttgctcttttacagaaattaaaatgttttcaaaattttgccaaacatagcggtttattcatatttttttctgtcctatattaccatcgtcgtcaaaaaaaagaagcgaacttagaaaacccaaaatagtaaagctgatcggaaaataggaatcgatgacatacaatttcaaaaggggaaaaattgaaagaaaatgttctagagcccagtaaaatgtttgacgattggcagttgtgccaccatcaccttcatgttgcgcttctttgccacctccgcagctttcaccgttttgagggcgccgtccgcgtgttcctgcgccgtctccacattccgctcgatgtgatcgaccatttcaccctgtttcgtacaacaattaatggagttaatggaaaaatcccctgtggcatttcacctgactgtccacaaccatcgccaagtcctggaatatttcgtgcagctcgccaatggtcttctccaaccgcacaatgtcgtcatgtctgcccttgacatcctcgaacagcatcttcttgtcccgctcggccagcattatcttctgtgtgcgcaacaatgaataggacccaattcatgtggaccaacagaccccgacattgttgaacaatttgccattctcaatcgcacggtccacttcctcttccggcatctgaagacccgcttaaaggggcacagatgttcactttgtataaacgagacgacacaaaatattaaagcagccattctccagaaaacaggcttggcaccaagttgtaccagtccggtctttccccacccactttcagagtcggggtttcctaattccccactagatacaatgggcccccaaaagtgagtccgtcgttagtcgtgtgccctcccactgaccaatgtccaattggcgttgaatgcgtcctttgcaccgctctctgtagtccgtctgcgttttgttgtagtcggtcatcacttcgacgaactttcgggccagtgttgcgtgctgagtttgccgaattcgttggtcggcactcgctttttgtatccgaattcgaaagttgacactcggttttttccgaattcgcaggtcgacgttcgcttgtcctccgttttcgtcgtggtcgaggttattttcgatggctggaaatagaaaaaagtatttaaattctgctggtggagccttgtcttggcactaacaattccttttcgaatttcagttgaaagtagtgcaaatttttgaatgaaaaagtccaatccgaataattataaatgaaataaaacccaaaacaaataaaaagtaacaaatgaactgacatttcaatttcccgcgtactttgttcgcagtttttttgatctcgaccatcagttcgtccagctgctctttgatttctttaaaaagtttaaattgtcttttaaaaaattcgaaagtgactatttataaacgacggaaaacccccgccccatcccgaaatatgaataaaattcaatgaggaaaaattgaacccgctttttcttggtaaatccaaaaattttcgtttaaagaaaaatataggtaggttaggtcatcgtggagctatgtaaccacacgcctgccaattctacaaagtctgttttatcttaactctattttagtcttacatcttcacttttcctcaaaaaactcacttgggtcgttgaccgggttggacagaatggccgagtgcttctttttcacttcctccacgctcgtggcgatcaggtcgatgctggcccgaatctcttcaacctgctcgaaaaagtcttccatgaactgactttggctcgccaccaaatggtcatcctcggtcttgaaatgtttttaataacgcaattatcattaattgggaaaataaaacaaaaaaccgaccgtttttagggtccccagccggtccttcattggtctgttccatgacggattgcatttagcggcaatgttccgattcataccggacaactgctgaaaataccaaaagcatgtataaatatcgtaacaaaatggaaaaggcagtcatttctatttacctgaaattccatgaggcggtctttgaccattttttgttttcactctctaaaattaattgggatcaactgaatgtatagtgtaaaacccattaaaacaacatttgacgagatataacagtttaaacatccgtaaaaaatagcgtattttccgatttaaagcgattgaaaggcaataaatatggttgaaatcaaatgcttaagcacagagctcacggagaaaaggaatcaaaaaagagaaattgtttattttatttgttttttgggcactctttcgctgtgtctcaggtggccgcgtgcattcgaaggcgcttccaccgctcctccaacgaggaggaggaggacgaagtggcaccaccattctccaccaaagcggagccaacagcagacgacgacgacgaagcggaggcgacagttccagccgatggtccgccctttgaaaatgggggcaaaatttggaggagataagaaaaagtgacattttcgatgaaatattgcagcccaaattctgggacacaaaattttaaaaggaaaatgtaactttttttggttattgactaaaggtttaaaccaatgattcggacaaaactggtacttccatggaaaaaacgtaataaacaaaacaaaaaaaggcccgatgctgtgccagaaattcgccaaggtanaatcctgagaccattcccgc

SEQ ID NO: 484 - DNA, 11154 bp, Heterodera glycines
  unsure (1)..(11154): unsure at all n locations
agtcgctctttgatgctccgattcgcacgctcagccactctggcatgaaattggggagaagtgagcatacaaaagtgttcaacgtcttttgtgcggaaaaactgttgcactgcgcgggcagtgaattcctttccctgatccgttaacaccttccaaggaatatatttagaccttttgaatatatgttcaaaggcattgatcatgttagcgctcgtcttggtctttacgggttcgacaaacacctgtcggctaagggtatcaatacagactagcaagtacttgtagccacgattttgtttagcaattcggtcaaaaatagccaaatcggcctgccattcagtatgcaagccgggtgccaaagttggcaaacggcggtagcgccgctttgcctggcgatgcagtgtgtatgtacgttgggtagctaaataattttggacatcaattcgattaatttttggttgacttttccgcgcctctttcagaagcggttcaacgctcgtgaatgagacaggcgaacttaagtccttgtacaagaactcgagcaaacgaaattttttcaaatccatagggatggtttaaacttaagtaaagtgtttttataaattcctttgccggattggccttcgggaaataaatacctactcaattgtcgattctgctttgccctttcaataaattctttgaatgctgttggctctttttggccacgcttgtccttattcagcaggtgactaacaatatcatcgacactgctggttataaatggccgtccacccgctctcaagacctgtccttcctccgacacccccagagattgggcgtttttataaattaaatttaagatttccatttgtgtgggttgacgtttatttgtactcgacgcgcgtggagtttcataatcatcttcatcatcatcatcatcatcttctaattgttcaacattttcttttcgcgcacgcccaaccttgagatggcgacgcgtagctacaaaaatcggtcttttaatgttgaatggttttggcatggcgtcaaccacatcactcaaattttctaatttaacaccgacgggacgttcatcctcgtcctttttgagcttgttgagacgcttaatttcctgctcatatttgactgctctttccgcctcatttatggcgtcattattttttatttgtttaattctggcacggaccagctcaattggtgaaccgtcagacggtgacggtgttgccaaactctgataaatctcttcggggaccaacaaatagcgctttgtatgttgcattttacttttttttttaaactttatcaagcactatgtataattttcaatgacgttcgcaataagcggaagggcaatcgatgcaatgagccctacaatggctggggaggcncgtctccgtgctgtagcaaaaacgtttttggcagagcgagaacaacgtgtgcgggcgagacgacgaagcatctgtgcgtgagctttcagcttctttaaatgacgtggacgcaatggaactcggcccttttagaatgttgagacaaatttctaccaggcataatagttgttcatcggatgcgtctcgaataacaattttcgcctttttggaattagacagtgtctccaaaaaggattcatttcttgcaatcaattgcgaccctttcattttggcatataaacgatttgtttttgttcatatatatttgttctaaggcgaatctcttccgaactctcggggtgcatgtcaaccaaaaggtagccaaaatttttagcgcatgcgtcccggtaggcttccataaagtgggcggtcattgacgggaagaggtgggtggctattgtacggatctgaagagcacccgctgggtttcgcattaataccaaataatgtgaatttgtgcgagcgacgcgcaactctttgttgaacaggtgttgggtcaccaaaattacgctcacgccccaattgtgtgagccgcgtgtgaaaagcgagtccaaatactgttgactcatccccactaccaaatcatccaatattagcaagagtttttcttttttggcgcaatcgcgtacctgttccgcagatgggaccccgctgtgcacagttactggcaatttgccaatttttccagtgcgttgcaaattcaaaacattagtgttcaactctccgtagccataaataacgcgctcaatgggggtagagatcattttctctaaattgcgtagaagactcattacccactctgacttcccactgcatgtactcccagatacaatcattgtgaatggatgacgaaattgcaagtccacgtgttcaaagcttggaaacgaatccatttttttttattgcgcgttgatatttaatatatatatatatatatatatatatatatataaattgatttcattacagattaattttttttaatggatttaattcttgctaccgattggataaacaacgcttatcccgaaatggaccagcaggaccataataaggaaacgccaaaaaaggaccagcaggaccataacaatgaaacgccgaaaaaagaccaggaggatgaggaggagacgaaggagcctagctggatcagcctcattgacgaagagcagaagcaggacccgttcaccccaatttatgatgagccgccaagagcaagtattcaattttcttttttttttttaaacaaattggttaatttaggtaccccaaagacttgtgcttgtgcagaacgcccgcgcccgatcccgctcgtcgagcacttatgcaagcgcttcaactgtagcgcgcatgagctgcacgtgttgttccgaaacttggagaagcgccgagacattgtcgagcacttgcgctctgctcagctgcggaccgcccacctgcgcccttttgttcgaaatttcccggtgcgctgtaacgacctctccattctcgacgcccactcagtcccggcctaccgcggcttcttgggaattacggtactttttggcaatttggtggacataattaaagattttaggtacgaatgcattactacataaaacatggaatccgtttgcatcatcccaacttgccgtgtgtcgtagaatttggaggcggtgatcacaaaacctttttcccgcttgaaattctcactattatgttttagatgtttttcaatatttaattgttgttgtttttaaaataaatttgttgcgtaaaatttttgtccattttaatttagatgaaaatttctaactgtactgttatttttaaaattaattccttgaacacgcaacagtttttggctattgcacaacgtggaattaatacagaatataatccacgccgtttccacgcaatcatcatgcgaatccgatatggagcaaaaactgtggctgcactcatatttcaatcggcacgtgtcgtcctcactggagttccacaccctgatcaagcccaaaagtttgcagcaagggttctacgacgaattgaatacacgcaatgcagaacgatgacaatctatgagctacgtgtggtcaacattgttggagttttaacgtttgaccaaagaattcgagtggagaaactacaacaatctctgggtggcatctatgatcctacgatcttcccagcccttcggtgcaaattagataatggagccacgtgtctcatttacatttccggaaaagttattcttactggggtgaaaaatgtagaaaatttaaaaaattcatttgattacttgtctaaaattgttcctaattattttcggtaaattttattttctcgtaacaaaaaaaaaacgaataaaaacacaatgtaaaaaaattaaaaccatcgcgagtgacccggctgggtgggatcggcttcaatcaaagtcctctttcggcgttctgttggcggtagtggtggtggttgggcgtgctgttcgacatccattggctgtggagcatcttcgacgtacccaaatgggcgcgtttgcatcccagggcggacgcgtcccttagcgtagaagggccggtagtccttgtgggcctcccgggtgaagaggtcggcctggacgttacggtcaatctgcggaaaggagacgcggatggcgcgatgtgctccaccaccgtagacgaacaagtcgtcgttgtcaatgacgtcatcactaaattgaatttgtattattattaaaaaattaaagtggaaactttttacatgggtccatcaatgttgtacgtagacagcgtcagctccttcattgcatcgaaattgataagctgctgcgttgcgtaggagagacggaagctccgtatcttcagattcgcacgttcatccgctccatctcgggctgtgtgtcggatgccgtagttctttgggcctcctgcgacgaactccacgatgcgcctgtccacgagttcccgcttcatttgtcccaacgcttcgccctccggtacgcacggagctccaatcttgttgacgtaatagattgagtccgtgtctgaattaccgtcactgataacattaaacggtagaagacaaaccacagtagagaagctcagcgttgttcaatgccaacacttgctccatatatccgtacagatggaggcgtgcgtacgaagtgacaaagatggccactggaaggcagttggtcaatggtgctttggcgaactcgggtcgcttccggacgacgacacggtccatgtggtcggagacgtggacaaagtccagtttgtcgtaagtcgggtcgtcgagcagcttgtggaattcggcaggcgtgcgcgtgtactgtatctcagtgtgaccgacgcgctgcgcgagctttccccttcaaatcatttttttttaatatatcgtagaaaaaataaaataccatagagagttcgccaaagtcttggcgatcagacggagacccgggttgaaggccatcttcgtcgggtccagatgaatcccttccgtacgcagaaactctgcgacgaaggcctgacgttgctcttcggcgtcgcatccctccggccaaccactcgcctgcactttgagaccgacgaagctgttgacgtagctactgaatagcgtgtcgtcccactcagcgtagtcccacacctattgaaattggttcaaaaattacatcaacaaaagaaatacctcaaataggtctgtgacgacgtagccgagttgaagtgctttgttcagctccacgtgagtgtacgcacacacccacgatcgtttgtcgtcaccatgtagacacggtcgttgttgccgacggtccgcacataagccacacagtggaaatgtgaagcgctcgtccttggtacggtagccgagaagtggcacacggatgtttcgtggcgccagaacccgaacgagcagaagaccacggaaggtgttgttttctgggcatgtccacggaagaggtgccgtcggtggatggaggagcacttcacgcgtcagcaccatcgggttccccacggggaagggattcaccttctaagatgaaatattgttgaaacgaatccataaaaaaaaatgcaaaccatgacgtaagggtacaggctgacaatgtcgatgcacagcacctcttcgtcgtcggcgcacacgtggtggagcttgaagggctctgtgcgccctcccctcaacgcgtcagtgcgggggtccaatgggcatggcgtgaagacggcttcgtatcgttgcttcagctcatggtcacggcggaggcgctccttccactgacacccccagatgacatggagctcacacccatgttgatgttccaattcaaagaggcgtcgcatcgttcgctcgtacaagtcttcggctgttcgtcctgctgccaacttctgttgtcgatcagggaagcactcaggacatcctcaaaaaaaaaattttttatttaataaatatttattgattggaagataccgtgatagaaacatcccatccattcgatggccaacggacgaaggggtggctcccgtcgccaaagaccgtccacacggtacccagaatcctcgatgtgcgcctcccccactgaccagtcagcgcattgcacctgggctccatcgttttccaactcaaagaatcggatgtagcgacgagattcagcggaagcacgtcgtccacggaggtagccgccttctggtgagtgcaccaaacggttggcggggaggaagcatcggcggagcgttgcgagcgctaggccagcggcagttgaggcgcagagaaacggatccaggccttgggtgtgttcaccgatgagctgacgaaaccgaaggacagattcacggaggattgccacatcattgacgcagtacatgatcaactgctcacgaagctggaagttggagtcagcgtcgttgtcaccgtgccaacgaaggaatttggtccgtttttcgaccttcatcgtgtcgggcgaataatattctatggcaggaagaccattgagacgctgcagcagatgttggcgctgtatgtagaggtacgggaagaagggtttcaccgttgccagatgttgaggcaaatcgaagctcttaaccaaggcatccaattcacagaagaagtaattgatggagtccttgaatgtaattcgtcgttgatttaatccacgcaacttcatcgaataaattttgagccccgtcgtgcagagtcgcttcggtggaatgctgcggcgatgaagtgcctcaagtacgagatggaaatcgtattttccaccattgtgcgcaatgcagactgtgtgggccttcttggagccgtgcttcatcaaaaagagcaaaaattgctcaattgggtcattggcttcatcgtcgaaggaatgaaagtagaagcggcgctgattgaatgccggagcgccctctgggtgaggagtgttgtcgcctgctccattgacaaacggaggtgaagaccatcgcctcatctgttggccacgcaccatccgacagagacaaacacaatcaggagctcttctcccgaatccatcgttgacgttgattcccgctcgaagacatggctcgcagatgacttcagcaacgatgagaagcggtacgtgcttctgagcaatttggttgttcaattgcaggggccgctcctgagacgtttcagcgtcgaagaagcaaagacgcagcggaagttcgtcatcagcttcatcgtcgtcgaggatatcagcgtcgtcatcgtcgtcgtcatcatcatcgttgttgttctggtgagcagtcctgtcaagaagtggctggatgaagcacggctcatccagtgtgtgccgcccatgacaacgccgacagtcaattggtccaacgggccgatggagtggtgcgcactgatggttgtttgcataagcaacacgcccacagatccgacagaagcgcctccagtggcagatgggttgacgttggcgttgacctcggccatcaattggcgcaggagccatgttggcaaaatgatagtcgtagcaaccgtcgttcggaaatacgaagccacattcattgcagcgacgagaactgcttccaccatttggcaactaaaaacataataatatattcaattatttttttttttttaattttacctgttccggttgacatggaaacccggcgccaaaccgtaggcagagtcggcaaaccactttacagccagttgcatggtagcgcgcatctgctcttcgctcacagtcaatacgtagttcggcactttgaatagttgctcgatgcgccccacatagttgaaatgtccatgctcaagcagaaggcacaaattgaaattcgctgccacacttgaaagaatattttagacattaattgaaaattacaaaatactcacccctctcctttgaaaacaatccgatactcctgctccttctcgaacacgacaagccgaatttgtccaacaccgtgctcattgatgatcaaacgctgcagatgaccaacgtcctccaacgtgtacaagtccttgtccaccgcaattccagcacgtgtcagcagaaccacagcttctggcccatgttggtgttgtcgtgcggcatacgcatcgaaagcgtcgcgtccaccaccgttcggctgtctcgtctcacggtcacggagccccaggaggacggcacgcgccagacaatgcggtcatttggattgactacgcgcactagggactgcacggtgttagaaacactgtgctcagtgtcaaagtcacaagcacctaaattcattagaaaaatcaatattaaatgcagagtacaacctccacgctgagcatcagcacgaacggattcaaggggccatacagcaagaactttggttactgtagttccggcaagaagttcgattccagctgccgactgttcgttcaggcgttcaatggctgccgccaatgttgccgcattgttttgctccggtgggcggagtcggatgacgtacggtcgatcgaatccgggcgggtgaagctgaagcccaacgagcatcggtggggggtgaccttccaggacacggtcgagcagatgctgaatgagcgtctcgagcacgaggtcgggccgctcggcgtcctccagaggcaggaagcggatttcgcagagttcgcccctggtgttgcggagggtgttgcgcattggcgtcgtccgctcaatgacgaaacaatcctcaattggtcgtgtggcctataaatttagtcatagtaaaataattgaaaacaatcacaccccaaaaccaaccaattgagctgcccgtctctgaggaagacgcgcgcgtatcggtaccccaaagcgatggtcaatcgtctattaatgtattccaataaatattaaaaacataacaaaaaaaaatcattttctcacattattattttcgtcctcttcttcaattggaccagctgcgggaggggcgagtgtctgattgactgtacggcctccaccagtctgaaccgtagtcgccttaaatatttcgatatttaaatttttttgaagaaatgaaatgaaactcacttgtcctcccaaagtggaggcaaatggatggtggagtccagcactttgcggagccgtcgacttaacacaaaattcgatgataagaaaagtttgaaaaacttacctgtggagctgcggtgtgagggacgacaatggcagttttgccatcgacgccaatgcgataccaacagtccagatgctggtatcgggcccgcgcagtgcagttggtgaaccagtaggcactcccaatgtccaaagacgccagaacactggcctggtgctgccaacccgaagcttcaacacgttgaccgtcgccgttacgaagcacaacattggtcacagggagagggccagctggcgtttgttggtgcgggcggtggtccactgctactacggtgagacaaagcggcctgaaaaaaaatcatttaattgaagaaacattgtaatgaataacagacggcagcgggcggcccacaatagagacgctcccattcaaaaattgaatggtgtgagtgccatcgtcacaaaatggcgactaaaacagaatggttttccgattaaaaacaaagaaaaataccggcatttgctgatgtgccgcattgatgaacatgggttgaacaagttgttctacctgtccaaggggcggcatggcggcgttgaaaaagctattgggtcgagttgacattgatttaattctttttaatgcttaaaatttttaattaaaatattaatagaggacagggagacgaaatttagtattaaaaaaatgaacgaatgagaagaaaggtgaactcccaccttcttataaaccaatcaaccaatcgatatagtcttgtacaccttcctgcggcaacaaaaaaaaaatgagcgactaatcgatttaaaaactttttgcgggccgcctcctccggattctatatatgaaaggttctacgtgcgtacgcagaaactccatcaacgcatacgtattcttaatgcgtacgttgtctacggtagatgcgtgcgtaagcatccaatcgatattcaacactccataaatgcgtacgtccatcttcgcatacgtattcttgatacgtacgttgactacatgtctacggtagattaatgtatacggtagatgcgtgcgtacgtatccacatactcacgatattcaacgctccagaaatgcgtacgtccatcaacacatatttattcttgatgcgtacgttgtctacatgactatggtagattaatgttatacggtagatgcgtgcgtacgcatccacatactcacgatattcaatgctccagaaatgcgtacgtccatcaacacatatttattcttgatgcctacgttgtctacatgactatggtagattaatgttttacggtagatgcgtgcgtacgcatccacatactcacgatattcaacgctccagaaatgcgtacgtccatcaacacatatttattcttgatgcgtacgttgtctacatgactatggtagattaatgttatacggtagatgcgtgcgtacgcatccacatactcacgatattcaatgctccagaaatcgtacatgcgtacgatgcctacggcagatgcatcgtacgcagaatcccattacggtatcatacatgagtacgatgcctacggcagatgcatcctacgcagaatcccattacggtatcatacatgcgtacgatgcctacggcagatgaatcttacgcagaatcccactacggtatcatacatgcctacaatgcctacggcagatgaatcttacgcagaatcccattacggtatcatacatgtgtacgatgcctacggcagatgcatcgtacgcagaaacccattacggtatcatacatgcgtacggcagatgcatcgtacgcagaatcccattacggtatcatacatgcgtacgatgactacggcagatgaatcttacgcagaatcccattatggtatcatacatgcctacaattcctacggcagatgtattgtacgcagaatcccatttacggtatcatacatgcgtacaatgcctacggcagatgcatcgtacgcagaaacccactacggtatcatacatgcctacaatgcctacgacagatccatcgtacgcagaacgcacgccacccaatggtaccgtatcaccacacgcacaccaccgtattaccacgcgtacgccaaacgacgtacgcgtcacccaatggtaccgtattacatgcgtacgccatcccaatcgacgcgcacgccacccnaaatgacgatgcgtacgccttctta

SEQ ID NO: 485 - DNA, 2981 bp, Heterodera glycines
agtacaatgtattcagcgcgaccattcctcgacgcgtaatatttgcgttggttggcaattcagcatttcatggtgactacaaactgagtcccttcatgtttgagccgtttgatttgcgtgaaatttcgatacatgctggagggattgtctacccagctgttccttataaactaaatttttcaaaagatcactatgtctacgcctttgttgacatgtatgaggcactgggtatggctaattcggagcgttcatttgacatctcaatgacccagttcaaaaaagggtgggccttttttgtcatcccattgacatccacacttgacgacagctgtggatttgagctgttgagaagcggcacaacaaacgtacgagccacatttaattcaccaattccagttggtggtgtggagatgattgtcatgggagaatttgatcaaatgattatggttgattacaaccggcacattgtgaccgattcaaagcttggataaattataaataactttattattaatttagtttaaaatgaataacactaatacaacgaagccagccatacaaattttgaattcccctgaagagcataatgaaacccttttgcatgtattacttttttctcattatatcattgcatttcctgtgtttttgcttttttggttcgttttaattaggtggcttaaaagccacggtcatctatcgcccagcgaagccgagacagtaatggaagagattaaaaaaatcccccgccagccaccaatatttttcgcagcaaaataatgcaaagaacatgactacggtagattaatgttttacggtagatgcgtgcgtacgcatccacatactcacgatattcaatgctccagaaatgcgtacgtccatcaacacatatttattcttgatgcctacgttgtctacatgactatggtagattaaggttttacggtagatgcgtgcgtacgcatccacatactcacgatattcaatgctccagaaatgcgtacgtccatcaacacatatttattcttgatgcctacgttgtctacatgactatggtagattaaggttttacggtagatgcgtgcgtacgcatcaacttactcacgatattcaacggtccagaaatcgtacatgcgtacgatgcctacggcagatgcatcgtacgcagaatcccattacggtatcatacatgagtacgatgcctacggcagatgcatcctacgcagaatcccattacggtatcatacatgcgtacgatgcctacggcagatgaatcttacgcagaatcccactacggtatcatacatgcctacaatgcctacggcagatgaatcttacgcagaatcccattacggtatcatacatgcgtacggcagatgcatcgtacgcagaaacccattacggtatcatacatgcgtacggcagatgcatcgtacgcagaatcccattacggtatcatacatgcgtacgatgactacggcagatgaatcttacgcagaatcccattatggtatcatacatgcctacaattcctacggcagatgtattgtacgcagaatcccatttacggtatcatacatgcgtacaatgcctacggcagatgcatcgtacgcagaaacccactacggtatcatacatgcctacaatgcctacgacagatccatcgtacgcagaacgcacgccacccaatggtaccgtatcaccacacgcacaccaccgtattaccacgcgtacgccaaacgacgtacgcgtcacccaatggtaccgtattacatgcgtacgccatcccaatcgacgcgcacgccacccaaatgaccgatgcgtacgccttcttaatgtaatgcggccaggtgcgtaccgccctcttcgatggacccctcccgttgagcgaaatccttcgacgactccctccaaacgcagctgcgaactcccaccgccgagcgcgcgggcagctccaccgacggacctcctccctccaaacaaaaaccttcgacggacccctccccaaacagctgcggactcccaccgccgagcgcgcgggcagctccacgacggacctcctccctccaaacaaaaaccttcgacggaccccctagagcagctgcggactccctcccgccgagcgggcgcctccaacgacggacccacctctcgccttacggaccctctctcacgccgggcggaccctctctcacgccgtgcggacccctcacacagagcggaacacgcaggtgcggaccttctgccgcaagcgggcgcctccaacgacgaacctactccctccaaacaaaaaccttcgacggaccccctctccacgcagctgcggacacttccaccttcacccatccccccttttcaacatcacaaatacaacatttaatctttttcttccaacgactagccgggatctcgagccgagatctcggccatcaccgggaccgagcagcctattctcgaccatcaccgggaccgagcagcccataggcacgggccctgctggcgagagaggttagacggtgcactctctcgtcgctgtagaggctagagagtgcactctctcgcctcaaaagaagccaacaggtttggagtggaaatcaatcgataattaaagtggctatacattgtagtatcgtaattacgctcaaaaagctcctcaaacaattttagcgcttccaattccttctacaatcgcctttatacatcccattatgagcgctaaaattatcagagtgccgaaaatcgcatgtcatctaagcctagcaaaaaatggtgtaagtaaaaatcgtaattacgctcaaaaagctcctcaaacaattttagcgcttccaattccttctacaatcgcctttatacatcccattatgagcgctaaaattatcagagtgccgaaaatcgcatgtgatctaagcctagaaaaaaatggtgtaagtaaaatcgtaattaaggtcaaaaagcttttcaaacaattttagcgcttcccaatt

SEQ ID NO: 486 - DNA, 1214 bp, Heterodera glycines
ccccccccccccctcccgccgggcgagcgggcacctccaacgacggaccccctcccgccgaacaaaaaccttcgacggaccccctagagagctgcagtctccctccctccgagcggaccccctcccgccgaacaaaaaccttcgacggaccccctagagcagctgcagactccctccctccgagcggacccccttttcaccatcacaaatacaacatttaatctttttcttccaacgactagttggccaagtggttaacgtgtcaggattcgcctcccaggttcgagtccacttcagtttttaaattttctgcttaaattctcgcgcaccacacgacagagaccgggatctcgaaccgataatagccgagatctcgtgtcgagatctcggcattatcgggaccgagcagcctattcgtgtcgaggcgggaccgagcagcccataggtacgggtctgctggcgagagaagttagacggtgcactctctcgtcgctggagaggttagacggtgcactctctcgccccaaaagaagccaataggtttggggtggaaatcaatcgataattgaagtattctgttattgtagtcttgctttttcaggaaaacctttattttagacaattgaaaatttttgggctaagtactgccccaatgaaatgtgagtgctttttgaaagacgttggccaattcacggggccataactttgtgatgccaaagtaaaaaccataatcaattggtcaaaagttggggctaatataatggaataatctggcaaagtttcattaaattcactttattacatgaattattgtgattttaaaaataaaattgttagatactttgcaagaacttatacaacacccaaaaaataaccggtcgtgtatttaaatgtttaatattatgaaacaacaataggcagttgagctttttgattgttattttggagattattcatcggagtttgctgttgtacaacggcatttggtctcctgcataccgtatgtcggatgaaattggcgaccgccttacggtactcaccgacacagaaaattgagaccagcggattcagtacgggcagccaatgcaaaggaagagtgacgcacatttgaataaacagaaaactcggggacaattggaaatcaaaaatcaacgtttcaacactgagtataatgcttattatattcataatcaacggtataaatgcctgaaata

SEQ ID NO: 487 - DNA, 7167 bp, Heterodera glycines
tctatcgaccaagcacatgaaccaaatgtctgaacctgcggttcctctcgtactaagcaggattactatcatagcaacaggtctttagtagggtaaaactaacctgtctcacgacggtctaaacccagctcacgttccctattggtgggtgaacaatccaacgcttggcgaattctgcttcgcaatgataggaagagccgacatcgaaggatcaaaaagcgacgtcgctatggacgcttggccgccacaagccagttatccctgtggtaacttttctgacacctcttgctggaaactttacacattcaaaaggatcgataagccacgctttcgcggtccgtattcgtactgaaaatcaggatcaagtaagcatttgcctttttgctctacgagaggtttccgtcctctctgagctcgccttaggacacctgcgttacgctttgacagatgtaccgccccagtcaaactccccgcctgacactgtcatcggcgcgggtcgccgggccaccgggtggcccgacttaacaccaaaatggacaccctttcgggcgcactcccgttttaccgattaagtaaggaatcgatgaaagtagtggtatttcactggcgccttgcggctcccacttatgctacacctctcatgattcttcacaaagtcagactagagtcaagctcaacagggtcttctttccccgctaaatttgccaagcccgttcccttggctgtggtttcgctagatagtagatagggacagtgggaatctcgttgatccattcgtgcgcgtcggtgacttaggggatgttctcgtcgccgtagactccctttagagtgtcaccaggcttttggcatctgcgtccctggacgggttgctaacccgcccaactcagcagggcccactggcagcatgatcgccagtgcggtatcccgatttgcgctatcgagattccttccatccctacatacacaaatgacctacgggcgcaagcacccataggaggaattcgaggttaccagctcaccaccatacttccagggttctcacttgtgcttcaatgctccgaccttcatatactctacggggcatttccgcgaacagaggtggtcaccgtttccactggtggcttgccgtgggcttagatacatacctccttccatctaccggtgtaggggctgtcgacatctgggctacgactaagtctcggactcgctcctaggtacactcaagtgcgcccggataacatgtccagaaccaattatcgcagcacgctgtatcgactcaagcaaactcgggattcctcgtttaggtatcccaagttcactcagcctcttcgttatatttggtaatacctcgccgcacgacccaactactatcgggaccaccttcactgttgggaaactcgtaccgtacgcaaggcctaacgcatgtttcaggttaggtcccggtatttcagcttccgctagttccaatggttcgatcatagaatttatggcatatttccgccactttatgagctcctgtttaaccaggttctctctccatggcaccgaaatttccacaataaggatcgtacgtgcttttttatcgaatattaccatatcgggcctggtgctacgcagacccgtataactcgtactcccatcctccctagggaggacgccagcaggcgaagtatgcaacgcgacatcgtacaggattttggcatgttcattctcgattaccgcatgcaaaggaacgacatgagaagaaacgggcagtccatatttcctgcataaagccgtgtgtacttgccgtacaacaccgttatgtcgatctaacatagttccagtccgtgaccaagcacaaccactaaggatatgctgctcggtttcaacacgaccgtccccacatcgtcggcaccactttgctttcgcatttatatgtggacacataagctcccgcgctttcaactgtccctcctgtgctgcaatgcagtctcggaacgaacgcctgccaatcctcgcacggatcaaccagtggtagctatgaacctggtcgagctctggcaatgacacgacccgacctcccataggtctacctttccaggcagccaagcgtcgcgaatcattctccttacggaggatttttacgattgctctggcaccccgagttggttccatgaatatcatttcccctactcggaatcctggggaggcatccccatcaaggtcagatactcgctgggcggaatttttcgagagaagggcataacttcggaacactttacgcgctcctttcgcaatgctctgttttataccgcttctagcactcctgtttaaggttccaaaaagttcacgagccagctccaactcgggcctacattgcacgtaagcccaacagtaaatgatagactcagacaaagtgtcctctacggacacgaagccaagtccaccgtactgtacgcggaggtacaagcggtcagcactacaatgcttaaaccgccatcccggctcgttatctcttctttcccacaggaggcgtcggatacgcaggtccatgtccttagctttcgtcagggtttcactccaactaggcccaccaacgattacattgagaaagaggtacctcgctactggggcgatcgtactagcgaaggccgcacgcaactccccgaaggtatgttccgtgcatagcaaggtgcgcattctctcaaacatcttggtacggactcggtcccacgcatcctcgaaaacgataccaaatctctcttcgattccaaggtatttataagtgtctcgtagaccaaggaccgggatatcacttccagtttcctcgttctctctttcacgggggtgtaccagagcgcatttcctcttattgattttcaacccgagggctgaagcggttcgctccaatgttactaacatcctagtcaaggacgcttcactaggagcaaaccctttaaagtcatccatatagaacaagtggttctgctgctgcatcactcctcgtccaggtatggtgacctcaaaatcaaagaggctgcctactgcagaagaaacaacggctactgagagacaaaagagcagcgggctcaacgtgtctccttgtaacactccgttcttaactgccaaaggcgcactccttaacactctcccgctcttgaacacttcataccttacgctccaacatttcataaggattccaataagacatcggattcgcttgtgaactccagcgacctttagagcgtacctgatccacggttgactaactgagtcgaaagccttcgcaaagtccacaaagcctacataaagcggtagtccagtggcctctgcataagacgtaattgctctgtcaatcaccatagcatgggtacacccccaagtgccagacaccatcgctcgttgttcaatcggcaaaatagagtatgtggtcaggtgttccgatacccatgccgtcaccataccagtcactagtttgtactgcgtgttcaaacaagcgattggtcggtagttggccgggtctaccgggtcacctcctttgggtaggaggaccacccttccttttgtgagccaactggggacactgagctgtttccgcttgatccccattaaccacttaaataacgcctggtttgcggatggtaaccgtttccaaagtaaattggggattccatctggtccgggcgccttcagtggcctggccttacccagtatctttttccaaacagtttgatccacatggtcacttgcgaaaccttgtccatcggtgactttgctcctcacttcttcggcccagttttcaagctccgggatttttccaaattcctttcgctctccaatcaggctggcccaaaatgttcgtgcctgctttgtgtcaagtttagagtcacccaaaggttcttccaactttctccgcaggggtaacattcgtttacgaactcgctcttcacgatccatggaagagttaattcggtcctgagccaatcgaagacgacttacaagtctttctcgttggacttccaagtcccgggtttccctcacgggtttacccaaaacctggtatcgcctttgcaaccatgcaaaattactcaactgtctggatgttgggttctttcccgtcctcctccgtgttaactcatcggtaatccacccgatgtgtctacggatgttgttgatttcggacttttggcgaagcaaccattccgccgactggcgtctgatcacctgcctcctttccttgttgccttccgccagcacgtatcccgccgcataaactgcaacgttcaaatgccggaggacgcaaccgcggtacccattggaggtttccctctttttgagcacctcaacaacgcaggaatccagtacttcccactgggcacggttaaccctattcggttcgatttttagagccggtctaaaacccacagacctcttggccgttttataggcgctccaaaaccggtctttcaggtctttccgttcactatcactgattatcccatgaacaggtacgtttactcgctccggtttccttaatccttcttccgccggattcccttccagggaaggtttattcgacggttccgtttcagtaaaacctttgctttcaactccttccacctggggcacgctggcgggtacacttggcaaaggcacctcaacctgcacgctcacttggtttatttcgcccattacatggggcagggacaaaagctttcccttaaccagcgatctcttcatacccttatcagccttaatcgctaccacgtttggcttacggcatggctctgcacattggccaattactaagcattcattagcacaatcccattgccatccgcgttgtcgcaagagtcggaccctttcatagtacgccctttccgtcctcattgggtactcgggcacaccatccgacaaggatcttgactctctctcgccatcccaatgaatgagaaactgacttctagttatggcacaggtcccccgggcttcgctaccatttaacatggcatgctgttccaaccgtgaccaatactcgaagacagctttctcctcgctgggagtccatcgcacactcctcaaattccctttttgagacccccgctgagggggatctttaccagcacaatcatcgctggggcaccggtgcattgcgacacccttcccattatgacttaatgtgccggaagaaccctgtgctaaagagcacattttgggataatttctcgcaggcacagacatagcaatatgacttgaaagctcaggtatatgttgtaaaaaactttttctcatatttatctgtgcagtacgacccaaaagcgttcaaccaataatgtaataacagctcctcacgagctatctccgcgcagaccccgaccagatacccaaaggctcattacaagttcaacctggttaggagaaacctgggcagaacgacagctttataaggcagagtgcttatccgacacatcattccagaggtaccaccccaaccaccccttatctgacgagcaaagcactcgccagaccagctccactagcccaggctggcactagtaggaactgttcctccggaactacggcgtcatcagaactctccgccaaccatcatccacatcccaagtcgcccgggggcaccaggtctatctttacctgcataaaacatgcctactaacgtatacatgagtaggtattaggaaaggagttaagctttggagaaatcgaagaaataatgcacgataatttatcgcaacaactggaaaaagagatcaatatgatcaattgctgagatcatcaagatctattccggtttgttggacgaatggcgccgcaccttcttcccagacggaggggctcccccctccttttgcgcggcagacggcccatcagcgtccagctcaatggtttcggcccctttggcaatgccatcggtttcgtcccctttttgctttttgccgccgtcctccgtacctggaagtcaaagtattgcttcgccgtcaatcatgctattatctctaacccgtccccgctttctctctcttctcccgctgcttttggcgtttcagagacttcttcgctgcctcattggcaccagccctaactggcccgcgcggctgcgtgccgccacgagccgtcaagccgtccatgaacagcttgatgtccctgagaactccctcaaaagtcgcaccttcgaaatggcaaacgaatgtggtcatatttctcttgaggaaaaagcaggttaagaaatgaaaatgaacactgtatagatatcatcgggatatacccgtatgaggtcagagaaaacacagggtccgcttcacgtattctttggacccccccccctccagtgctagccaacaccggaaggggctcggattagcgcaacccgtgcagcacctagggactttcgcgacctgtaggccaactcctaccaggctccccggaggttccgagtatcgccacacgtgcgcgtcggtagttagccgacgaggcatttggctaccttaagagagtcatagttactcccgccgtttacccgcgcttaatcaagtttccttggcttaacattcagagcactgggcagaaatcagacacggtcaacgtccacaaggaccatccgtctcctctgttttaattagacagtcggattccccgagttcgtgccagttctaaactggtcgttcagcgccaaccgaagtgcataccctgacgagcatacacgcagctgaagcgctccacaagcagctctcaccactagtccacgcaccatccccgaaagaacagcacacagccacgggcaaaagccgcctgtttcacgcaacagcccggctgacccgacctttagagccaattcttttcccgaagttacgaatctaatttgccgacttcccttacctacattattctatcgactagaggctgttcaccttggagacctgctgcggatatcggtacgatcaggcaggagattcaaatagcttccctcgcattttcaagggccgtgtggagcgcacgagacaccacaggaaccgcggtgctttacgggcgcaacatccctatctcaggctgagccacttccaggcacgcacaccctaaaccagaaaagagaactctggctcggactccacacgacgtctgcgagttcatttgcgttaccgcgcaaaacagctcttgcgaaccgtcatt

SEQ ID NO: 488 - DNA, 4567 bp, Heterodera glycines
acacatttaaagcggcggaaaattctttcgcaattcatcgattctcaaccaacaaacatcattatattttaataaaaaaagagaaagtttacaaaaaataaaataaatgaatttttattaattttccattttgtttaaagtgccattttctttttgcttctcttctttttcggcactgcctccgtttctggcactttcacaattgacttcatcaacggtttggatgccaccatttccgctccttcgtccgtcgagttgaaacggtccaatggcctggaaaatgggccaaaaagttagttgttgagaggattaaggatccgtcggcattgcagggggaaaaatttggattttagttgtgctaattagacaagaattttctccgttctccttggccatttcccatccgtttaaattattttaattcaaattttatgttaaaagggataatatgaaaactccaaaatattgatttgtcttttctataagtattgaaaaagttttgtcgaaaggggttttttgcattttttggcttacaattaggcaatattcgcctcctaccctggattcaaattggaatgtttatgtagtttaaaacaggaaaattttttaccgttcagaacttgactccgcaaagagacggaagcccgtccacgctgctggtgcccatcaagtgacacaactgttggcggaccgagaatgcttaaaatcacattttattactaaaataacaaacatgcactcagaattttagtgaacccaaaaaagaatgaaaatcgctaatttcggcgccgaccgtctcggcgtcgttgctaacaactcttctcattatcaaccatgtttttggtaacattcgattagttcttttggtttctatattaatctacaaaattttaaaaaatttcgtcataacctcaattcggactttttcggtgttgtggacacaaaaagtcactacactcatttttttagaaaatcaaagcggaacgtttacgaaaacccgaaatatcgatttgtctttgctgtaactcatgtgccaatcgaccacctaaccgggtcagtcccagccaggacgggggtggcatgacaatacaaaaaatgaacaaaacaaaattggcatttcaactatacctcgataactcgcgacggaacattttttttgggggcatgtccataaaaagaaaacttcatcagtgtttacaataattcggttcatagattctgactcagtagaatagaagaaacccgattcgtattttttaaatagctttaattttttagaaagggtcaaattgggcagtaaaaatacgactttttaaattcatttcgggccccaaacgcctaaattgtggtcgaatagacgaaattttaaaatttcatgacttttcaattaagtgcgtactttatatgtcgtttgatgtgaatttggtttaaaatccaaatttacgaattaaaagttggaacttctatgtttttctaacttgttttttgataaaaaattaccggctaattttttttagattatccatgttaatgtcaagcttcaccctttcgattttggcacagtgttgttgcaatatgtcattggcaaaactgctgcatcaatttgcggtgctgtgctttttggcgcacgttaaaaatggctttttggcgcaaatatttaaaaactcccaaaaattaaaaaaaaatttttatttgcctttcattgctcataactatatgccattttctttcataatagacatgatgctaatgcagtagtgagcaacggtgcagaattgtggtccctattcaacttttatatcactacccgtaaaatctcgaggttcctggtccacatctgaccataggtttgcctaattccgaccctggactcaaattggaatgtgttttaattgtattcacgtgatctgccaaacgcagccactcttgctcatcctgcacatgcccaacgctggtcccggtgaacatgatctccgccgccctcccgcccaaaagggtggccaattttgttttgaattgggggagtgtgtaggtgccgtccatgtagaacatcgtctgtccttcccacccgcgaacgtcatccccttcaatggacatctgtttttcaaaaaaaaaaaattagcgctgcatcttgaaaccttaaacatttttcccaataaattatttttgtccacaaaaggtgcacccaaaaacccattgccgaatacgctttttgaagcttcaggtgaatgtctgaagcgaacaaaaccttcaatttgccaaagtaaaaaaatatgctcaacaaaaagttatcaaaaaatggtcaatatatttatttaaaattttaatgttagaaatgctattttcgggtgccggattcgtgatcagagaccccaaaatccttgtaaaaatgtttaaatgacttttgaaaacataaaaaaatttagggaaaaggggagggggtcaaagcacaatataaaatggagaattgaaaacataatttgtaatcagtttaacaaattaattgttttaccaaataaatactgtaactatgatcgtattttgaaaaaaatagattttcaaaaaaattacccatcgcagatggtctatgctgtcagccgaccaccaattgatcgcccagtgcccgacttcgtggcaggagacgcgcacacggtgttgccgcggagcgcgaatcgtttggcgcaactcttcgttaaattgacgacgccaattcgccattcgtcgtcgcaaatcattcgctaccatttttttaaatttgtgtgctaagaagcgaaaaatccgaccctggactcaaattggaatgtatatgtaattcaaaataggaaattttttattttgatccaccacttgtctatttacatatttggataattacggcaaaaccggttttggcactttttcattttgttaaactcctttgttcccaccgtaccaattttaatttaaaattttttcacctgccactttcaaccactcttgctcatcctgcacatgcccaatgctggtcctggtgaacatgatctccgagactcctccgcctaaaagggttgccgattttgttcgaaattggaggagtgtgtaggtgccgtgcaggtagaacatcgtctggccttcccacccgcgaacgtcatcccccgcaatggacatctgtttttcaaaaaaaaaaaaaattagcgctgcatcttgaaaccttaaacatttttcccaataaattatttttgtccacaaaaggtttgtattaccctgatatcatagtagcagatcattcagcactagttaagcttacaactagcagaaacgaaaaatgtttatttatataaattttttaatttggcaaaccacgcgacgatttatcaagctttgttccggaaaatacggtgctagctgattgtgagacaaactatcaaaatgttatcgattgtcgactttaggccgaatacaattttgaagctttaggcatttatgaagcgaacaaaacctctcaatttgccaaaatattctcattaaaaaatacccaacgtattgtttttcgcaaattccggccaaacttgcttcttgcacgaaaatcttgtcaaacccactcgtcggacttttaagacccaaggtcgaactaggacgacccagtccgaacatggtggtccatacccttgaacacgaactgaaaacgttgaatgaagacattgagcagccagccatcaatcttcattttcctcgaatggaagctgaactgagttttcccgcaaacaatcatgtctaagagggaagaagacccagccaagtggtcgacatcactgttcaaaaagacaattactgcagcagtaagaagggccaaccaaggtccaaagaggcactcaacgggacagagtccaagcctcgcacgcgccatatgcattctgcggaaacaaccactggaacaaccagtgcaacaactatccaaaggttgaaagtatgagaaacaaccggatatgcgtaaagagatgtgcatgaaatgtctgagaaacggagaagcgcccaagattccctaggccaatgaagtgctatcatagcaagggcaatcacccacaagcactgagcagaaatgcacacaggactgaacctgacattcaggcaaagctgaagaacgaggaggagaacgcacttgtgatgaccacagtcacaaaatctacaatccttccaagtcttcatcacaaatgatcggcttcatcttcttggaccccgggagccaaaactccttcattacggctgaagccgttgaccatctgccgctaggaaagctttcattctgaagaacgctacttctcgggttttggcgacaaaaccgaagaaatacaagacagaatacgtccgaataggactaaattgtcccaatggcgacccaatggttctgccactcaaattttgaaaaaaatagattttcaaaaaaattacccatcgcagatggtctatgctgtcagccgaccaccaattgatcgcccagtgcccgacttcgtggcaggcgacgcgcacacggtgttgccacggggcgcgaatcgtttggcgcaactcttcgttaaattgacgacgccaa

SEQ ID NO: 489 - DNA, 4338 bp, Heterodera glycines
  unsure (1)..(4338): unsure at all n locations
aaattaattgttcaccaaaattcacaattattgtccaaagccgattcaatagacgggaatataatttcaaaaaaatagagattcacagccatttagtgcagcatttgaatcgtttttggacaatacatgtgaattttggtgaacaattaattttcgacttttgttcgaattcgggtccggggttctaaataggtggaaatgaatgtcatattcgtgatcaacgcccccgaaaacccaagaaaaatatgtacaaaaaaaaaacattttttatgtggggtaaagtgaaaaagtaccgaaaattttacattaacgctaaaacattgataaaatttaaaaaagccgaaatttgaaattcacacaaattcgcttctgtcttgacaaaacgacgaatatgttaggctctcgaattgaaataaatccccctcccccattttgtcaatattagctggatagaaatccattacaaatagtaaaatgtttcataaatttagattgcttttctactaccgctttttcaatttgatacccacaaacaacaacttttggtgatgagtcaaagcgaagtgaagaagacactgcactagttgaaggtcaacgaactgagaaacgtgttggagaagcgcggcatggacaagactggcatcaaagccaatctgattgaccaggttgggattttttttcagcaatttgttaaccttgctcatttttcatattgcttgaaaagttttgagggtttattgggacacttcgaatgtgcatgtttattgaaattctagttttcaaaatttctattccccccattcctgcatatggccaactcagaaatccaaaaatttgactcgatgctttatagtctttaatgaaaaaaatgtacaatatggtccaatgaatgaatttttcgagtaatccattgagttataatgtcttgcttgatattgtgcaattaatgcaattcttggggctcacataattgtttccttccattaactggttcgtacaaacacgaattgtgataagtgtgagaactttctttcatcttggtaactgctgttgttgttattgttgttggtgtttgcctttgtgtgcacgcgtctgccgctgcttttggcacagcgtggcgttgtgctgctgctcgacttcactgcgtttgtgctgtctgtgtgtgtgcggcgtagtctttctcaaatgaactctcccgacttcctttcgcccttttcccacttttttgtgcctctgtttttctcacacataacacaacgacgcttaaacaaatgtggcgccacatgggaagacccaatctcatcattttcataagagtgcgttgtgttggcacacacatttttcgagaaatgaacaaaggtccccattaaacgggggggggggagagaaaattgcccgaggagtaattagcgcccatttatgtgtaatcgctgggctgatatccttcgcgtatggaattttttgacggcatggaaaaattaacgccttttatgcaaattacttataaccaaatacaatggggggaataatcaacggcgaaaaacaatatgtttaagacgctcaaacaaaaaatttctcacaaaacaaatttaagaactgacgacgatggaaacagggcaaaacagtgaaaatgctgcgacagttgaaaccgccgggaatgatgtggagatgtcaaccgaaggttttgcaattttttttttcttcaatttctcacccgttgattttcaaaaagaaaaaaacataaaaacttgccttggtttgatgtttatcaatcttattaggagccattcaaagtttctgtaattcaatcgcattagatgaaaacttttttcatcatattttcctaaacaaattttgaattgacaaaaaattctttgacccattcaccatttgttcaatgtttttcattccttgcaattagacactgctgttgctgaaatggacaaacaaaatgcaaccgatggcgaccaacagcaacagaatgttgcaccagttgatggtcaacaggcaaacgacgaaaccaccacaacagtagccgatgttggacaacaacaaaagcaacccatggtaaccggaaacgaacaatgacatttccctctcccccaatccaaaaaatgatatatttaacctgattattacgataatcgtctgtttgcatggcctgtttgggccaccgagaagttgccaagacggtgatgttgttggcttttatgtgaaaaaagcgaattggttcgcaataaataaacgggggacacattttgcacaacagaccaacaattgtactacaggaaacgataaccaaccacggtgatggtggtgatggtattgatcatcggaatgctcatgacgagacgaccgtccagccggtcaccgacccaattacgactggccaaaccggagatggtggcagtgacaaaaataacggccatggaaatggtggtgaccatcaaatggaccatgatgagccggacatcatcatcgagacgcccaagaaggcgatcaagactgagtgtgttgaagatgttgtgctgatcggccacaccgcttctgcgtcagccgtcggcagtgccgggcgtggtgcaggcaatggacacaaagccgcagagagaagtgatgaaagtgactgcaactgccgcaacaacaccgtcttcggcaaattgtgctgcgccatcaacagcagtttccaacaccgatcagcaaccgaaagcgccttcagcggtggtggcaaatggtgggacggcaccggaaaccgctggttcagctacggcgacaaaagttctatcagtggcgacaacgaacgcaaacaccgccgtgacgaacgccccgccgttgttgacgtcgtcctccgctggttcaactggtgatgacgtgatactgctcaacagcgaccaacagcagcaacgccagggcaaaattggcaaggagaaggacgctgttgctgcccagccgagcgatgattccgccggtgggaagaagcagtcggctgccacaccgacgggaacgacgagcggcacatcgacggcacaactggtggacgggaacaatttgtcgtcaagcctgtggatccgcaacattaccaccacgacgaaagcggcagacctcaaagtacatataggcacattccacttgattttttaagcctccatcggcttttaatcatgaaaaaattaggaataacgactcacaccccccagggttcaaaaattcgatcatttttcatgtcccaaaaaaaaaaaatttcgattgctaatgccagctaagtgttctggttcctttaaactccttggaaaaaattggcgtatcaaaaaaaaaacagtttctcgcataaaactgctctctgtacaacttttgtgctgatgccatgccccatctgtgttccacaccaaatggatggatgatgatgagatggttcatcaacaaaaacactgtttttaaggcgctgttctcaaagcacggcaaagtaatcacggcgaagattttcaccaccaaaaacaaacagtcgcccacctgttttggctacgtgacgctggccgatgcggagacggccaatgtgtgtgcacagaagctgaaccgctccaacttcaaggggcgcatcatcaacgtggaaaaggcaaacgcacacgcacaattattattagtcttatcctctccacccatcgaccgatcaaacattgctaattatactggtcactctgatcaagcatggtgacagaaattttttgactgattcttgtgttcacgagacttaatggctcgtgggttttcatggccaaaaatacgattaaattaagttggttttaaaatttcgtcatccctttttaatttaattggtgcttgctcattaattcccttttacgaatttggtgtgtgacaacagcgtcgtcggtctaccccttcccttcccaacactcttactcaccacatcgtctataaaaaaaaattgttgtaggccgaccgctccaacctgtcgcaaattggcacgcaacagcagcagcaacaacagccggcggcggcgagtgacggcagcggcgccaaaacggggacggcaaagagcggaggttcgagcaaagcggctggcgggtcgtcggatggcggcaaagggagcggcgctgaaccttccgcctcgtcctcctcctcaaagaaagtgcgtccgcggatcactgccgcgaccgcatcgcccacgcaacggcagcaccgcaacaacaacactaacagcgccaaaactgcccgccgcgggttcgtcctcgaggacatccattcgagagcgcatcgcaaaacggggcgtcgaaaggaggatgctggcacggcgtcanaatatgactggtattgcacaaaatg

SEQ ID NO: 490 - DNA, 1173 bp, Heterodera glycines
aaatgcagcatatataaataatattgtgcctttttgtttttcgtcatagcgtaaccaacagcgtcgctattttcgttcggttgcctacgcttcgtttggacatcggggcggcccgcaatacattgtcaagtcacgcagcgctgcggaaccacggctcttcaaccgtcttgtgcaccagacaagccgaggaatccgcgtctcggccttcgagggcggtggttcgcaccaatacggtgccgcgcaccaacacgtgccgggtggcggcggcttccgtgacttcaacaccatcaatcatcgtcgtacgatcaacaacaaaagcaacagtttggtggcggcactgccgcgctgaatcccttctcccagccgcaacccttcgccggtggctcctccgtcggggcgctgtcctatggcaagcagcaacagcaacagtactcaattggcagcggtggtggtggtgggtcgtcacggatgacgtcggcaacgtccactgtctctgctgctggtggtggtggcggtggttgtgaacggcatggccaaatgcaaggtggcttttcgcgttcgcgttttatgtgttggcactcaaaaaatccagcacttttttctataagattcaaggaaatataaaaaattttcttgcgatttttaaaaaattttaaaacaaattttcggtttcaatttttatttggtcgtaatcaaactgtttcaaaaattcaatttcattttttggggattcttttgtcttttcaaatggactttttaaacgattttcaaattttttcccgcccaacaggacgttcttattacaacgatcgttatgccgacacaacaactgatgcgagtgcgtacgcctcgcgtaccgacccgtcgtatggccagcgcattggccaacagttttccagcggtggtgggacgcgtgacgaaatgtacggtgtttcgagtggcgggggcggtgcgttcggagacagcggttacgccacatcctcgtaagtttttgtaagttgcattgaattgggtgcaacaacctatttgttttgcaataatttatgtatttgtgggaataattaatgttaaaatcccattagaaatctttacttttttcgattaaaaaacaataacaatttatcttaaatatcaaaaaacgcttgaaaattaaaaaaaaaaacataatttggg

SEQ ID NO: 491 - DNA, 4306 bp, Heterodera glycines
  unsure (1)..(4306): unsure at all n locations
aattagagtgcagcgagaccgggaaatttgggcaagaccgggaccgggacttttttggttgaaaaaccgggactttttggctgggaaaccgggaaaaaagccgggaatttccggtcaaaaccgggaccttggtactcagttgtccgtgttcaggtcccggtcccgctgcactctagtaatttctgtttatcttattctttatttataaaataaaaaaagcgctgacccacaaaatgtccagcccacgaaatgtccaagtctcgaatttgagttttttattattcagatgggcctaaggttaggcaaggggtaatataaagggtatattcgtattcagagaccccgaaaaccctaaaaatcctaaattagactcattttgtttttataaattttgggcatttcgtggcttggacactttgtgggggtgccaaaaaaagattattattacatatattatcaatttgacaaaaagaaagagacaggaaggagacaaagttgagagaaatgagatttggatgaaaaacgttattaataaaactctatcaaaatttattttaaattatctgaaaaacgccccgagccggcgcctagcactcgtatgttattattattcaatttttttaaatttaaattttagcgttttaaataaaaatttgttgacggattgtccattggcgtaatgtccgtgcccctccccccactttccatgtcccttttgactttgtttacgttttccgcctctctctctctctcttttgctcaatgattcgctcgctctgttttctctctgtgtttccatttcattcgctttctttcccgaacattctcagcaaatggagtgccatggagaagcatttcatgcggcaataaatacgcaaaattttcgggctgttcaattaaagcttctctgcagttaaatctgaacatcccaaactgatttatgctcctctccccatttccgattacttttccgtgattttttctctttttcccactttttccatttgatttttagtttcccaactgatccgattaaacatttctctttatttacaattagcaatggttttcctgtcaaaattctcccctaattcaattcaaaaacaataattctcccgttgtttttcagcatttaaattcaaatctttcaaccaattctcttttcgtcaaaatgctttctcccttctcctacgatccgttctatcgccgttcgttgtggcctatggccactcatgttggcaacgtcctttcgcccttccgccagttggagcgtgaactcgaccacttcttcgaggggatgcagcccatggtgggcttttactaatcaaaattctttaaattttagcttttttgttttttagcttcgtgaccatgtcgctcagctgaacgtctcggacaagggcgacctcacttacaaagtgagtgggcacagaaatttaccgaattccatggctaattttcaattttttccttaaaattttcaggtcgatgtcagcggcttccgccccgaggagatcaacgtggaggtgattggtaatgagatcatcgtcaacggggaacaccgcgagcagaacgacagtgagttttgccattgttcgaataaatttcctccattttgtggccatgtttcgcgttttcagatccatatttttgcaaatcctcatattggggttattttgcgtcccaaaatatcacgcactgtccttgagttttcaaaaaaccaaaagcgtaccttttcgggttagggcctttggttggggggggggggggtttgtcctggtatgttccgaacctgtgattggtttaaatacagtttttcatgtctgaccaaatgctgttttctctgtgtttcattgcccccctccacctcaggcgaatcggtccaccgtcagctctcgcgccgcgtgctcatcccggagggcatccaaaaggagagcatcaagtgcgagctggacggcggtcgtttgttcatctgcggaatgaaaacggctggcgaaggcggacgtaccattcccattgaaatgaagaagaaggcggccgtggaccagcagaaggaggaggagaagcagcagtagaaaaggacggcggaagtgaagacggactgactgtcggtcgaccgaatgatccattgacattgatctttttattttgatacttttgcaaagtgatctataaattatttttccttcaattaagcgtttctaattaaggggatggtttttttcacgggaattagtcccaatgaattcataatggacatcgctttgaagaaatttcgttttaccaaaataatttaagatggcagaaattttggaattgtgcagtccaaaatgccaaataacagttctgaaaaagaaatccggcaaaaagagagagccacccataatctgatcactgatcaactgtctaaataataactaatcgttttcatatgaaaagctcgacaaaatcaacacattcggattgcttgcacactgttttgtttgtttttgcacagaattaaataatgacgaaacagaaaaatggagcagcgagattggctagagattcatatcaatttaataattaatcatatgaaaagtgttgttgttttgtgtctctttatttaattgtccttttttgtacgtttccatcgtttcgttcacttttctttgtccgttcatggcacacagcaaactccgatcaccacactgatcagcaagtcaatcatcagtcacagttccgtcatccgctcgtcatttaatgccgtagtgccattattggcgccaaactggagcgtcctggtcggcaccagtcaattccatgaaattttcaggtcgatgtcagcggcttccgccccgaggagatcaacgtggaggtgattggtaatgaaatcatcgtcaatggggaacatcgcgagcagaacgacagtgagttttgccattgttcgagtaattttatcggggttttggattttggtgagacaaatgtcagggcttgagtgttaatggattcatttaaatgcttttcggaaccatatttagccaatttaggcttacatttagcgaatcagagaaatatcgagaaacttcttttaatttggaaaatttatgtccgtatttcggtaatactggggtttgttccccccctttttttggcaaaaatttcaaatttttaaaagtcacgtaaaacattttttctggggttttcggggtcgctgatcacgaatccggcatccatttcgcccaattccgaaccccgaactcaaattcgaacaaaaagtcgaaaatttatttttcatcaaaattcaatttatttcaccaaatctattcaaatgcacgaaatcaacaacggaaagaatagattgacaattattcacaaggatagatttcaattctgagtgtaagaaccagtcgcggggtctataaaattctgtgaatgattcacagtaaaatgttgataaccctggggcagcattgagatggaattgtagccccgcccaatgaatgaccatttcgtgcatttgaatagatttggtgcaataaattgaattttgatgaaaaataaattttcgactttttgttcgaatttgagttcggggttcggaattgggcgaaatggatgccggattcgtgatcagcgaccccgaaaaccccagaaaaaatgttttacgtgacttttaaaaatttgaaatttttgccaaaaaagggggggaacaaaccccagtattaccgaaaatcagttttattggcttgtttatttaaatatttccagcgaaaacaaacttcattctgaatgctcaacggaacggtggaagcggcggtcactgccgcggtggccgacgattggacactttgcatgttgttgaagctttgtaacccaaagtaaattcccttgaagctgtgtaacccaaagtaaattcccctgtgcttaacggacaaatggagagttaacaatcttcataaataacaaagtgaagaaaagtgaacgagggaggaaggaaggaggagtatttatgcaaaaatatgaggggtcaacaatgaatgagtggagcgggaaaataacaaaaacataatgccacacatattcaaatgatgtctcccggacattaaccttcgtaaataggtgcaaattgagacaaaaaaaataaaaataaagcatcaggcccttgaaaatgctttcgccacaaaactcttctacaannttagtatgtcaggcttttctagtttgtttacgtacccgactcgtaattccttacaaatttaaaaaaaataatcaatgcaatgatcctgtttaaaaaaatatgaatagggttttaaatattttt

SEQ ID NO: 492 - DNA, 1632 bp, Heterodera glycines
aaagtacagacaaaaatgtataattctgccaaaaggactcaattcgagaggagctgggcgctcttatcgtcttttataattcaccggcttatcactgcaaattgtttattgtcgaaaaaatatgccatagatatgtaattgatcatttcttcgcaatcgcttttgtatacaattggattcgcttaatttaacagtacatgtgcgtaaattgttgctaatatttatcgactaacaaccaaaaatgagcacaaaagtacagacaaaaatgtattaattctgccaaaaggactcaattcgagaggagctgggcgctcttatcgtcttttataattcaccggcttatcactgcaaattgtttattgtcgaaaaaatatgccatagatatgtaattgatcatttcttcgcaatcgcttttgtatacaattggattcgcttaatttaacagtacatgtgcgtaaattgttgctaatatttatcgactaacaaccaaaaatgagcacaaaagtacagacaaaaatgtattaattctgccaaaaggactcaattcgagaggagctgggcgatcttatcgtcttttataattcaccggcttatcactgcaaattgtttattgtcgaaaaaatatgccatagatatgtaattgatcatttcttcgcaatcgcttttgtatacaattggattcgcttaatttaacagtacatgtgcgtaaattgttgctaatatttatcgactaacaaccaaaaatgatcacaaaagtacagacaaaaatgtattaattctgccaaaaggactcaattcgagaggagctgggcgatcttatcgtcttttataattcaccggcttatcactgcaaattgtttattgtcgaaaaaatatgccatagatatgtaattgatcatttcttcgcaatcgcttttgtatagaattggattcgcttaatttaacagtacatgtgcgtaaattgttgctaatatttatcgactaacaaccaaaaatgagcacaaaagtacagacaaaaatgtattaattctgccaaaaggactcaattcgagaggagctgggcgctcttatcgtcttttataattcatagaaaaaagatatgggtgttcgcaaatttgatttttaattaactcataaaaaacgtattaacaattaagaaaatcagctgcagaaaattattttctctatcgctaagcaaaatttgaagaaaatctctatgaggaaaaaaaagcttcttagagagaagtgaatgttgtttttcccaataatgaaaatagattgtacaccaaaaggagagaaaaattagagaaaaaaagatatgtgtttttctctgcattctctatttatttggaggttgagtttactcaaaactcaatggtttgtacttccgtgttttgctacccccccccccccccccgaaaagttttaagacacttcatgatcagtgactttgaaaaccccaaaatatgaatttttaaaatttttcgaggggggggggggagtaacaaacacggaagtgccgacccaattgtaattttctaccccggaaatgttttgccgtttttatttgaattcatttcaataatgtgtccatcacaatctatgtataaatctagggttcctccccgacat

SEQ ID NO: 493 - DNA, 1637 bp, Heterodera glycines
  unsure (1)..(1637): unsure at all n locations
agggcgtttcttaaaaacttctactatgggcgtttcttaaaaactgccactatgggcgtttcttaaaaactgccactatgggcgtttcttaaaatctgccaagtgggcgtttcttaaaaactgccactatgggcgtttcttaaaaactgccactatgggcgtttcttaaaaactgccaagtgggcgtttcttaaaaactgccaagtgggcgtttcttaaaaactgccactatgggcgtttcttaaaaactgccactatgggcgtttcttaaaaactgccaagtgggcgtttcttaaaaactgccaccttgggcgagaattaaactacaaattaaaacaactatatagaaatattttatctaaattttattgatataaagtttgtaaattaatatatatattccagtatttcttttttaaattttcttattctttaaaatgttcaccaaaaacatgaactgacaagcataacaaattctaaaaaataaactatttaaaatactaataaatacagacttttgttaatgaacattcagcactttcatacaaacatttgcaaaagcttttgtcgcaatcgtagcgttttctagatttgtttatatagcataaatcatagtaataacagcaatcatcgactatatcatttaaaaatttataataaatttaaatttttttaaaccttttttaaagttgcaaaaccatattactggtgctataaagcatgagtcaaaacatgaagtgccacaataagtgctacaatatttctttgcaactttcaaagggaaattttaattataataagcttatcagtaaaaaatttaaataattaatttatcaagaaaaaatattaaatatatcgttgagctcatttgtaaattttattaactacaatcatcagaagcaataaatttattacgcccacttggcagtttttaagaaacgcccatagtggcagtttttaagaaacgcccacttggcagtttttaagaaacgcccatagtggcagtttttaagaaacgcccacttggcagtttttaagaaacgcccatagtggcagtttttaagaaacgacctagcaccgtttttcgtgtttcagaccatagttaactcaggaaaaaataggcaaaaacctaaaattgcatccctagtcattattacgtagaatttgttaataaagcagcctaaagataaattagcatcacttttattctttcccccgtctgggtgaaattgttgaacgaaacagcgatatacaatatatatatatacagtacaataacaaacatttcaaaaaatgacgtcgcaaaatttgcactttctcaattgcttcctccattagcctctgaagtcacggatagtgaattcgtcattctttaagcccctaatagcgctgattttcgagactttgtcgacggtttgcttttgcgcgttctcggcatcgctttctttaagcagagaacagttggagaaggtttcgtaaatcactgagcagaacagaatgacactgggaagctgaaaacactaaaattttgttataaatcccgacaaaaaggacctaccaaaaggaaacacagaaaggactgatagggtcggaaattggtgcattnnccaagagtggtccaattcactgactccaaa

SEQ ID NO: 494 - DNA, 7942 bp, Heterodera glycines
  unsure (1)..(7942): unsure at all n locations
tattataaataaataatttttaatttatattttntgagtattacaacaatttaaaacagcattccgtgaactaacaaataagagtttattttttcttttttctcagagcaggtagcattttatattaggttaaatttttgtttatttaatataaattttttttattaagataatgcatgtagattttatgtatttattttaatttaaaataaatatatattttttgttgttatctatgaatttatgtttattcattcccttgccaagtaatatagttcgtgcgtttgccatttttgtgtgctcatataattagtatttttactggttgtcttcttaacttatattatttataaatcattaaaacattaaaatttaaaagatttctaaaaattttaaaaacgaatagaagatagaaatgtgctagtattttcttattggattcatttaatctcttgtaaaacacacttatttttttaaagggagcagaactatgcatttaatttttaaattttcgctatagttattaacttaaagaatcagcttactttgtgtagttttttttaatgtttgtcaattgacttttatataaaaaattttaatattttattatttatcaagcctcatgaatgaaaaaggctgattttttagattataaataagaataaatgttcatttaatttttaattttttttcgctattttaataacctaataaatgagctacatatttaaaaatattttttacggatagaagttagaatcattttttctgatagagtttattttttatttttacctttcaattataatactgacatcataatcattttgtaacccattgtcccaatcaccacccccctaatcacatatgacataaccaattgttgccgtgggggcggtccctttaatccaactcttttccccttccccacttctccacacaatcagtctctgtcccgactgcgaatcgggaagaggcggtccatccaattgtataaaattcttgaataaatgattgttaacaccaccgctaccaatttgggaatgatgatggacccgcctggacccacagtattcatggaggtcccgccctaaggacagagactgtacatgtacatactgtatcatacaaaattttttattaaattaattactggaaaatataaaataattataaaaattttttcaacaagtccagccaatgcaaaagagaaaggaagtgaaattaatggaaaataataacagaaagggagagagaattgtgaggaatgaaagagaattgaaatgccggaatggattttaataaaatttaaaaaaaggtgtttaaagcaacaaattgccaatggcaaacatccatcattggccaaggctcaaacaaaggactccgaaacaggctaaaaagacagaaagggcttatcaattaatgttaccaatgtgagtactcacaatagccaatgatgaggcattcttacgagccccagagcgcaaagagtggcgcaaaatgtttttgttgggcaatgaatgatcgccgaaggcacgctgagcgaaagaaatttggaaaagttaaaaataaaagaaaatcctccccaatcattacatttttcgaagaacgacgagaaagtcggccaaaacacaaaaaacagacaaagaaggcgaggaaaaggccgagaagcaggccaaaaaacaattgggcgagcaaaaccaatacaaattgaaaggccggcagcgaaaaataattggtgaaagtgttagggtcaacggaagcccccaagcaaatgttagggttgtcaaaatgcaatggttcccagcagcggttcggaaaagcgcaaggaattttgcaatttgcttgcagttcccaagtgacgtggtacattttgaaatttaaaacggaaataattaataaaaataaatggcaaaaagtgagagagaaacggcaaagaaaaaatccacaaatgacgaactgcgatgaacgacggactgtcaattggagaaataagcacattttgcacctgcacacatcattacatatttcacaaaattgcactattataaatcacaattttgcacaaaatcaaatttaaattaattaagcaaatccaaacacaaacaattgcacacagcacttattaaagcattctctacaattgtcgacaaatcaagcagtttcaaacaaaagtgtgccaagtaaaagcaaagccgaaaggaaaaaaaggacaaaagaaagagagttaaaaaagggagaaaaagtgactttggaaagtgaaaaagttaacgttaacagcagaaataaaaagcaaaaaatggcggatgttgatgatttggaagtgaaatttgaggccttaaaatgaaaagtgaatgacttggaagataaattgacaaataaacccgcaacaaatttgccagcggggataaaaacgccgaaatatgatgctacagtcgactttttcaaattcatacgagaatttaatttgatggcaactgccagcaattggcatgccacggactgcgtccgaatgtttccattatttctcgagggagaagccaaagagatttttcttaatattccgcctaataaaaagaaaacatggcgagatttaacaaatgccatggcggaccagacaaaaaaaattgacggtccaatgtggccaaaaaaattgttggccagagcaaaaatgggccacgaaagtataacagaatatgccaataaaatacgtgagttggtggaacaggcctcccccgacccaaattacacgagcgaggcccgagaatgcgagagtgtccattattttttaaatggactcccgattttcctaaaaaggaaattattttttatgaaaaaaccaaaaacgcttgttgaggcaatttccatggcaaaagaagttaaccaagcaagggaagaacttgcaaatgatgaaaagggagatgaaattaaacagcaaataaatgagataagggagcaaattaatgttatttcgagtcaaaataatggaaaaaacgaaaatcaaagagaatttgttaacaattcgtggcgtaacaattttggaaacggaaattcttggaatcgtgggagagaaaataattacagaggagggcagagagcacggaattttaataaattttatacgagaaacacaaatattggtccgagaaattcaaattttgtaccgcttaaccaaaacaattggaacagaaattggaatgaaaatggaggaaataatgatcgaaattggaacggaagattccaacgaaatttggaaatagccgaggaaatacgagaagaagaggaaatgacagacaaaagtacagtatcaatatggtgggaaatgaagaagaaaccccctcaacatcgttcagacgttcacctaccccggtattaagctttttaacaatcgcaatgattttttgtgcattatttggtaattctgtggcacaataccaattgtgttggaccgagtaccaacaactccgatttctttaccgaacatttctgaatgtactgtcccgaaaaacgaaaaagcagcggaaagtacagtaacgctttttgttcctattcgagacccaaaaaaaattctcagtttataaatgttaccaaaaacttacaaaaatttgcactggcagcctcttattcttttggaaagacataaaaagctaagacacaattgttaaaggagtgaattttgaaaaatgttatgattttaaaagaaaaattgaactgaacagacaaaaaatacggtaattaccccaaaaacaaaaatggcggcagtaacaaaaacggtgccaactccaaaagttgaaaccccacctttttcaaaaagctggataaaattgaaacagactgagcagaaatacataataaaaagagtgaatgttgggaaaattggtacaaccataattccggttaccaaaacaactaaaactgtgaaaaatgccccaacaacaacggtcaaaactccgttaatgatttttactacaacaaaacccaaacaggaaaaaacacccaagaatatttcgaattccgtttttgagaatgaaaagtcaaagcagggaaataagacaaaaacagagacaaaggcgaaaaaggaagaaaaacaccccaaaacggtaaaaattggtaaagaattaaacgaaaaaacaatgcctaaggaggaaaaagttccaaaaattgtgaccaaaaacataaccacaacagaaacacctaaaatgaccacaataaaaacaatttcaaccacaactcccaaaccaaaagtgaatgaaatggaaatgaagtgatgatcaaaaagttgggggaaatacgacaaatggcgttgtcaatcaacgaagaagtgcaaaatgttttgggtttaattgagaggaagggagagatccaacattggcaggaaaatggtgcttggaacagacgcggacgaggacgtggcggaaacttttaccagcacggaagcggaagaggcaattggcaacaaagaggcagaggacacattcatcgtgcggactggacgactccatgcacatcacgatcagtgatgaatgaatggcaatgaaatgggcaaaaagagcaacagctggactttgttaattatgttgcatttaattaaattttcctattttatttcaaataacaaaaaattaataatcaaaattttaaacaaaatttaaatttaataaataaatgcaacataatatttttcatttttgtaattttcggggtcgaaaattctggggtccctcgatgacatcataatcattttgtaacccattgtcccaatcaccacccccctaatcacatatgacataaccaattgttgccgtgggggcggtccctttaatccaactcttttccccttccccacttctccacacaatcagtctctgtcccgactgcgaatcgggaagaggcggtccatccaattgtataaaattcttgaataaatgattgttaacaccaccgctaccaatttgggaatgatgatggacccgcctggacccacagtattcaataccatttatttttgacagattccattttcttttaaaatttttatctccgtatgtctttaatcaacaaaaatatattaattattcatttattttattcaatttgcaagctaataaatctgcttctttgtaaaatttttatttaatttagatagttttattatgttgttgcgattaatttttctcttatttagttttatttttgagatttattggtcaagcccaagaaattttttactcgttcccaagttgaggcgttgagattgagctaattaggcataattgttcctttaaaatgttttttatttcatttttgaatatttcatattatttcaatttttaattttttgttttatactagatcaacttcactataaggactttgatttaattacatcatattactaacttaaattaaaaatgttttatgaaataaatttttttaaggtattcttaataaattaattattttttgagtattaactccctctaatttaatattttttgaaattcaaactatcttgtttaatataaaaaaataatttttttgtgaaatctcgattgtagcttagggtttcatctacagttgcattcatgttgtttatgacaaactttgtagtttcatttctttcaatagatttttaggcattttttattggtttgccaatattttattcaattctttggtcttaaaatcatttctttttataacaattgcattaattctgaaataattaaaatggtatttaacaatgtttctgtttattaataaaattttgtttttttattttacaatgcttccagagtgacattatagctttgtatatatatatattttaaacaattagtaaatattttaaattctttacaaatatctcaaattttgtgaaaagaataattattttatatctattgaataatatacaaattttctatttagattatattaatttttctttgttaattgttcatttaattttaaacttccagattgccaaggatttgtatcttttttatttttcatttgaattgacaagttttttaatggcttacgatttttgcgttattaatttttttaatcgtgtattaatttataactttttaattttgttttactttacatttggttttgttttgaaaagcatcgagtgtttcttttataaaagcatcaaatttgcaattgattcttaatatttttattatttcataacgtctcctcctttgttcatagtttccataatattttttcattttaaatgcatatatgtgtaaattttatttaatttatttaaaattttttgaatttttatttatttatactatttgtatgaaatctaaaattttttgtatttattttcaaagaaaaattaactatactttattaataaattagcataatcataaaatccacaacttttttgaaaacattaattgacagaatttaaaattcaaaacgcatttaggtataataaataaaaaaatttcttgctggcattaagcaaattcttttaaataatttaaaaaccttataaataaattttcaataattgtgtgtgattgcagtttttttattttatgattagatgttcattttttatttgaagcataaaattgaatttacaaatgtattatgttgataaattattttagttttagtgatattctcaattttgtaatttttcttcataatattaatttttatcctgcattttttcatatttagcttttcttttaaaaattcatcaataaatgtcaactatatctgttaataaataatattaaattgttgatttaatatagttctgcattcgaaactactttaaattatttttttctttttagtatttcatgttgttggaaaattttgaatctattttaatgataaagttccggagttggatggtgtcaaaagaggaacatatgaggggaattttagaaaaatttaataatctttctttctttgtaagtttttgtttttttatattaaaaaagctaacaattctgttttgattttttaaagtgattaaaatattataggatttacaaaaattataatttcattttttcttttgcaaaagcttctgtatatatttgacgtatagaggagggtctagagtacttataataaaaatttgcaacatttgatgcttgcattaaaaaaatttgaatttttttaaagctcttaggaaagtttttaaattttaattagaatgatatttagattcatcgaaattcttttatgaccagctacccttgtcatcattaatttagcggaaggttaataaattaatagaattttatttcaaacagaaaatattttatttaaaaaattttgtattttagaatggtataatttattaaaaagctaaatattaatgatttatctatttgtttttaattaataattttaagcatattttttcacttttttaattcagcaattcgcttattgtaatttttattttttgtaaacaacaaaaatttcaccatgaaattttgttttttttggttattatcaaatgaaaaatcgattaaataattgaatttcattatttttttatatgatatgtattattcttattcatttttctgaatacattatacttataatttgattattgctggccaataaagcaaacactaactttttatgtttattatatattcataatttttattgaaacgaactaatgttttgtcattttttgtagcattttttatggcctttccaatgataccaaacattaagcgaaatactggtcatgcccgaattacatttgactttgtctgccacactccatttttgggtggtcatatgtttatggacaaaaatttaatctcataacaaatcaatattttgtgggcctaaaaattatgaaaaaatgcctgctcagctggcttttcatgctgatccccccagaaggaagacaacttgatcagatcactccttc

SEQ ID NO: 495 - DNA, 4238 bp, Heterodera glycines
  unsure (1)..(4238): unsure at all n locations
gggacatcccaaaatacactgatattcgggaaaattttcgaaaaaattcctagggggttgggaaaattttttctggaaaatttgagtagtcctgtcataaggagtacaaaattctctacagaattgtcttttggatggttggtctaagaattatactcgctgaggtttgggcacttcaattttgatgttgatcatctccactgtaaaatgcactattttctgaagaaatacagtactttttgtagacaccgaaattgaagtgcccagcccatacctcaacgggtataagccatagagacatgcgatcatttgcattttgtagagaattttgtgctctttcccataggtctactaaattttccagaaaaattttcctaacaccctaggaatttttttcgaaaatttcctcgatttcaagccatttttggtttttcagatcaccatgaaggagtgatctgatcaagttggtgtaaaagatttttttgttcagcatcaaaagttagcttagcatgaattttttcagaattttctgccaacttggaaattgaatttttggcgattaactattttgtccataaacatatgaccacctaaaatgggcgctatgcctattcactcacgtgtcattttgttaataattattatttcagaaattgatttataggtttagaaagcccataaaaaatgctacaaaaaatgacaaaacattagttcgtttcagatttattcaagcaaaagggcaactatttttctcgatttatcatttgtccataaacatatgaccatgactgtatatgatgtcgctcctgtacttgctgatagggacagatattgttcacattagaaataactttttatgattgtacattgtcagaaaatgcataattttatcaatcattaataaaattcaaattagttaacttattacaagttagcttattaattttataaattgtacaaaatttttttttttttacaaaatcattattaaattaaaattaataaatttatttattattttcttatactttccctttagaaataaacttaattttttagataattgtaaatctcgaattttctgctttttattacctttttaatttgagtataatataatttttttctcacgtttcttaatataattctactaataaattattctttatttaaactttatctgtcgaagtgacaacagacgtttcgatactctaaaaaatagttttatttattaaaacataaatgagaagaaaatagtagaaaaatgaagtggaatagggaagggagggagaacgaccaattggattgtggcaaagccaagccaaatgatgtgctgacaatgagagcagtgccaaaggtgccctcgaaacagcgtcaatttatattgattttcttccaaggcacaaagagagaaaaaaaaataatgagagacagagagataacaaaagttatgactttttatttacataattttcttttattttacatgagtagggagcgaatttttaggtttttaattatttttctgctgctttaatttaatgagaaatgcacaatttcaaaaaattttcgttttagtgcaactattcttcactaggaattcactattttggagcatacgaaattttatctgacaactctacaaattgaatttattatccattgcaaataatttataataattcattatctcttttatatttggttcaataactaatatgtagcttaaaaaagcaactatccctttgcaccaggttttttgagtttttgaatgacactatttttaaataagcttatttttttataaataatgcatatttatattgtttatttcatgcaatcagtagggctgctaattttaggtaaatacctaaaatttttgcacacttaatacacggagattgttgatgtttttcattattttttcggcgctagttaaaaagtggcctttttttgaaaaaaattttcacttttttttggtcaaatttttttttttttgttttgatacagaatttgtttttttaacagatggtacgaatgacaaaaaaaaacaacaaaaaaatgtgaaagattttgaattttgtcaaaaaaccaaaggggggactctttttgtttaaaaattgaaagattttgaattttatcaaaaaccatagggggacccttttttgcaaaattttttgaaacaaaaaatcgtgaatatacttttattcgccaaattatgctcaatgattaatttgttcatcgaaaccaaaggtgaaaagaagaattattttgtatgaaagtaaagagggaaggagagagagagtgaggagaggagagaaaagaggaaaggaggaagagagagtgagagaaggagagaagagtagaaacgaggaagaatagagaggagaggagagaccagtcgaaatgatcgagacaaaatgtggaaaggagggaaacagagaaaggaggaatgaagagaggaaagagcgagagaagagtagaaaggagaaagacaaggagagagagaggataggaaaatagaaaaaaataattaaatgagaaagagagagagagtgagaagaaaaacgagaaagagagagagtgatagaggagagaagagtgaaaaagagggtgagtggggagagaagatgggaaaagagggagagagactgagaaagaaaggataaatgagaaaaagaaagagagggagagagtaaggagaagagaaaataaggaaagaatgagagagagctagaggaaaggatagagagggagaagagagaggaaagtagggggagagactgagaagaaaagagaggaaaaaagaggagagagaggagggaagagaagagaggaaagaagggagagagagagtgaggaaaagagataataaggaaggaattagagagaaagagaggagaaaggaaaggaggtagagagactgaggagaaaagagagcaaaggagaagaatgaggaggataaacgaggaaaaaagtaagtgactgaggaagaaaggagagagagagtgaggaaagaagaggaaaggacggagagagactgaggagaaaagagaggaaagaaagatgaacatggaggagaggagagaagagaggaaaggatggagagactgagaataaagaaaagagagagagtggggagataagaggaaaggggagagagagtgagtgaggagagataataaggaaggaattagagagaaagagaggagaaaggaaaggaggtagagagacagaggagaaaagagagcaaaggagaagaatgaggaggataaacgaggaaaaaagtaagtgactgaggaagaaagaaaggagagagagtgaggaaagaagaggaaaggacggagagagactgaggagaaaagagaggaaagaaagatgaacatggaggagaggagagaagagaggaaaggatggagagactgagctcagtggtccgggttttggaactttcactttttcgcatttttgttcgtcatatttttatggtaattaaaatgtcaagaaccttttttattatgtaagtgaattaattcaataaaatttaaagcaaaaaagaaagctaaagaaaatttgctaaatggtcaaatacgtgctgacgcgtttcataaaaaaggccacccatgcgcgttttgtaaaaaggctaatgggctcgaaataaaaaatatgtaaacacataaaattcataacttggctcaagttcaaccaaattaatatttcatggtatcattcaatagctttaattgatctctatcagaatatgattttacaaatttttttacttaagtatgagaaaagttataaagcattggacaactatgttttttggtatgtatcgtgattataactataataaacgtgtacgacattatatcagtaaaatgtgctctaataatgcagattttattacttgcaaagaaattattaatcatcactgtcagacaaaaaacaatgccaactttctctaatttaaaatttccatatatgttcaaaaactacatgtgactgacgcgttttctactggagcattttcgggagatgagtcttggttctcccgatcactgattaatttcattttccgtttgtttttttgatattttcccccattttttagtgcgttcccggcaacttccaaccagcttaactgatcacgacgttttgacggngaaaaattgtggaaaaccggtgaagcatccccatcaaacagcaactttaagcataaacggttttttcacggt

SEQ ID NO: 496 - DNA, 3073 bp, Heterodera glycines
ctctaattacctttaaaatttcagaaaatttcatttatattaaaaaagttctggacaaaaattcctgacttaatattttttgaaattttgtgacaataactttttttttatgtttaagtaaaaaattttataaaatcatgatagagatcaattaaggctattgaatgatacaatgaaatattaatttggttgaacatgagccaagttatgaattttatttgttacatattttttgtttcgaacccattggcctttttacaaaatgcgctggcccttttacgaaacgcgcatgggtggccttttttacgaaacgcactagcaccgctcaaataaatgacaaaaattggaaaaccaagatgtggtaaagcattgccaaaaattacaaataccatttaaataaatgcttaaaattgcaaaaatctctgcagtctttatccattttggcatcgcaacagcaagccaaaacatcaaaccattattataacaaataattcacttaatttgtaaaagttcaattatcaattaaattaaaacaaaatagacataataaaaaacattttttaatgatagacttaaaccaaataaagttagcaacatctcattttctaaaaattttttatttatgcttagatttaaaaaaatattattacaaaattatttttaaagaataattcattatttagaaaaaaccaaacctttaatactaatacatcattaaattaaaaagtttttaaattaattaataaaaaaaatgaaaaataaattagaaatttaattttaaattaatataataaaaccaacacaagctataaattattaattatggttttattaattggagaaattttataagaagataaaatgccgagaattaattttaaattaaaatattaatacatgttaatcttggaagaattttatatgataaattaggtgatttaaaaattttagaaaatgtaaacctaataaattcttaaggaaattattgaaaaatgtaaaaaaaaatcgaacctttttctaaaatttatcaacataaagaacaaacaatattttgaatataaaaattgaattattacaaaaatataactcattattaaataaaagcaaataaaaaatcaaacaataataatatgggagacaggcaaaagttgtcagttttttttgctagaaatacaataaacggtgtaaactttaaggtagagttgggcgctaactataatctttttattatttattttgtaaaaaagatgatctgctaagggttataaagttacttctataaagaaaatattctccattcaattatactatatgaaagaaaaaactataaaatttattaataaaaaacaaattttaaatataaaaatagacttaaaaaatgataaaaatttaattatactttataataaaactaaaatatttcattattaaataaataaaatgacaaatagctaaaataatgatttctaatgttaaacaaaaaacatgcaagaaaggttgcaagatgatgtcacgaacaggattacaatttatgataataataaaaatgagaatttaaatacaaaatttaaaaacggaaaaaataaataattttctaattatatatgcataaatttaatgaaagtatttaaatcataatgaactatattaagtgtgaattaaattatgaaaataataatcattaaaaaattctttaataactaaaaattgttttgcataggattcttgagcacttcacacctttttgacgaaagaaaaacttaaaatatttgcgaaattttaatatcatttatatatgtccaaaatataaataaattaatatctaatgaaaataaataattatttttaaaaattaattttatggacaatcaatgataggttgtttaaaaacacccaaatgccataaaattctcgagttttgcctcttaaaaataaaactgacccaataatacatcagctaatcaatacaccaaaaaatttataggcgaacaggagcgcctccgtcaagataaaaccaatcgcaaagcaaaaacttttaaatttaaaattcgaaaaataaatcctttatgtgtttaaacagatatatttatttcctattgtattagactggacgaatgaatgttatatgaatattctaaaaaagaaaaattatatgtataaaataaccaaaaatgcacaagaaatcatagaccattaaaaaataaacaataaaaaagtaattattcccacaaattataaataataattaaaaaatatttgttttaaatgatttatttattgattaacaaaaaccaaacaatagtaaatgtaagtaaaaatccattaaataattaaaagttcattaaataatgctaaaaataaaaaattaataaaagtgaaaaataatataaatttttccatcaaaatatacttctaaaatcagtgattttattaaaaagcaaaataataaagcatttctttttaaatgtagaaatagttaattactgaaattataaaaaaatagaataaggcaaaactctaaatcgaaatatatatttaaaaattttagtaaaaagagcaattaaacaaaagaatatcaaatagtgctattatgtcgattacttttttcgaacttaaaaatatacgtattttattcagaaatattcagaaatttaaagtcaaaaaatatcaaaagagccttcatttgaataatcagaatataaacataattgttcttaggaaatgcataaataaaaacaaaaacatataaaatcaaattatcatggaatttctttccaggaaatgcattttggacgggtgctaggtcgatccacaaaaaaactcagtgtaggcgatccacaaaaaactcagtgtgggcgttccacaaaaaactcagtgtgcgcgttccacaaaaaactcagtgatcgataaaattaaataaataaatctaattattcaattcacaaaacacggcgccgtccggttaatactaatgtaccgcgggacgcaagtcattttcaaattttatacaaatttcaatttttgacatcacttctcgcctattctctccatttgtaatagacatagcctgacg

SEQ ID NO: 497 - DNA, 1442 bp, Heterodera glycines
actcaggcacgattttggactattaattgatttgtggttgagaataataaaattaaacgaaaaaacaaaaaaatatttttaaaaaattttttgaaataattacttaaaaacaaaaaattcaaaatctaacaacactttttaattagcattaaaaaataaatccattatttaaatgaaacaaacgatgcaaaattttggtaaatttcttgcctaatttggtacaaactttattgaatataaaatattaatattgtacaataggcaaaaatatagatttttcctccaacagagggttttatatttgcttaaataaaacgtaaaaaatgcgacccaactttttatccactgaggttcatctacgtttttaaataaaataaaacaacaaaatgactttaatatattaaataaagttcatttaccaaaaaatactcacaataatgacctgatcaggcacaagaataggaatctctaaacaacgaattttatatagtcactttccttgagattataatgcactataaaaatttaaaaaataattaatcagaatataattaccacaaacccattaaattaagaggtgtgaaaaaattagactttatgtattgattaatattcatattcccctttttataaaattcattttggttggaaaactaatttttaaaacgtaaattagtgaccaaaattaaataatgtatttataaaaaaatgctaacaatttaaatgaatgagtgcaaatcatgaagaagcacaattagtgaccaaaatcaaataatgtatttataaaaaatgctaacaatttaaatgaatgagtgcaaatcatgaaagcaccgattgagtccattgaccggataccaaaatttcagcactttaatagaaacgaagagaaaattaataaaataaataagttcattcgcagtaacatcaaagctcttccttcgctcaattagaaaaataataatgtaatgtaatatttatttaattatgtaataaccaagaaaacataatacaaatattatattgaataagtttgataagacttcttaaagatgggggaacaagtcacgagtaaataaaaaaataatagaatttgcagtacatttttttggcatttcaaataaactaaatacaattttttataaaaacattaaaacaaaatttaaaaaactcctaaaaaatttatattaataaaaatgaaaacatttcataaaaccgttttatatgactgtttttagtagggctgtaattaaatgaacatgcatatttttatgaaatatattagacctgaaaagcacgaaaaagcatctttttaccgtgtttccataagcatttgcatattttgattttgtgcaattgcatttttcaaaaattcacatgtaaaaacgcctattttgagctcaaagattattcgttttttttattcgagttttgttaatgttctt

SEQ ID NO: 498 - DNA, 7664 bp, Heterodera glycines
gacggggggaagatggtgcagaacgcatttgagtgggcaaaacagaaggcgccggctatcatttcatgagcgaaatgggattcgattggtgcgcgcatttttgaatttgcttttactgacattgtgtttattccttctgcaacgcaggcacgaaacgattcgacgcctctgacacgggggaccgagacattcagcggacgatgttggagttgctgaaccaactcgacggattccaacccaacgacgacatcaaagtgagtggtggagcaagccaatcaattcacattcattttgttttcatttaacgcaggtcattgctgcgacaaatcgtgttgatgtgctcgacccggcccttcttcgctccggacgttttgaccgcaaaatcgaattcccagcaccaaatgagaagggcagggaacaaattcttcgcattcattcgcgccggatgaacgtcgagtcggtgacagaattttaggaaaacaaattattcctcgttttcagcaaaaatgtcaactttgttgagctgtcgcgctgcattgaggacttcaatggagcacaatgtcgagcagtttgtgtggaagcggtgagcggataaacattttttgaggatatgcgtcagcttatctcatttttacagggaatggttgcacttcgtcgtgactccactaaaattctgcatgaggatttcatggacggaattttggaggtaattagtaacaatttgagaaattttgggggaataagccaaacttttcaggtgcaatgcttgaagaagaataatctggtgtattatggctgatgggcgtcttctccggcggaatttaactgatgtgccacggctgaacactgcccagcaatttgtattgacattgacccatttccatgtgatgccttatgccttgtagcctgtattgtactacatttcgtatatgtgtttttgccactgtatttcatgtacaaatgttctcgtttagtgaaattgttgtttgtgtgtgtttgtttatattatgtacataaattattcgcgcgtatagagaagtacccgatagcaaactgtaaccgtataagtgagcaggaatttcgtcactgaataatacatttgaaactcataattaatatttttaggtcctaaaaaacagaataattgctaaaaacgagaaaaagtgccaaaaaaactaaaatttagggggtgtaaaatgacaaaattttattccaaaagcttgagttaaattatttttaaaattacaaatagttcatatcaaaaaatataataataactagggtgcggattcttaggtttttacttattttttctgcggctttaactcgacgagaaatgcacgaaaaacacattttttgttcggaaattcttcgttttaacgtccctatccgaccctaggaatccctattttggatattcgcccctaaaaatccctattttgagtgttcgcccctaaaataagtttttatccctattttggcgtttcgcccctattttcgcccctatttcgcgaattttttgcccctatttaggtccctaaattggaatttttcgcccctaaaaatccgcaccctaataataactttaaatttatgaatgattgcaaaaattcaatttattttatttaagaaaataattagcaaaaacttcgcccaattagtgacactttttgcagcccttcgaattgtcctcagacaaatcgcaaaagccatctttgcaacggtcacagctgaacaaattaacggataaatggagtcattgtttaaatttattattattattattttaattttctgtccaatttctcccactttttcccctgcacattttccttgcaaaggcattgtccggccaccaattggcgtgccgtgtcatcctccgccacgcatgtgccgtcgttttgggtgccccttttgtcgcattggcatggacgacaaacatttgggtcttgaagagaacctctcatggaattttaaatctttaaagagtttttaagtgtacaaatccttcaaattggcattattttgaaaggacatttgaaacaaatgtatgtacgttaattcacttggcactgttcacaattcaacccttttgtgttgtgtttgcattcgtaaatgtcatggacaacctcataagaacggctttaaatcaacaaaataataataattaatcaaattgaaaattgtggcacattgccgcgcctggcatggtggccgtactcatattttgtgtatcatcgtgctgaattaagatttaatttgaaaaatattcaaaataggaaactctcgcacattttggcgcactgcaactgcacacaatgcaaaaaaaacgtccaaaattgtgtataaaagtcgctgttgtgatgcatttttctcatattttactaacggggcgtaacacaacgagaagatggcgcacccagccggagatgtggtgagcgattggtgcttttcattttctttttctatgtcatttcattttttcaatttttcagaccgacgcccaagtgctggagatgtcttccgaccaaattgacgaacgcgtacgacagctcgacgaagaaattcgcgtcatgagggacgaaatgcgcaaaattgcgtacaacatcaaaacaatgggaacgaagacgaaggagaacaacaaacagatgcagaaagtgagcaaacaaacaaaaggaggaacgacaaatttatgacgaaaagcattttcagtacatgaaaatgccgtggctggtggccaatgtcgtggaaattctggacctcgcggatgaccaagcggaaggagaagaaggctcgagcagcgacttggacgcgcgtcagaagaaaggcgcagtcatcaaaatatcgaagggactcgtcatgtttttgcctcgcattggtcgcgtcggcccagacgagctgaagccgggggacctggtcggcatcgacaacgacacttatcacatcatcgcaaaattgccgccccattttgaccgacgcgtcaaggccatggaagtggtggaaagaccgacggagacgtacagcgaaattggcggatgcgagacgcaaatcaaagagttgcaagaggccattgtacgtgtcaaaaaacaattttggatcaaaacttcccattttctcattttcaggtgcttccaatgaccaaaaaggagctgttcataaagattggcattcatccaccgaagggcgtgctcatgtatgggcctccaggtgtcgtttctcacaaatcaattcaaattttcattttttctgataggtggcggcaatttctctcttttttaaggaactggcaaaacattgctcgcccgtgccgttgcttctcaaacaaaggctacctttctgcgtttgtccggtactctgctgaaccaagtgggcctcggcgacggggcgaagatggtgcagaacgcattcgagttggccaaacagaaggcgccggctatcattttcattgacgaattggattcgattggtgcgcgcatttttgaatttgctttactgacattgtgtttattccttctgcaacgcaggcacgaaacgattcgacgcctctgacacgggggaccgagacattcagcggacgatgttggagttgctgaaccaactcgacggattccaacccaacgacgacatcaaagtgagtggtggagcaagccaatcaattcacattcattttgttttcatttaacgcaggtcattgctgcgacaaatcgtgttgatgtgctcgacccggcccttcttcgctccggacgttttgaccgcaaaatcgaattcccagcaccaaatgagaagggcagggaacaaattcttcgcattcattcgcgccggatgaacgtcgagtcggtgacagaattttaggaaaacaaattattcctcgttttcagcaaaaatgtcaactttgttgagctgtcgcgctgcattgaggacttcaatggagcacaatgtcgagcagtttgtgtggaagcggtgagcggataaacattttttgaggatatgcgtcagcttatctcatttttacagggaatggttgcacttcgtcgtgactccactaaaattctgcatgaggatttcatggacggaattttggaggtaattagtaacaatttgagaaattttggaggaataagccaaacttttcaggtgcaaggcttgaagaagaataatctggtgtattatggctgatgggcgtcttctccggcggaatttaactgatgtgccacggctgaacactgcccagcaatttgtattgacattgacccatttccatgtgatgccttatgccttgtagcctgtattgtactacatttcgtatatgtgtttttgccactgtatttcatgtacaaatgttctcgtttagtgaaattgttgtttgcgtgtgtttgtttatattatgtacataaattattcgcgcatatagagaagtacccgatagcaaactgtaaccgtataagtgagcaggaatttcgtcactgaataatacatttgaaactcataattaatatttttaggtcctaaaaaacagaataattgctaaaaacgagaaaaagtgccaaaaaaactaaaatttagggggtgtaaaatgacaaaattttattccaaaagcttgagttaaattatttttaaaattacaaatagttcatatcaaaaaatataataataactagggtgcggattcttaggtttttacttattttttctgcggctttaactcgacgagaaatgcacgaaaaacacattttttgttcggaaattcttcgttttaacgtccctatccgaccctaggaatccctattttggatattcgcccctaaaaatccctattttgagtgttcgcccctaaaataagtttttatccctattttggcgtttcgcccctattttcgcccctatttcgcgaattttttgcccctatttaggtccctaaattggaatttttcgcccctaaaaatccgcaccctaataataactttaaatttatgaatgattgcaaaaattcaatttattttatttaagaaaataattagcaaaaacttcgcccaatcagtgacactttttgcagcccttcgaattgtcctcagacaaatcgcaaaagccatctttgcaacggtcacagctgaacaaattaacgaataaatggagtcattgtttaaatttattattattattattttaattttctgtccaatttctcccactttttcccctgcacattttccttgcaaaggcattgtccggccaccaattggtgtgccgtgtcatcctccgccacgcatgtgccgtcgttttgggtgccccttttgtcgcattggcatggacgacaaacatttgggtcttgaagagaacctctcatggaattttaaatctttagagtttttaagtgtataattcaaattaacagcttttgttaggctttgcgattgcttgtaaaagtacagcttgcatttctcgcaatttctgtcccgtgtgttttgttggcaattgtcgtagacgccgcccgaggcaaaggcagtcgaattgtaaacggaccaatcgaaatggcacataaaataaaccattaaaattaaatgcatccatttaaatcatttttgtggcttttaccgcggcacgtgtccattgcattcgcattcgccacgctctttggactgctcgccgctgccggggcgccacggcaaatcgttgtacaaatccttcaaattggcattattttgaaaggacatttgaaacaaatgtatgtacgttaattcacttggcactgttcacaattcaacccttttgtgttgtgtttgcattcgtaaatgtcatggacaacctcataagaacggctttaaatcaacaaaataataataattaatcaaattgaaaattgtggcacattgccgcgcctggcatggtggccgtactcatattttgtgtatcatcgtgctgaattaagatttaatttgaaaaatattcaaaataggaaactctcgcacattttggcgcactgcaactgcacacaatgcaaaaaaaacgtccaaaattgtgtataaaagtcgctgttgtgatgcatttttctcatattttactaacggggcgtaacacaacgagaagatggcgcacccagccggagatgtggtgagcgattggtgcttttcattttcttctatgtcatttcattttttcaatttttcagaccgacgcccaagtgctggagatgtcttccgaccaaattgacgaacgcgtacgacagacagctcgacgaagaaattcgcgtcatgagggacgaaatgcgcaaaattgcgtacaacatcaaaacaatgggaacgaagacgaaggagaacaacaaacagatgcagaaagtgagcaaacaaacaaaaggaggaacgacaaatttatgacgaaaagcattttcagtacatgaaaatgccgtggctggtggccaatgtcgtggaaattctggacctcgcggatgaccaagcggaaggagaagaaggctcgagcagcgacttggacgcgcgtcagaagaaaggcgcagtcatcaaaatatcgaagggactcgtcatgtttttgcctcgcattggtctcgtcggcccagacgagctgaagccgggggacctggtcggcatcgacaacgacacttatcacatcatcgcaaaattgccgccccattttgaccgacgcgtcaaggccatggaagtggtggaaagagcgacggagacgtacagcgaaattggcggatgcgagacgcaaatcaaagagttgcaagaggccattgtacgtgtcaaaaaacaattttggatcaaaacttcccattttctcattttcaggtgcttccaatgaccaaaaaggagctgttcataaagattggcattcatccaccgaagggcgtgctcatgtatgggcctccaggtgtcgtttctcacaaagcaattcaaattttcattttttctgataggtggcggcaatttctctcttttttaaggaactggcaaaacattgctcgcccgtgccgttgcttctcaaacaaaggctacctttctgcgtttgtccggtactctgctgaaccaagtgggcctcggcgacggggcgaagatggtgcagaacgcattcgagttgtccaaacagaaggcgccgactatcagtttcattgtcgaattggatacgatgggtgcgcgcattggagaatttgatgctagatgaccatttattcgtttttcactgcaggcgagatgcgagtaaacccctttgactcgtcgggcagtgtcagtcagagcgtcctgatggagttgtaggaatccctattcgggatattcgcccactaaagtccttatagtgagtggtggagcgtgacataagattcactccctttttgggcgtttcgcccctatgtccgcccggtatactcagatgaattttatgcgcttatttaggtccctaaactggaatttttcgcccgctaaaaatccgcaccttaataatacctatgaatttatgaaggatggcaaaaattcaatttattttatttaagaaaataattagcaaaaagttcgcccaattagtgacacttttagcagcccttcgaattgtcctcagacaaatcgcaaaagccatctttgcaacggtcacagctgaacaaattaacgaataaatggagtcattgtttaaatttattattattattattttaattt

SEQ ID NO: 499 - DNA, 1957 bp, Heterodera glycines
ataattatgcaatgattatgttcagatatgtttcatcgcattacttatcacaaaactacctcctaacgtattgaatgatttaaagctccttttttgtcagattacgcaataaggactgcttctttccgttgtcttcattggtggagtaattccaggatctgctaaggctccaccacaccaatttttaaatctgctataattatgcaatgattatgttcagatatgtttcatcgcattacttatcacaaaacgacctcctaatgtttatattgacttctgacctgggctctttataggattatgcaattaaataatgtcgcggagaaaaaggtgctgcagaaatatagctttaagaattaaaataacattgttaaactgtgaaaatcaaaaaatgatgaattttgacgaagattttacaatttgtgggaaacatttcttgtaagccgtctctgatgccattttctaatgatttaaagctccttttttgtcagattacgcaataaggactgcttctttccgttgtcttcattggtggagtaattccaggatctgctaaggctccaccacaccaatttttaaatctgctataattatgcaatgattatgttcagatatgtttcatcgcattacttatcacaaaacgacctcctaatgtttatattgacttctgacctgggctctttataggattatgcaattaaataatgtcgcggagaaaaaggtgctgcagaaatatagctttaagaattaaaataacattgttaaactgtgaaaatcaaaaaatgatgaattttgacgaagattttacaatttgtgggaaacatttcttgtaagccgtctctgatgccattttctaatgatttaaagctccttttttgtcagattacgcaataaggactgcttctttccgttgtcttcattggtggagtaattccaggatctgctaaggctccaccacaccaatttttaaatctgctataattatgcaatgattatgttcagatatgtttcatcgcattacttatcacaaaacgacctcctaatgtttatattgacttctgacctgggctctttataggattatgcaattaaataatgtcgcggagaaaaaggtgctgcagaaatatagctttaagaattaaaataacattgttaaactgtgaaaatcaaaaaatgatgaattttgacgaagattttacaatttgtgggaaacatttcttgtaagccgtttctgatgccattttctaatgatttaaagctccttttttgtcagattacgcaataaggactgcttctttccgttgtcttcattggtggagtaattccaggatctgctaaggctccaccacaccaatttttaaatctgctataattatgcaatgattatgttcagatatgtttcatcgcattacttatcacaaaacgacctcctaatgtttatattgacttctgacctgggctctttataggattatgcaattaaataatgtcgcggagaaaaaggtgctgcagaaatatagctttaagaattaaaataacattgttaaactgtgaaaatcaaaaaatgatgaattttgacgaagattttacaatttgtgggaaacatttcttgtaagccgtttctgatgccattttctaatgatttaaagctccttttttgtcagattacgcaataaggactgcttctttccgttgtcttcattggtggagtaattccaggatctgctaaggctccaccacaccaatttttaaatctgctataattatgcaatgattatgttcagatatgtttcatcgcattacttatcacaaaacgacctcctaatgtttatattgacttctgacctgggctctttataggattatgcaattaaataatgtcgcggagaaaaaggtggtgcagaaaatatagctgaaagaattaaaataacattgctaaacatgtgagaatcaaaaa

SEQ ID NO: 500 - DNA, 2391 bp, Heterodera glycines
ccgtttctgatgccattttctaatgattaagctcccttttttgtcagattacgcaataagaactgcttctttccgttgtcttcattgggtggagtaattccagggatctgctaaggctccaccacaccaatttttaaatctgctataattatgcaatgattatgttcagatatgtttcatcgcattacttatcacaaaacgacctcctaatgtttatattgacttctgacctgggctctttataggattatgcaattaaatattgtcgcagagaaaaaggtgctgcagaaatatagctttaagaattaaaataacattgttaaactgtgaaaatcaaaaaatgatgaattttgacgaagattttacaatttgtgggaaacatttcttgtaagccgtttctgatgccattttctaatgatttaaagctccttttttgtcagattacgcaataagaactgcttctttccgttgtcttcattggtggagtaattccaggatctgctaaggctccaccacaccaatttttaaatctgctataattatgcaatgattatgttcagatatgtttcatcgcattacttatcacaaaacgacctcctaatgtttatattgacttctgacctgggctctttataggattatgcaattaaatattgtcgcagagaaaaaggtgctgcagaaatatagctttaagaattaaaataacattgttaaactgtgaaaatcaaaaaatgatgaattttgacgaagattttacaatttgtgggaaacatttcttgtaagccgtttctgatgccattttctaatgatttaaagctccttttttgtcagattacgcaataagaactgcttctttccgttgtcttcattggtggagtaattccaggatctgctaaggctccaccacaccaatttttaaatctgctataattagcaatgattatgttcagatatgtttcatcgcattacttatcacaaaacgacctcctgttgcggctcggcccacaagccgcaacgggacggttcgtcgtccatggttcggggtggggtggagagaaggaagggggagggggagggggtcccctcccaaactccccatgctgggttttctctctttattcggtgtacgatcggagccatgaaatgaacaattcatggggcttaaatacgatcacatttgggttgggcctacatacaaaacatacaaaccaattaattagagaaatgggctgatcaaatgggctgtctttttctcttccttctcttctttcttcgctgtgacttccttcatttgcggcagaacattcacatgcattggttgatgttgtctccattcacgtgcactttttgtccccatcggaccatgtttgggcggggagggccggtttctgtgttcattcatgtgcgccgcttggtcgattgagctgttattctctctccaaattgccacttttttgcccatttttcatcgtttcatcgcccactgattattttcccccttttttgccctttcgctcgtcgctctctttccattcgacaactgtccgatcatcggacagtcgcggctaaattcgagccgcgacattcccacgcttgaccaacgtgtgcacgtaatcgcccttggcctctgacttctgctgggcactctgccccttggcctttgacttcacgatgggccccagcgcccttggcctttgacttcatgatgggccccagcgcccttggccattgacttcatgatgggccccagcgcccttggccttgacttcatgatgggccccagcgcccttgtccattgacttcacgatgggccccagcgcccatggcctttgacttcacgttgggccccagcgcccttggcctttgacttcacgatgggccccagcgcccttggccattgacttcatgatgggccccagcgcccttggcctttgacttcacgatgggccccagcgcccttggcctttgacttcacgatgggccccagcgcccttggccattgacttcacgatgggccccagcgcccttggccattgacttcatgatgggccccagcgcccttggcctttgacttcatgatgggccccagcgcccttggcctttgacttcatgatgggccccagcgcccttggcctttgacttcacgatgggccccagcgcccatggcctttgacttcatgatgggccccagcgcccttggccattgacttcacgatgggccccagcgcccatggcctttgacttcacaatgggccccagcgcccttggcctttgacttcatgatgggccccagcgcccttggccattgacttcatgatgggccccagcgcccttggccattgacttcacgatgggccccagcgcccttggccattgacttcacgttgggcc

SEQ ID NO: 501 - DNA, 2968 bp, Heterodera glycines
  unsure (1)..(2968): unsure at all n locations
cttaaatacccngggaaacgataaaattttccgattaatgcaaaaaaacaaattttaattgaagaagaaaaacataaaaatgataaaaacgagcaaattgatcgaaaacattagtgaataattaatccttccttcagagagttgccaaatcgaatttgaaattgggcccaaaattcgcctcaattttgtaaccagagccaaacaaagaaacgaatggataaagagaaccatcagcaaaagatggagcaacgaaaaaatcggagttatctgtgaaaaagttaagggatttttgattattttaaacataaaaataaattagataaaatagacaattaaccaaattgtaatttaaaatcgtaaaattatattatttattcatttgccaacccaaacgaagtccatttttggtgaaaatgatctgtcgagtggccgaattgacgccaattcctacggtatcgccaacaccgtaggaatatttgccatttcttccctttccttctccgttaatccaaagttcgccatcactgtcaaatgcttcgccatcactgtgaaatgcataagtgcccttttcaagtagaattgtttcatccaattttgtctgctgtttaacagcgaatccgaagatgaagccccaactgaataaagaaataaattttaaaatatttcactttttataccaaaattcgcttacttctcttttttcataactgaaatttcgtagtaaaaaaagtcggacaaatgcttattcagcacaatcggatatttagcgaagacggagcgccaacctttttaagggaaattgaatttttatgtaaattttanaaataccattataatttcccatattctggacaatgagacttttgtcaccactgatttcgatgtcctcgtgacaagcgaaggcattccaacaattttcttggaattttaaaaacccctgaaagtaaataattcgattttttaataatattatataataatttattaaataaattaaaaattatttttaccgtaaaatatttttactttatttttctcttccaattcattcacctttttctttgtctgattctccaattcactgattttttccaaaattttcttctgatcattttgcaattgtaagaaccgttcctcagcagcttaaaatagaaaacaattaattatttatttatttaaatgaaaataaaataaatttaataattatattcctatggttttggcattttttcgcagaatcggtcgagttttaagattttctctgattgtattaattctgctgttgccagtcaaaatgttctcaataattaaaggattcgaaaaatgtccaattgcgcagttaccaaagaaaagcccaaaaatttcattttcgttaaattgccctcgccttttgtctgctgttgttgctgcttctccatttcaccaattctctccaaaattgctttcaaatgatcttccgaaactgaaatttgaagcaattttcaattatttttttaaattgtcgttaagttagcaaattatagctgaaaatgtcttctaatatttgtatattaccatcttttgtcggagttttcctgtcttcttgctgttcttttccttcttcttcttcctccagactgaactgatcatcattcattcctcaaaataaaatttatgaaataaaatttaaaataataatttttggctctattttaaataaaaaagttattttctaaatatttttggccattactttttttgaacaaaacaaattttatgaaatttacagaataaaaggactcttggagctataaatgatacaaagaatgttaatttgggtggtgcttctataaaatgctatagtttcaagtgttcaaataattttaggccatttcttttattattgtcctgtgaactgcagcaatagggcccaaatttttcgctttatttgattaataaatttcaaaaccatttcttttaatgtataattttcatactgtatccactcaattatacaaaattccctaccgtatccgtcttgtccaaacacttcacaacttgcgacagatggctccgttgttttcgctcgattcagctcagcaattcgggcaatcagaacactcatttcctccgatgtgctcagatttggaaaaattgctgaaaatgaaaaattaatttttaaaaaattaattttagcaaatttaattattgaaaaatgtttttattattgtattttaattatgcattttaacaaattttttacgttgaagaggagaaaattcgtcggccgatgaagaagtcgtgaatgatgacattttaattttaaaatctaaatttaaacatttttatgattcttttcgtaaaaaatgatcctgttaaaaatatatttttctttatttattttcattttaccataccgtttttctgttcaattttggccactttttccttcaatgccttctgttcgcctatcatttcctggtgctttaactttagtgccttctaaaaataattagaaaattttggcatttataatttactcaaatttttatagcaaactcacattttccagttccaatttggccattttcaattccgtttccaatttggcaaacttttcatgaaattcctgaatttaaattaacaaaatcgcttttgtctcacattaattcaatttttctgcaattctttcttctgttagcttttcttccgcccaccttaagctgttgttgttgatcagtgatcgtttcactgtttccatcaaattgtccatcattttccaaactaattgcatcgccattcacttctaaaatttaaataaattaaatctttaattttaaaataatttaattaattcatattcaaaatttaaatttttctcccatttcctttacccctgttttctgctggtgtaaaatcatctccacaatttattgaattggtcgaaattgacagttttgagttttggtactctaaaaaaagattaaat

SEQ ID NO: 502 - DNA, 6319 bp, Heterodera glycines
  unsure (1)..(6319): unsure at all n locations
gcgatcaaaaagccatgcaaagtgcgaaaaagggatgtaataagtcaaaaaaaatcaaaaaaacatttacagaatgccgtggccattgtccgcggttgcgcttcatcggtttagtgctttggcattgggcggtcgggcaaggtccgctaatgaccaccagcagcagcagcagcacaacgggttgcgggagaaagtgggccaaggccgggcacaatttggggaccgggaaaggcacgccgaactcggcaagaagttcagtctgttgaagaagtcgactagcaatgacggagcagcncatgggatggtcaacttttgtgttatctatcgaccatttctcgtgttcggctcgcaatcagtggacattcttttgttcatcagggtaattaattaattattaattgagcaattaatttttgatttttggcactttttcactctccagggccttttggaaggtcatttcaatgcaaaaacaatggacgaatatttggagaatggcaagcaaactgagaccaattcgtacttgttgaccactcatttgtcacttcgaaagctgaccattcaattgctgacagtgggagaacattttggatacaaatttcaatgtgaagaattaagaaaatgatgaaaactcataattgtaggctgttaaatttaatatgagttatctccggattttttgctaataaaagattaggtaaacagaaacacttgggttggggtcgttttcgtactacgagcccaaatttttggctataacttttttatttgtcaaccaaatccaacattgttggtatcattagaaagctgaggtgtttagaagctttttctaagctattgctttgcgattagacaattatcaaaaaagttatacatgaaaattgcgaaaaagttgaaattttcaagttttttctaaataaaattttctccaggctttaaaaacttttcgctttttggtaaggctaatagagcatgtgttttcgaatgataccaacaatgttggatttggatgacaaagaaaaaagttatagccaaagacatgctgaggccgaatcgtgagggccgaactgagaccgaaaagtgaaatttttcggtttccgagactaaaacccgagaccgggaagcgaaaaaccctagaaatttcccgagtcggtaaccgagactttcgcatatccctccctaatcattagtgctgctgatttggggcacaaacattcacaaaaaatgttttataaaaacaccaaaggcatggaaaggggcagcagaaaagccaaaaagagcataaaaatcgaaaaagacaacatattttcatgaaaagaaaatagaatgacaataactcaatttttaagaatttttttctttccccgcaattttttcaatagatttctaaataaagttttattccgttttaggccgtaatttttgagaagatttaattttcaaaaataaatttgagtgttggagaagcccatgaaaaagcagaaaattatgacgaaaaacgggtacaaagtagggttggccgttccgggtacccgaaaattaaaatcaagaaatatgtaataaaatttatgctaaaaattctgaaattaatgccagcgaaaatttgtgaccaaaatttgaaaacaaagtgtgttatgcataaaaattagatgatcagattttccgaatcttccaggccgcgctgagctttttttgaaaacgatcggtttccgggcccggcttctcgaaaccgtccacaaaaagccttgatttaaataataaacaaataaataatacatataattaaatttgtcatgaagtgcaagggcgatttttgcacacgaatttacaagcagcatggggcgaatgaatgttgtgatttcttgatttgaaggagcatgaaaataaaattgacgatcaaatggaattatctcgtgaaaaaatttaacagaaccgtgcatcattaatagagctcgcaaaaaaaggcaccataataggcaccaaaaaattgaaaaaaggcatgaaaagacacaaaaaatccaaaaaaaaggaaataaataattaggggtgtattttctgaaattttttgggtcacatttcttagggatgtattttcccgatttaattgcatttgataattatttgaagcttttcatactcaaaaatttgggattttgctatgagaaaaagatggcccgctaaatcaagaatataacaaattacaacgtgcaattcattttaaaaatacacccaagcaaaaaaaaagaatttcttcgaaattttggcaaatttttcagatattttgttcgcttccgtaaatttacgctgaaaacagaatgaactcatcagaaaatttttgagatataaggttagaaactgtgaagctagagtttgataaaaatttggcatttttatttttgttttagtttaatggaattttttatgtttgtttaagcaaaaattgaatattttggaattttgaggtttctaatccatatatttgtccatatttgaccatttgtgaactttttagtccttcaatttatcgctaatataaacttgcaatttttgtatcgaagggcggaattcctttgtgtccctggaataaaaaagctgtttaacgagaaaagtgaaatgatattcgaaaatcataaaaaagagcatgataaatttgtctgatcgttcttcgtctcttccttatttatgtgttcgcaaagagaaagtttggtccaaaatttgcatcaatttgatcaccgggggaaagcaaagaaacgaatgggaacaactgctgccggtgatcagttggaaatgaaaggaacatattggcggtaactgtaaattaaacaattatgttttttattatttttgctttttattagagagccgagaagtgatttgaacaatatgatcaaaaaagcgaaaaaatcaacaaaaaaacgataaaaagttcgatagtaatcagacgatatccgatcgcatcgtctctattttaaatgtattttttttgatgaaccggttcaaaaacaaaatcgatctttcaagaatttgaatcttacaaatcaattcgagttttattatcagggatcattttttatgtaaatacatgtttttcccctggattctccatagcataattagcaggaaaaacactttttttgtgtttgcgaacaaaaatcgggccttttatttacataattttgcattttttgagaattttttattaaatgccaccaaaaatccaaaatttcgcaattttttcaaaaattttcagaatttatagaattatttgtgaaaagtaaaatttttttttgaaaatgtgctccaaaaaaataatttttttttaaatggaatatcaaaaatttatttttaaaatagtaaaaggtgattctaagcccttttaggtcatttttatggcaatttgtgcctgttttaccctttagaaaaaatatttttccaaaaaaatcacatttaaaacatttttatttacatatttttgtacatatttctggatttttgtacatatttcgtacatatttcagaagtttttcatacatatttcgcaatttttcttacataaaaatgatccctgattatttttatttgtttaaattaaaaaaacccaaacggtgtccattttttgtgaagataatttcaagagttgtcaaatgaacgccgagaccgattatatcaccactcgaaaatgaatgtgccgcgtctatatgttgttgctggaaaccattcacataaaaaatgccattgctttggcacgccaaagtgccccagcggttcacaaccgacacaaatggctttagtttgatggcaaatccgacgacggcaccaaatggccttgaaaaaattaacgtaaataattgctaatagattaaaacaggaaatttgagcgacaaatatttcccatttttattcatataagaaacctttttcgacaaatttttgccaaaaatcaacaatttttggtcaaaaattgtttatatttcttaaatttattaactttaaaaaaattgtgtcaacaaatttttcctttttttaagatttaatgcatttttcttaaaaatttttgttatatttaaagttcgaaatatgtttttatgtgttgaaattaaagtcaaaaatttgttgattctctagcaaaatatttaaatatatgcaaaaaaaaggatgtaaagtccaacccttttaataattaaaataaattaattaaataatttcttttaaataatttttcctcacgatcgcaatttttcgatagcaatttcgaagtagaaaaggccatttgaattggcggagctttgaatggaatgtttcgcaaagacagttcgccaatctttttttaggaaaaatatctttttattaataagaataaaacggaaatttcaaatttgctggatctgcgcgggattgagggattttggaaatttcgagaaatttgaactatgtatataaaaaagctccaaaaaacaaaaaaatattttgaaaatgttgtggtcaaccaagtgtttttgaacgagtccgagggttggagagaggtcgggctgccaactttggtaagtaattaatccataaaatttgacgaatttatgttgcctttcattttactttttttgcggcacactttttcaaaatgccttttcgtgacagaggtgagggttctgcggtgccgattgcgaaattgcggacttggaccccagcaaaatcccgcgccggtctctaatgataatgattatgattagggatgtgaattttaggttttaactaaatcttttgctcaattgttttgaagaaaggagctcaaaaacgcatttctgcgttaaaaattttcgattacaaatcgataatttccgttgatatcgcttaatttgggggaacacaaaaaacggtagcgcactgcgctgtggacgaggattttagcattcaaagtagtgaccgggggctttataatttaatcacttttctctgttttctcgcgcatatttttttaactctttctctaattctctcctctctcctatagtgaatgcgcatctctctgcccaggggggcacagatttttatcccaatactcacccctaaaaaccgacgcaaaaattttcaaaaatcactcctaagaaatgaaaatttttttatcgaaattcattttcttgtcatgaatttttaattaaaaaaatttttagatacctattttggggttttgcccataaaaatccaaaccctactcatttgcaattgcaatagtggaaaaaaaagttttgcttaatttttggctgaaaattatgtaactatttcggactttttgcctttggcattttttctcactattttagttaactatttttggcttttccgtcactaaaagtcacatccctaattatgatttataaatttacataccatcgttttgctttcgtgtggtgtaactgatcgtcagacggttaattatttcgaggtcataaacataattgaagcaacgagaatcataggtacaggtacgagcatagtaatcccaacaattaagctgttttttggtctcgtcgcttctgcgggcgttggcgttggtaactgatgaaaaaaaacattgtttttttgctttgttcgttttatgcgtcccataagattatggcatttgccaattttttttgcacatttttttgtgttccatatttttatgccttttgtcaattttccattagcacattaattttaggtcaggattttgcaaaatttgatttatttttttgacaaattcgcgaaattcttcaaaattttggtccttttgtttgcaatggcagcatttttaaattttatgccgtagatgccgcatttcggccccaaccccaaaaaccccccccccccccacccccttgcctttttaaacgatccatttattacctgcgcttttttctgttgtttggcattgcccaatttggcaggctctttggtcgtttggtttgccagctgccaaattaaggaaatagtaatcatatactaactaactagaggaatactggaaatttttcatgaaaatttcttcaaataaattttttctaaaataaaattgaccccccccccccccaaattggctccttgacattccgacagtggacaatccgtcagtacacaaagataagaaaatgccgtcgcagaagaggatcgactgagccatattaagaatataagggaaataggatggtaaaaagtgtacagtgggtctaaaccattattcttctgcagattagttttcggtttggtattttgtatgcgatggttgcttttttgttggcatttttttttgccattcctcccatgtgattaacgttttgtggat

SEQ ID NO: 503 - DNA, 6016 bp, Heterodera glycines
  unsure (1)..(6016): unsure at all n locations
atcattttttaggctctcctttgggccgatgagaaatgccgtcagaatggcattgactgctcgggggacaatcgtcgtgccgtgcttggccctgctctgttccaaattcgttttccactcatccccaaagaggacttttcggaacaaattggtaagcattttaaatactttcatttaattaattgatttgttttttagtgccttccggcgttttgacaaatgacgaaatgtttgccgttttgctgtaccattcgagtcgcgaaattgcaacagaatgccaagctccgtgcgagctcaaatttgccaccattcggcgcaattacatttgcaagcggacttttttggtgaaaattgaacagttttctgcgcttccacgtgcctccgataagaattacgagccaattgacagcgccgtggtggacatcaaagggatccgatggcaattggcctattcgttttttttattccaagtgaacaaaaaatccggttactttcgcctttctctcacgtgcaaccaaaatgagaaaggtaatactcagctgagaaatcttaaagtgattaattgcgcaattaccaacacaattaagctgccgattggaagtgccattgttggacaatcacgcgaacaatggcacaacaaaaaacgggcaaaaaatgcgttgtctgggagagagatgacatttttcgtcgctgcaggccagacttaacatttaccagctttttgatggatcggaaggtagtcatgggatttgcttgttaactttcattaattttcaaatttattttcattacttttgttaaaaataattcaaatattttataataatatttggcacgaaaccaaagcgagaacatttattgggtttattttttctaaaaaatgtttaaatttgtcttcaaattattctcctgttaataatccagaaaaaggatttttcaaattttctataaaatatttttaaaaattttttgtcaaaatcaacaaattttcgtatataattattttaatatttcaaaattgttcattattttgtcttgagatttgaaatttttgccagtattttaattaatttttctttaacaaattttggcaatttgaaatttaatttttaatatgctaaaaagtcactttagattatttctcttgtaaaatgttaatttcaaaaaaaagtaaaaaaaaaacattgatgctaaaactttgttaataatttggcaccataaaatggtaaaaaatgatttagcaattgatggacccggccaacggtttgtacaatgcggaggaggacacggtgaccactcgcatgcaaataacgtcttgtggattatggcacaatcggctgacttcggcgacggcattttcttatttttgtgtatttttctgtccgattgtccagtgacgcccaaattgaccatttgctgctgctgcgtctccaattggacaattcgtcccaaaatagtattctgatcattttgaaaccgagtcagttggccaactgaaaccgggcaaagcattattagtttttagtagagtagagcgggaccgggaccaaaacacagacaactgagtaaccgggaccgggattagtcccgggtttcccacccaaaaattcccggtttttcaacccgaaaaggtcccggttttgcccaaaattcccggtcccgctctactctagtttttagcatttcggcatttttgtgtttatgaattgaaatcaaaatcaaaaaaagtgcacatcattgggacataaatttaaaaattcgtcattaaatttttttattaatcaagagttttgaattattttgtcaacaattaaaacaaaataaattaattttttgttgccttttattgctattaattagtagggctgggaaatttaggtaaaaaaatcccgaaataggtataaaaataggtaaataaaaatatttattgacgatttttttgtggaaaagagcaaacaaagatgaaaaattttggttctattgctttgtaaacgaataatttaaatattttaatatttacttagaaaaatattgaccattttacattaaaaattttgttaataaaaaaataataaatttggggaataaattttcatgaaaagtttccaatcttatgggtgtattttttgaaaaaattttctgttcgattcttaggggtatattttttgattttattgcaattttgttaagattttttgccaaaacaggtataaaaataggtacctagttaataagtataaataaaaactcccaaataggtaagaatatgtattataaaagtagaagccccaaaccttttacaagatgaatagagtcggagaaattttatgaaaaattcaaaaactttagatttaagcgcatttaagttttttcaaaattaaaaattaaaaaaccaacataattcgtatatttgaaatgacaataaatgaatgtacttttttttcacttaccatattcgacttgcccgtcctcttcattatgctgctgctggtgctgctgttccgtcttgacaacattggcctgcaaaaaatggactttttcgaaaaatctgaaaacgcactcgaaaagcagaattggcatcattaagaaaattatttttttgaccaaaatttacattttataaaaagacgacgtgatactttataatattaaaagttgaggggtacaggtaattttcaatttttgccggtactggtactgctcaattctagtgattatacctaatttatattaaaaaaaactttccggtgccggaccttccactgaagagaaaatttttttgaaaaattatgatcaaaaacaaaattcggaatggttttttggttgttgatcccatttaaatttatatattcaaaaatatatattagacggagataaaaaattttaaattttattctaatagaatttatttctcgttctgaatagacgattacacattttttattttataaataaacttccacaaattctggaaaaagcccgagcccggcgggcgccaagaaaatttgggaccggacccgagttgacagggaagcccagcctggtcaattgtctaagcccatacccaagcccagaatctttaaaattccgggctctaaaaataaaatattcattttaaacataataatttcaatgattaaaattttttatttttttttattttaagaaatatttcttatgcaaaaatatattttttattttttttaaatatttcaattttcttggccacaatttttgggttctaatataaattagcccaccatcgccgtgttctgctgctgctgctgtccttgctgctgatgatcaccagcagcaccgattgatgacgacgactccacggcgccactgggcagaaattggcccaaacagaacacatcagcagaattgcctgttttggcaaagtcccatttaaatgaaactcagtttttaatgtttgcttaaatttagatttctgggtagtccaatccaattatggttaagcagattttaaaaattgacggaaaacatttgagaatcatttagatattagattttcaaccatttgaacatttttaggatttcaaagataaagcgagtttgctgagatcatcatcataagcgatgccggtggaattttttttgaaaatctttattcattttattacagattttcaacccgtaaattttgtaaaataaaaatagcaataaactgcctttcgtttagaattttttgcataaaactcattttgtaccctttggcatattttacccctttttaatgtatgttcttgaattcaatcatttattttaattgcatttcctttttattgtgattttccccattaccctgctgctcttcagtggctggcacaaaaccaaaatatttcgagtcgattggatcagccattttatttccaaaaaaaagtaccttaaagaataataataataatgtttttttctcgatacacaaataaaataagtttattttgttttgtcgatttgtttttatttaaaaaacaaaaaaatatataaaatttctaaaagggcgctaaataaacaaaataaatattatgctcaattaaatatttgtgaactcatttaaagaggtacataatgagaaaattgaaattattttacatatgatattatccttttatcattaaaaatgacaaaaaaggtttatagttttctttttaaactcccttaattaaaaatatttttttaaaactttcaaaaagatgggaaaaatgcccctgctgctgatcggaattgggtcttttgcgtcacaatttttggcaggacacacaaatcagtgatcagttttttttgttttaaactaaatttaaattttataaattatacctaaaaataattttacaaataaaataagcaaaaaaagaaattggatagatttgaaaaatgagtggccataaagaatttgtgggatcaccaaaaatgaaatgtgtccagcaaaattttgactcaaaaaatgaagcggattgatgggagggaatctataaagcaaaatgcactctttaattaaaattcgggaattttcttaatcaatgcttcacgtttttgcttgagttgttaaatcctgacactaaagatataatgtacaaatgtaatttttgaattttcatgaaaatgacaaatttgtgagctttttgactcaaatttttgtaaaaccaaaggaattgttggttcggcggtgccgttaagtgccctcgggttaaatttttgaaattttctgcgattgttaacaagttttggaaacagaaaaaggatgccatcatttgtttccaaaaagcctgaaaattccaaaaaatctataaaaactcttcaactcaacaattgtcattccttcaaaattgtcatctcctctcctaatcgatggcaaagagaatggcaaatttttctcctccttctgacaacactgccccaaaaaaatttttatccgaccttgacccactacaaatccccaaagaaattgacacagacaactccattcccgactacgccaagttcttattaagcagcttcactccctcttaagcaccgcctccgtcctaattcattcacaggctgcggctgtcgacgcggtcgaggaggaacgacgactgagaactgtcgttgtgacaaatatgcccgaaagcaaatcggacaaagcggcggagagagcccgggaggatcgtgccgttgtggacgaaattttgaatgccacggacgtcgaccaagcaccaattgtcttccgcgttcctggctagatttgattttatctgccaatgaaaaaattattactgattgtactgttaaaggaggcattttttcatcggatcatttaacacaatttttcacattaattactcctaaaacaaaaccgaaaacaaagatcgtaaactttcgttggttttgtccatcgaatgtgttacattttaatatagtcatagcatcaaggctaaatgccttgtcatatgaatgctttagcataaatcaaaaatattccgcctttaacagtatgttgttagaaattttaaatgagtgtattccaataaagcgtttaaccaagaatgatttgactcctaaatacccacaacatttattagcatccatcaaagaaaaggctaaattattcagacaagctaaaactgacccatccaaaaaagcactatacgatagcatttctttaaaaagggtgacaaaaataatcccgaaaactataggccaatttcattaacctgctcactctgcagggttatggaaagaattttaagcaaaaatatttacaattttctattaaaaaacaaaaaaatttcggaatttcaatttgaattaatttttatccaaatgggaaaaatcggtataaggggcaaacttttgatgtggataaaggactttttgagtaatagnaccttttcgtgttacaattgtggatgatttatcctccagtaaaaaagttggctctggcgtcccccagggctctgtccttggacctttatttatttatgattatattaacgatcttcctgatgctttg

SEQ ID NO: 504 - DNA, 4741 bp, Heterodera glycines
cacctcgctccaaacgttcaatgacacctgcacgggacctggactcaatcactcccgcactcgcagagcaagaacgccaacgcacattggttctccttggcctcccggaaagcaatggttttcgcccatcggaacgtgtacaggaggacaggaaagtcgccatcaaaattctggaccagcttgatgttgaggctgagccaaccgccgtcttttgcctcggccgctacgacccgcagcgaacaacaccgcgcccgctcagtggtcatgccaacacccacaccaccaacatgtggcacttgggggatggaagcgcgagcgtgctcgactccgttctcaacagaacatggcccgtctgttcgtccgccctgcgctgaccaaagaacaactcaagaaggaatacgaagagtgcgtcagaaaacgtcaacaaaactcagctccaatggcaccggcaagctcacagacaaatggcccgactcccgttgtcgaagatggaccaaaccaggaggaggccagcgacgacatttccaaaccgccggaggtttttgaccaaacaatcctcgtctgttatgaagcattaaactcattaccacccaccgacaaaattgttcacgaaatgcaatcgctcaaaaaacaattccctcatcttttcaacaaatagttctaccagacctccaacaatttcttcaaataaaatatccctcaaactttctctaaaaattttactcaaaaaaatttttttttccctcttctacaacccctaaaaacaacaattttccctttgttggaggtctgacttttctaatttctgcttctccattcaaaatttcaattcttttatcactactttccatttcacctcatttccgccaaaagtgtaagtggcacatgcccttcttttggttatttttattttgaataaataaataaatattagaaaggaaatttacttcattttcaactattttttaaaagaggccataagggggattactcggaattctgatttatgacattttagggtcaaattccgatttttgggtgttgttttgaaaaaaaagaaaaaactaattatcttgctaaacaaatttttttaaataaaattttatatgcaaatcattttttaaacactttgacgaatatattgttggaaatgtatatgttaaaaaaaggtgagcgttttcgtaagttatggatgatgtgagagatggacgtaatgcacaaagaaaacggtagaaaaaatgccggaccaaatgagatttgggacgagaaaattggaggaaaaaggtggcaaaaaagagaggcggatgaatgagaggcacttgacgaatggcaccaaaaaaaggtaagacgaagagcatttctgtcgatcattcttactccatttcagaaggggaatcagccggcggcggtggactaggcgcataaagctataatttgaaaaatgcaagaaaatatgttttaatgaatcactaaaaaaatcaatggattaattttaaataaaaataaacagctattttttattataggtttttatgggcatttgaaaattgcatttaattttgtttgatacgttagcttacttcatttagcacgtcgctgatttcactcatgaacccgtcccaggcatcataagtggcgaaaaaggtgaccatacaaacgtcccatggctgtttggttttaaaatatttaattaaaagaaataaacccacaaaacattctcaaaaagcaggaaagaaagtaaaaaaacttgtttaaggataatttgtgctaaatttagtgggcttatcataagaattggcccacaaaatcaattcattatgcttacaatatgaagcggcaacggatggaaagtcaggccaacattgaagcgcacttcaagttcattcaaaacgccctcagtgaagtgctcgcgaatggccgctttctgaatcaattttcaaaaattttatttaaattcgttaataatatattatttataaggtttcgtttttaggcacaaaaaatcgcaaaatatgcattaaatggcacaataatcctcaaataggaacacaaatatgtaggcaaaaaaaaattgtttgctattaacgctttttatgaagtaaaacacgtaaatacttaaatttttcaattgtaaatgatattattaaataatttaaaaaaattttcgaataaggacaaattttaaaccaaaaatttttattaagaaaaaatattaaattttgtgatcaattttttgaaaattttaacccgaaataggcattataaaagtcatgatagaccagggttcggatctattctgatttatcagaaatcttctgatttggaggtagtgaccaaaacaaaaaaaatttccgccggacccttttccctcgcccatttcccaaaagttttggaaaaatgcgccgcaaaaaaaattcttaaaaatctgaatttttgatcccgaatggcagatcagaatctcaattaaaaaacttttgtacttcatttggggaataaaaaccccaaagaaatatataaaattgatggaaatataataaatgttgtggatacaattagggatttaggcataaatattgataataaattgcaattttccaatcatgtcacacaaataataaagaatgcatatttacgtatgcgttctttatttcgggttattaaatcaaaatctactaggatttggattattttgtacaaaacttatgttagaccgttattggaatatgctcctgaggtttggaatccatctcttctaaaaaatattaaaaaaattgaaaaatgtcaaaaatatttcaccaaaagagttctttttaaatgcagccttccacccattccataccaacaaagattagaataccttcaactgccgacacttgaaagcaggcgaaagctgtctgatctgttcatggctcataaaataatttatggccgaacagatcttaatccctttgaaatattcaaaccttctgaacgctttaacattcccttttatagacttaactcgaaatataaattaggcaaaaaatttataccttttgcggggcgggtaactaaaatttggaaccaactcgataaaaggctcattgaaataaactcattaaattaatttaaaaataaaattaaaactatctctattcccgtaaaatagaccggaaaaattaaagtcgaatttttaatccattcaaactaaaagtgatttggtcgctatttatttatttgtattgatttcatattatattttattttttggcggcgatctcgtttttaattgttttgcgctttcttgaggacattttttaaattaatggtttggcctcaatgtaagcggatttttcccttttgtggactttttctttattgacaataaataaataaataaattggtataaaagacatttttgatcagcagtaaaaattagcttagagattttttaaagattttcctgctaacttggaacgaagtgtttggtgattaaacattttgctccattacttgtccccaccaaaaagggggtataagacttttgtgccaccattcttttttgagaaaatcggatttaaaaaagatgaacaaattttttttgatccaatacttttgacctgtctgtatttttctatacaatctttttcagtccaactaatttatcgaaatgacattttccaaagtttttcagtttgggtccatttggatttgcttcattatcagagcgcataaaatttcttaaatttgatgataaaactattttcttaggtttgtcttttggttggaatcttgggccactaatatctttttttggctggtggcccacaaaagtccaaggtgcaaatgtcaaggcattatcccataatcatcaaatgattcaatattctcgtctttgacatacccaaaaaataatgttctaacacgccatacacttcttcacggtctcttctattatttgtgcatgtattggagatgtttttacaaaaatccttgacatagtgcaccatgcacagatcaatgtagctgaaaagcaaattaaataaatacacatacatttgtaactgatttgtgtggtgacggacgaacgaaaatttgtttactttttgcttgtcgccaatattggtagttttctactacacctgggatgccattctgaggccccaaatttttcgtaaattggaattccgaggcatccaaaaattttcggacatcggaattccgaggcccaattttttctgggtaatcctatgtaagtttattgtatgtttaataaacaaaaataaaataaaggtaaaacccatcaaattgcgccacgcactgctccacacaaaattgtgcatattcagaaacagaatgaaactgttgttcatcaatatcactgacggaagtcatgaacagttgctttgcggattcaggtcgaataatgttaatttttgcgctgacaaaaacatccgatcggctaaggccaaacaagggcaaagatttcttgaaaattaatgaattaaattaaaatacaatggtgactttttatattttctaaatgttcattaatagggcttccatttttaagcagaaaaatcgcaaaattattaatattttaaagttttcggatatcgaaaagtttttaaacaaaaatttttcttaagaaaaatagtaaaatttgaggtaaataatttaattttttttatcaaaaatttctgatccctcaccaattcccttctcttttctcacccagacccccattcttaccagttctta

SEQ ID NO: 505 - DNA, 1433 bp, Heterodera glycines
caaaaaaattatgacaattttcctaaaatttgtattaaaattgttgtccaggcccttaaccaggggatggttggaaaattctatggaaaattgattaatttttagaaaatttataacaatttttcataaaattttaataagagttttcctggcttttggcaccaccgaacacactcaaattttcataaaaacgaaccccaaagaatgcttaaaattggtcaattttttggcgaaaaatgaaaaaagtgctcaatttaaaaggtataataatgtcggaatacagttgggaggtcgaagaaaaaaatttcagtccgaaattttccgatttcaggaaatctgtcgcccgccccccccccttttgcataattggtagaacaacagaaagagaaacgaggagacctgcagccacgtctccaggtcaccaccattgacatactccaacacgagcaccaaatatttgacaccctggaaaaaaaaaattttttttttgaaagcccccagaggcccaccgaatggggcgaaacttcggtgaatgagtagaagcatttgacaatgttggtgtgggaaagcgacttgaaaatgtccacctcgttcagcaccgattcgtacatcagctggttctccttttcgatggctgacagctgaaaaaacggaattaaaaaaaaaaaaaatccatcgaaaaacaaggcccaagagtaagggaaccgcccactttggcgcggccattttggcgcaccccaatttataacgtgcgccaaagtgaccccgaccccaagagtaacggtttttgtagcacaagcccccattcatgcttttttgaaccgatccaatttggtttcatttgagcaaacgttatgggttctctattagcctccaattttcaaaaaaaatcgttaaattttgaaaaaattttcggtcaaacgatcagaagagcatgacttttttttttgaaatttaatgaaatttttgaaatattgtgggctaataaagagaacacataacgccaaagaatacaaaaatgaagcgcgaaatacaaaattatgtcgaggcgtgaccaatcggggcaaaaacgagaggaccaacaaatcaaatactgtgggttgaaaatttttactacggttttttaagcaacaaaaaaaaaacggaaatcctttcatggctaggaggtttacaaatttacaaaaaacatatttttgaaactcacattaatccgtttgagtgccacgtggcggtagcgttcggccggcgccgccgttatcaattcacgggcgcggaaaacgttggcaaacgcaccggaaccgatgccaacgacatccttgacgggaattttttttttgtttgggctaaatttaaagcacccattgatgcatttaggcagaaaaaatatttcaaaaaatcgggttggaaatttttttttccccgttttggaaacg

SEQ ID NO: 506 - DNA, 7509 bp, Heterodera glycines
  unsure (1)..(7509): unsure at all n locations
aatcggtgcttttgtcaaaatttgctgcttttacggagaaatgngatgatggaatgatcgatggagctccttaggaatctctttatcacactataattctttgaattttgaattacgtaatcaaaagtcgcttaaagcgaattttgttgggaagcggacggacgggcaattgaaaatgcacagattcggcatggttgataaacacataaaattttgcttctgctgctgatccacgacctttgtggtctctcaatgttttttttttgaaattttgtttctggcgtgaccagtggtggacggtgtacggacatttcgcctactcgacatctcgcctaccgacatctcgcctactgacatttcgcctactaacccaaaaacattcatttcgcctactccgcaaaaacattcatttcgcctactaattagtaggcgaaatgaatgtttttggcttggtaggcgaaatgacagtaggcgaataagaggggcggggcaggggggtgggcaattagttaaggagggttaacggtggatgagttaagttaagaagttaatgtaaatgtgagaaattgtggaaatctgaaaaggggaaggaggggggaataggaaaagcattttttgaaaattaggaaagggttggggtaaaagccagacattaaatgtgaatttttacgagtttgggttcgagttcgggctcgggagtccgggattggccaaatggtgccattttcatgacccgaccgactcaaaaatccttgggaaatgaaatgtttttcgaaaatttggatgtcgccactctgaccaccgctcttcctaaccaccagaattccgatggcacatcattaacaaacactactccgtcttgagacgaattctaaggcacatgggtgggaaatcgtcggcataattaagcccagggtggcaattttccgcggaattcttcagggcgtgtgcattttttagcaaaaaaaaatccgcccgtcttcctctataatatgtcctgtgtgtgacacacacacattcacgtccatgtccagttggttggcggcgggcggcatcttcttcccctgcccgcccaggcgtttgaatcactgatgaaaaatcgattttgggattatggcgtttgaatatgcaatgtcattgtgtaattaggcagactgtgtctctaattaatgtttttttttttgaaattttgtttctggcgtgaccagtggtggacggtgtacggacatttcgcctactcgacatctcgcctaccgacatctcgcctactgacatttcgcctactaacccaaaaacattcattttgcctactaattagtaggcgaaatgaatgtttttggcttagtaggcgaaatgtcatgtagccgtggtggacgacctccttcctcagcaattatttgttgttgccgcaactcccccccacttaattgacttggttaattagcctttgatgattaattatggccccggcggtcagagattttggccaaaaatttagtgtgacatttgaaaaataagaaattctggcctccgagtaccgaaatatttagggatgattgtttttcaattctttgaaccttcccaattttttcaattacataatttctgagaattttctttacttggccttgtttttgactttagctttttaaggtaaaaacccaatttgttgagttttctaaattttttcgagtctcaagccattttcactggcggaattatttgccaactacatttttccatgaattgtttattacacacaaatacatagtataggtcgaacaagtacacataatatacaatatagaatatacatacatataatatatacatagggctgacaacacggaataatgaatataggtccgaacaacacggaataatgaatgaaacacgcggggcacgacaatcaatcaatcaggttgcactccttgttcgtcgattcgcttctttctcccagtcgtaagggaactcgtggatgccattcgtgttgaggtagtcgcgcagaaccctgtctatccattcgtatttgggccgctggtaaaactccaggtcgtcctgtgggaagaggggggggggggggtaattagtataattaaagcggcacaaaatgtcgcataaaacgcacaatgtgtaacaagatgtcgtagaatattggcgggcatttcttcaacagtgcatgcagggcccgttgttgcacttccttcggcttgtggcttagacggagtcgtttcattttgcctgtctgaaaatgaagggggaaatggatatttgaaatcccgcgccaaatcccctccgacccacaaaactcacgcggcgttcgctcgtcacatgggtccatggcagcttgccggtgtacatgtcgaccagtgtgtagaaccaagactcgatgtcgtccgctcggcagtagtcggcccgcgcgtgcgctgcgatggatgcgtacattggcgtcccgcggaagtgcgtctttgatctttctcgcctgaatcgaccctgtgaaaaattggaaaaaattaattatgagagaggaatgggcggataatctctgctcacggattggctgatgtaacggcgcgcaagtccaaagtcgatcaaaaaaatgcggcggcgctcattggtctccgcgcgtccgattgtggcattctccggcttgacatccagatgaaggtagccaactttgtgcagcgccctcagtgcatcgagcagttgaagcgaaacgccaattgccgtcccagggctgaacacgtcgcccgccttgctcagcagatcaaacaggccacgtccgatcagcgacatactgaaagttgggggaaaaattagaatttttggcattttaatgacgcgattcggacggcactcgacttacacgacgtagttgaacgtcaccagctctccgctttgtgtgtcccgttgaacgtctcggccctcgtcaaaacagcgacaaaaatgttccgagccttggcccacccgaacagtgctcacttttcgcataatttcggcctgtaaaagggggagggatacacattaataaccaaattggtaaattacgaatttaagggactcaatcgaaaaaagcaattttcaaatttcacagtttgggggatttgtagtgctgttttgagtagttcaacgcatattgtgggtactgatcagtgtgatcaccaatctgacacgtccatgtcaaccaatttcgaatcccgtatcgttttgaacaaaaagtcgaactccaatctggctcaattcagtcaaaaaattaattttgcgactttttgtcagactccggaattttgagcaaaaagtgattcgaattcgggttccaggattctgaaattggttgaaatggacgatgcgtcagattcgtgatcactgatcagacgcgttcgataatcacacagaactgctgctcccgtccgcccccgccccgcataaaccgcacctccttccacaggaatggctcctcgtccgcgcgctccgttttcattgccgcttctcgtcgcccggcgtcagtgttgccgctgcacagaaacacggtgccaaacgcgccctgccccagctccttgatgatggtccatcggccgccgctcacgcgtgtgcctgcgctcagtgagaccaagtcgtagctgtccttgcgctccgccgacgctgttccagggctctgcgacaccgcgtcgtcgtcgtcctccgcgcgcttctccggcatgtgtcgtcgtcgcaaaagtgaagaaaatatgaatgtgtgtagagggattgaaaacaaatggcaggagtcatcaaaatgtgagccttttatacgcaaattctgctgggcactgcagcacccaaaatgtcgccggatgaatctttttggttttgggatgtataaaaggagggaaaatgtcggttggtctctcattcccttcacagcgacaacaacaacaacaacaaacaatcagcaacgacgacaattgcgcaacgcttcaacacagcacatccatcgcccgtgcacacgttgactccgatcacttctgctgctgctgctgctctccaatcaacacaatgggcttcctcttctacatgttcgtggctgcggttgcgttcggcggtggagcggtgggtttgggggtggggggaattcgcgttgttgctgctttttctgaatccaatcaaatttgtatccattccaaaatgtattgtttgtccttaaaacaatggacaaaatttctcgggattgagctttcaagcagggtaaattcgagactcataaaagcacggaaaatgcatttggcttatttatgtgttttttgctggtgtgagacgaaaccaaattttagaatccaaaaattgattttgagccttttcagaagtgccattaacatatacaacgttcagtttgaccaatttcggacccgaaaacccaaaatttcattgttccatgactagtaaaatggtttagttggcccgcttttgcctccgttcgtgttcattttgtgtctaatttgttcccattttcttttcagtactgtggcatgatttacaccaccaaacgggccagggcatcggcgggcggcggctccaagaaggacaagaagcagaaagcgtcgaagagctccagcggtgaacaatgatcgactcgaggacggccccgcggatgaacgaacgatggaattcgagcaacaaacgcttctccccttctaactgctgctgatcccccaatatgacgctgtttcccccctccccccaaattatatcatttgtatgtgctttatcaccctctgatctgttgtccgtgataagctttatgcgctgtccatatcagtgatcaaatcgttgtaattgttgtaatgatatatgtatgtatgtcctatatattgtatttgtatgtgctccaatgcaacacccaatcattatgtgtacataatatatgttgtatgaatgtattcggacaataaagctgtaatccttgtatcacacttgtaacagggctggagcgcgaccgcgatccgcggcaatttgaatgcgcggccgcggtttttttttttgcgcggtccgcggccgcggtttttttctgtgcgcgctccagccctgacttgtaaaactgttgttttttgggtttctaattaggcgttcaaccaaaacggcatttcacccatcccgtgccattttacgcgtccaacaaaggtcatttcataggtaattgatactaaaaaaaaattattcagcagttagcattttactgggacaaaaagtgtaggtagaaccactcaacgtaacggcaattcaagacaaaatcctattgtttaatttttagtcataaaaaatcgtcaaaaaacgtacgtaagaaatgcaaaaaagtcctgaaaaattaggcaaaagtaaagcacaaaaaatagaacattagacaatgaatttctaaagacaaaaaagattttctgcgtaaaagttccaaaaatccagacaaattacctaaatgtattcaaatgaaagaagcaacaaataaatataaggaaaaattatcagatcaatttccattcctatgatcaatcatttgtcatttcctaataattctttcactttttcttctgctgtccgctgggctcgggattcattttcggatgattttttgcgttcatttggcccgcctttagtggagacaatggcctgaatattaagtgaaatttgaatgactttaaacgaaacaaaaatgccgttgccacggaaccccgacatttgcgcctttgtcaaaaaaatcggaatcaaatttaattttttttttcaatccctgatctaaagatcattaaaattaaaacacagtcttctcacttattagagagcattaactctgctctttgaaaattttaatatcataaattcattgacgatcaaatgatcagatacgatcactttgtatcgcttgttttaggcgatcagcaagcagggattgaaaaaacccgatttttggacaaaaacgcaaatgccgggacacggttgccacgcacccaatgcaatttccataaagacgaatatcgactttgttcaatttgtccgactttctgtcctcccactgaatcgtcgccgtccccccaattgggcatcgcttcaacagccaaacagcatcagtaaattgactatcttcatccacaatttcatcgtttccttctttctcaaatgtcagcatttcgttggtccgttcgttcatcacttcaaatggcgtgacaatttccgttgaatcataaagttcaagtcgaaatgtgtagccgacaggagtggtggcacgaagaaatgcctaaacaatgtgaaacaaaaagcaaatggcaattaagcaaaatattttacggaaatatggccacacacctctttgaaactgttgaccattcccatggtttctgacacatgacaatagtcacaagaacgcaattgctttggctttccatcgtttcgcggagtgttcaaccaatttgacagcacttggccaacagttgcatttggtccatcatcagctggtgaatcgggcaataaatcatcggagtcgattgaattcaactgatcgagatcggcgagaattgttggcgaaatgagacgacgcaaattgtccaaatgatggtcatcgggaaagtccaaatggtgaatgttgggcgcaacaatggccaaatttcacgcgcaaaaacatcccaaatttgctggactttcatggcattatcggagcaactaacaatgaaccccaaatcggtgcttttgtcaaaaatttgctggttggcacggagaaatgtgatgacggaatgatcgatgtagctgaaaaggaatctctttatcgtggatgagttaagttaagaagttaatgtaaatgtgagaaattgtggaaatctgaaaaggggaaggaggggggaataggaaaagcattttttgaaaattaggaaagggttggggtaaaagccagacattaaatgtgaatttttacgagtttgggttcaagttcgggctcgggagtccgggattggccaaatggtgccattttcatgacccgaccgactcaaaaatccttgggaaatgaaatatttcgaaaatttggatgtcgccactctgaccaccgctcttcctaaccaccagaattccgatggcacatcattaacaaacactactccgtcttgagacgaattctaaggcacatgggtgggaaatcgtcggcataattaagcccagggtggcaattttccgcggaattcttcagggcgtgtgcattttttagcaaaaaaaaatccgcccgtcctcctctataatatgtcctgtgtgtgacacacacacattcacgtccatgtccagttggttggcggcgggcggcatcttcttcccctgcccgccccggcgtttgaatcactgatgaaaaatcgattttgggattatggcgtttgaatatgcaatggcattgtgtaattaggcagactgtgtctctaattaatgtttttttttgtgccatttgaaaaataagaattctgggctccgtgtaccgaaatattttagggatgattgtttttc

SEQ ID NO: 507 - DNA, 1067 bp, Heterodera glycines
atcgaggcgatactgacgtcaaatttggccaaagaattttttgtcgcggaggaaagcgccgaaaagaacccgaccgtggaatgttcaaagacggatgctggcacaggcttaactcgccaccaccaatcggatgccgaatggattcaaaaggcaggggacgccttttctcggagggtcgggatgtgttaatgtttgattattggcattttatttagtaattatgttgtcccttcttaattttgtctcattgcctgtcattgtagtctctcgcctaatctatattttgccactcccttcccagcagaaaatgttcccccccccccccccgtcttcccttcaattcattctgttggcagtgcactttcatatttgtattttgttcttattttcctccgactcttctcccattttattgttgcggttttaaataaagtgatttgtctccgtcttggaaatatttgtggaggagaagcagtgtattagcccgacccgaaaagcattatttagcacgtggcgctcctggcgaagagttagctgtgccggcatagtggattttggactgctgaaaaactgatttggagaagcgaccagaacaaaacgcattgctgcggttctgcattcgtcttttgcttctgacagaacaaacgcattgctgcggttctgctttttaacgcattgctgcgaatttcaccgatttcgtcccactgctaacgcattgctgcgagaagtgaggattggtatttaacgcattgttgcgaacgctttgaatttggaatcgccgacttttgtgcgcgtcttcaagaattatgcaaattgttcgaccgccgttgcttagagggatgaccgaacgcaatttcgagcagattcgcagtcggacaaattcatcgattgtccatgaaggaaatgtccaattcgccaacgaaaacaacggaattgaaatggatgaaaatgaaattagacgccttctgcttcaagtcaagatgcgacaagacggaaatgcagaattggcgagacacggcgaacaggacattggccatagagaaaacggaaggccaatctttaatgag

SEQ ID NO: 508 - DNA, 1092 bp, Heterodera glycines
  unsure (1)..(1092): unsure at all n locations
cctgtgctacgcactgtatgaaatacntaatgcgcaatttgatacaaaaaagagatagctattttggggcacgttacgatttttctgtcggtgtccaacaccctactaatgcttcgtttggccggataagaaaaggcaacctgtgctacgcactgtatgaaatacctaatgcgcaatttggatacaaaaaagagatagctatttttgggcacgttacgatttttctgtcggtgtccaacaccctactaatgcttcgtttggccggataagaaaaggcaacctgtgctacgcactgtatgaaatacctaatgcgcaatttggatacaaaaaagagatagctatttttgggcacgttacgatttttctgtcggtgtccaacaccctactaatgcttcgtttggccggataagaaaaggcaacctgtgctacgcactgtatgaaatacctaatgcgcaatttggatacaaaaaagagatagctatttttgggcacgttacgatttttctgtcggtgtccaacaccctactaatgcttcgtttggccggataagaaaaggcaacctgtgctacgcactgtatgaaatacctaatgcgcaatttggatacaaaaaagagatagctatttttgggcacgttacgatttttctgtcggtgtccaacaccctactaatgcttcgtttggccggataagaaaaggcaacctgtgctacgcactgtatgaaatacctaatgcgcaatttggatacaaaaaagagatagctatttttgggcacgttacgatttttctgtcggtgtccaacaccctactaatgcttcgtttggccggataagaaaaggcaacctgtgctacgcactgtatgaaatacctaatgcgcaatttggatacaaaaaagagatagctatttttgggcacgttacgatttttctgtcggtgtccaacaccctactaatgcttcgtttggccggataaaaaaggcaacctgtgctacgcactgtatgaaatacctaatgcgncatttggatacnanaaagagatagccatttttgggcacgttacgatttttctgtctgtgtccacaccctactaatgctt

SEQ ID NO: 509 - DNA, 1379 bp, Heterodera glycines
cgttggccgggataagaaaaggcaccctgtgctacgcactgtatgaaatacctaatgcgcaattggatacaaaaaagagatagctattttgggcacgttacgatttttctgtcggtgtccaacaccctactaatgcttcgtttggccggataagaaaaggcaacctgtgctacgcactgtatgaaatacctaatgcgcaatttggatacaaaaaagagatagctatttttgggcacgttacgatttttctgtcggtgtccaacaccctactaatgcttcgtttggccggataagaaaaggcaacctgtgctacgcactgtatgaaatacctaatgcgcaatttggatacaaaaaagagatagctatttttgggcacgttacgatttttctgtcggtgtccaacaccctactaatgcttcgtttggccggataagaaaaggcaacctgtgctacgcactgtatgaaatacctaatgcgcaatttggatacaaaaaagagatagctatttttgggcacgttacgatttttctgtcggtgtccaacaccctactaatgcttcgtttggccggataagaaaaggcaacctgtgctacgcactgtatgaaatacctaatgcgcaatttggatacaaaaaagagatagctatttttgggcacgttacgatttttctgtcggtgtccaacaccctactaatgcttcgtttggccggataagaaaaggcaacctgtgctacgcactgtatgaaatacctaatgcgcaatttggatacaaaaaagagatagctatttttgggcacgttacgatttttctgtcggtgtccaacaccctactaatgcttcgtttggccggataagaaaaggcaacctgtgctacgcactgtatgaaatacctaatgcgcaatttggatacaaaaaagagatagctatttttgggcacgttacgatttttctgtcggtgtccaacaccctactaatgcttcgtttggccggataagaaaaggcaacctgtgctacgcactgtatgaaatacctaatgcgcaatttggatacaaaaaagagatagctatttttgggcacgttacgatttttctgtcggtgtccaacaccctactaatgcttcgtttggccggataagaaaaggcaacctgtgctacgcactgtatgaaatacctaatgcgcaatttggatacaaaaaagagatagctatttttgggcacgttacgatttttctgtcggtgtccaacaccctactaatgcttcgtttggccggataagaaaaggcaacctgtgctacgcactgtatgaaatacctaatgcgcaatttggatacaaaaaagagatagctatttttgggcacgttacgatttttctgtcggtgtc

SEQ ID NO: 510 - DNA, 1339 bp, Heterodera glycines
  unsure (1)..(1339): unsure at all n locations
gaaaaggcaccctgtgctacgcactgtatgaaatacntaatgcgcaatttggatacaaaaaagagatagccatttttgggcacgttacgatttttctgtcggtgtccaacaccctactaatgcttcgtttggccggataagaaaaggcaacctgtgctacgcactgtatgaaatacctaatgcgcaatttggatacaaaaaagagatagccatttttgggcacgttacgatttttctgtcggtgtccaacaccctactaatgcttcgtttggccggataagaaaaggcaacctgtgctacgcactgtatgaaatacctaatgcgcaatttggatacaaaaaagagatagccatttttgggcacgttacgatttttctgtctgtgtccaacaccctactaatgcttcgtttggccggataagaaaaggcaacctgtgctacgcactgtatgaaatacctaatgcgcaatttggatacaaaaaagagatagccatttttgggcacgttacgatttttctgtctgtgtccaacaccctactaatgcttcgtttggccggataagaaaaggcaacctgtgctacgcactgtatgaaatacctaatgcgcaatttggatacaaaaaagagatagccatttttgggcacgttacgatttttctgtctgtgtccaacaccctactaatgcttcgtttggccggataagaaaaggcaacctgtgctacgcactgtatgaaatacctaatgcgcaatttggatacaaaaaagagatagccatttttgggcacgttacgatttttctgtctgtgtccaacaccctactaatgcttcgtttggccggataagaaaaggcaacctgtgctacgcactgtatgaaatacctaatgcgcaatttggatacaaaaaagagatagccatttttgggcacgttacgatttttctgtctgtgtccaacaccctactaatgcttcgtttggccggataagaaaaggcaacctgtgctacgcactgtatgaaatacctaatgcgcaatttggatacaaaaaagagatagccatttttgggcacgttacgatttttctgtcggtgtccaacaccctactaatgcttcgtttggccggataagaaaaggcaacctgtgctacgcactgtatgaaatacctaatgcgcaatttggatacaaaaaagagatagccatttttgggcacgttacgatttttctgtctgtgtccaacaccctactaatgcttcgtttggccggattaaaaaaggcaacctggggtaccccctgggatgaaatacctaatggtgaatttggataccaaaaaaaaaaaacccattttt

SEQ ID NO: 511 - DNA, 1366 bp, Heterodera glycines
ttcttttttacggcaccccctccccccaccgcttttcctccggcgttgtgccgtctttttttcccttcgttcgtttgtgccgtcatgctcatttgcctttgggcatcattaaccgcacggaggcacagcacaatccgctgctgctgctgcgagaataattcccaaaggcagcataacggaaatggacgacggttctgttttgactggccaattcagtccgatcgccatccttctttttagtttatttctccttaaaattaaattttgaatattcgagaatttcgaattaaacttattttttggctattaaaaaagaaaaacattgcaacataaaaaagtgcctttgaaattgaaatttatttattttttgccattaattttggttgattggcaaagttttgagactgaattggctgtgcccgaatcggtcgaccatttggcgccgagaaacccaacgaaagcgacgacggcgcattggaagcgcagccatagacggaacattcattatgccaaatgagcgaaccgtcgcttctcttttggcacacaaagacaccaaaaagctgcccgaggctattagcggacgcaaagcgaaggaatgccctgggcgaagcgaacctttcgattttttgcagcaaaaaaggaaatgtatttaaattaattggattatatggggggggggagagaggagaataaatgcgccgaatataaaataagcatttcaaagtgaaaaaatagtaagacagattagcccaaaatcgcaaattttggtcattttttggacaaaaatatgtaaacaaatcgcattaaaaattacaaattttttccgtccttggaacggagcatggacgatggcaaccctgtttaaaaccctaagaagaaattgaatgtaaaattttttgaaattcatttacatttaattaaattagtacacaaaactttcttcttaaatttaatgaatttatattttttggctgattttgagttaaatcagcaataaaatggcactcaaaaaaaattttcaatctcatttaacatatttgccccgttttcgctgctcctcccccgcttttgcttctgtttgtgccaaattccaatccatccattgcccatggcaaaaagtgccgtcctcgtcgccaattcttctttcttttcccattttctccctctgccttctctctctctctcggggcacggcacttttcgtctcatttgcataaattaatacttttcagcacaacgcggggactcttcccctgcggggtttcggggggggggggtgtgataatatattattaaattatattaatgtataatatttatacatcatttgagtatttcaatggtagaattgaataacccaagcata

SEQ ID NO: 512 - DNA, 4270 bp, Heterodera glycines
  unsure (1)..(4270): unsure at all n locations
tcagcatgccgactgcgaaagtttgtcatatcgcaagatggaaagaaactcgtgccattcttcacatcagcatatccattttccaatcacttctcctgccgatttgtcattgatggactcgaattttcgtccagtgagcaaatgtacatgtgggccaaagcgagcgttntcggagacgaagaagcggcatctgcaattctgcggacgtcaaatccgaaggaatgcaaacgcattggatcgcgaattcggttgttcaacaccactgcttggagacgaataagcatattcgtcatgacctgtgctaactggcataagtataagcaaaatgaagacctgatgcgccatctcttcaattttggtcccgatgctgaatttgttgaatgtgcagcaaatgacgtgtactggggcgcaggagtagcaatttcggatgttgaaaaaattcgcaacacgaaccgttggcctggaaaaaacatccttgggaagattctctcagctttatgaagaaatttttgcgtaagaaatctggtgaaatgaatccaaaaaattacatataataataagaataataatttaatttaattatattaaatcgtattcattcaaataacacagcaataacaaatgattcttttacagatatgtcggcatcaccagcaccaccaaatgttccggacctgagcgagttcccgccgttggaaaagttaacattggaggatgtaaggaaaaagaacaaaattgcctcggcaagcccaagtggaaactcaaatatttctaaggaaacctgtagtagtgcaataagtgtggatttagttgcttcggcaagtcaaataacttggggaggggaaaaagggaacagtgggcaagaaaaaggggaaaagaatcaaaaattaaataaaaatgttgcttcggcaagcccaagagattatgaaaaatttgcgaatcaaggatttgacaaaaacccggatgaaatggctgaagaaatgatggaagaattttcaagttttaatgtgagagaaaatgaagaaaaaattgttgaatacctggtttgccaagtagaagaaaatatagtgattggaggaaaattgaggacaatggcaaacaatggctggccacattttgtagcaatctcaaatgaggtggctgaaaaggcaagagagtttaaaaagaaattgcaaatgggagacatagttggagtgaaaaaatttgagtggaaaaatgattaccgatacttagcaaaaagagaaactgacaaaagtcatttcaacaaaatgtggtatgtgcaaaaaataaacagtcaagcaacagtcattgacctcggtcatataagatatgcaattctgagggaacataccacccccccccccccccgcccggtccaattgggtggcctaagaatggggaggaaaacaattccatttaggtgttgtttggaaaattttacgactttgatgaacactttatttcaaatggctttaataatcaaaataagtttttttaaacagttaaataatgttttatattttttttatttttaataatttgtttcaatttattcaaaatgctaccatttaactcagttatttgccgtatcacttcaattaccccacccatcattagtgttcattaatttttgcagctgtctctcccaaatcgatcctccgtttttttcccgggggccgctgggatttaagcccaatgaatttgtgtgatggaatggacccaattagtacacaattttcattcctccacctttttcccaaaatgggctactaaattaaagggaatcattatcaaagagaaaatgtcaaaagaattaattttaagttttagttaatcaatgtcctatttattatgtgccaatctcgcacggcataaagcccattttccccttatttatgccgattttgagtctgttttttcgcaaatgccaccattcgttgtcccatttttcagtccaaaaatctccccgtaatcatttgttcttctcccattagctttaatcagtcaatgccttccttccggatcaattactccacttccgatcgatggtcgtgttgtgtctgtgctgatttggcccattcggccgttgatttagtggccgatttttgggggaatgcttttattgagtgcctggggctttgtttttctccttttttcctcgcccggccttctcaccatccgccgtcgattgacaagtgttctttcggcttttcccgagtgaagcgagccaaaatttcattcatttttttaacgaaaattttccaaaaaataggcatttggctgcaaaagaatttagaaaaatgcaaaaatagtcaaaatgtgccaattgatcattggccttatccccttgaatgaaacaaaaaacaactgcttcaaattacttatttctaaatgataaaatcactttttttgctttttcattgccattttctctcattttctctgccttttccgttttgccaaaagttcatttcaatagactcaaaatctcacccaatccaatttattttatttacggcaaaatattcccccctccgtttccatccgccgtctgaagagcaattttctgaagacgaaaaaagcctttaagccccgaggcgatgccattatgacgcacattcgaaatggcaaatcaattatccgccgagtgaaagcggcgccgccaaattccgccggaaaaatcgcatcattcaattgcattttataagccaattcagtgtaattacaagtgcccattttaggggattccaatgagaaaatttgcaactaaaaattatattttattgaaattatatttattatataattaataatgcaatccttgcgccatttgattatttatgctttttattttcaaagaattgcaaagcattttttttcttccaatttctccgaaaagttttgtttcaaatacatattcttctttttactttttttgtttgaaaatgtgaacataaatgtcacattaaattcattgacttttttattaataatttttaacaattagataaaatttatgttttatttgctgacagcatttactggcaccgtcagattctgcataaattttcaaaattaggcgaaaatttgtgatgaatttttaactcaacaatttcaaatttcttcggcttggcaccgccgacagacggacctttccgaagaaaaggaatcagaaaattcaattaatttacatttcgaacagcgatcaacgcttttttcttcagtatatattaaatgggtctccgctcttccaaaagtgccgtccttcgatcgtttccccctttacttttgccgttccgtccgcttttcctttcccacgtcactcttctgacactaattaactttgtctgctcccccccccccggcatttgccatttgcttctctcctcacgcttttcgattatttgtctcctctgtctgtcactcatctgccggcatttcccgtcataattaatttgccgtttttccaccggagcaaaaggcattagtgccaaggcggaagtgccaataaaagcggagtttaatttttgacatttcaatctttttgaaactttccccactattttatgctttgattgcttccttctttttccatccctttgcttttcatgctttatttgtcagcttttcttatttcttttccctttttcggcgtttaatcaaccgaaaaattcacatttttcttttatgcaaattaaaattgccataaatttgagaacaatgagcaaaatttgacctcttccattaatcccccctttaattgctgatttctgtttagccaatttcatttattatttaattttccaaattaaatttggccaatgttggccattttcttggccattttcgtcccttttttgtctgttttgtgttccgccgccgccgaccactaaaagtgaagggcggcgaagagatttttgcccccggcactttctgcgctctctgtccgtcctttcgccatctgtgccccattctctcgcacaactaattctcacgccgtctgccgccttagctttgagtgcgcgcgcatttagccgacttttttgcctccggcacatatttaacagtgcctcgccttcggcttcattttcgctaaaatgggctccgtggctgcgtggcttccgtttgccaggtaaccaactgattgtgtgctttgccttctgcacttttagcgggggggggggggggggggggaagagtaatttaaaagcgattacccaattaaaatggataattgaattatgggttaatgggattaattgacttttat

SEQ ID NO: 513 - DNA, 2344 bp, Heterodera glycines
tgcttctgctgctggtctttaaacgccattttcaccaacactcaaaaggcggaacaattggcccaattatttgtttccctccgccgatcactgatcatgtgaattgggtggcaaaactattggggaaatggcttctgatatttgacacggtccgatcatttttctttctttgataaaaagttaccgaatttttcatgccttcgcagaatttttttttattgtttttgtccaaatcgtttttattttggcgggccatcgtcggaatgctttaaaaacgatgaaaaaatgcatgaaaaagccgaacaaaccgcaaaatcgcatcagtcaaattctgccgcttcttcccaatgtttgtccaaattcggcattggatatttggccaaaaaggagggatttccaatccttgcgattatttgcacagccaaagtgttgatatggcgaattactacagcaaacacattttaaaggccaaagaattggtagttgaccatgtgggcgatgttcggctggtcatcaacgtgtccggggttggattcaaccattaattaatttattgatgaattaaattatatacataaatttagcgtcgttttgagacatggaaatacaccttggaaaggtttcccgaaactctgttgggctcaagtgagaaggaatttttctacgacgaaagcgccggcgaatatttcttcgaccgggaccctgaactgtttcggcacattttggccttctacaggaccggcaaacttcactacccaaaggtgggaaattaaattatttggatgatattgtaaagtaattaattaattgtgtagaccgagtgtttggttgcctacgacgacgagttggccttttttggcataatgcccgatctgatcagcgattgtatgttttgccatttgcaattaattggctgaaaatcaaattgttttgcattaaaaggctgttacgaggagtacaaggacaaaaagcgggagaaccaagaacgactgatggaggagcgcattgacgcgcccgacaaacgcaagaaggacttgacactgcaggtggggggggggggggtgggtaattagcgcagagaaagggaaactcgactaattaggataattaattaggcagcagagtcaaatctcagtcatttgggttaattttaggagaaaatatttttcatggaacccgggaggttcaaacccccgttttttcttcttaaacaattttgttttgatcctattttttcaccaggattttctttttaaaatattgggctaattataatgtaattacttttcataattattaatgctaaaattttcagcaaaaactgtggactgcctttgaggtgcgtgaaatattttttattatttaatttttatttatttccaaattttccttctcattgtcagaatccccacacttcctccgtggctttggtgttttattatgtgaccggctttttcatcgccgtttcggtgctttgcaatatcatcgagacaattccatgcaaatatttggccaacaatgtgtccatcacttgcggcgatctctacgaaaaacaggtggacaaattcaacgctattattatttatttatattttcatttttaatgtatttttaattatattttaattgatcttgcagttttttgtgcttgacactgcttgcgtgatcattttcaccgttgagtatatgctgcgtctttttgctgcgcctgatcgttgcaaattcgtccgttccattatgtctctgatcgatgtgatcgccattttgccctattacattggcctggggcttcaggtggccaaaaacccgatcatttcatttatttttgtttttaattttgaatgttttctttttgtaaaggaaaataaggacgtcagcggagcatttgtcactctgagggtgtttcgggtatttcgggtcttcaaattttcaaggtccggcacatttcccctttttcatggcatttccctccccccaggcattcccaagggttgcgcattctcgggtacacgctcaagtcgtgcgcgtctgagctcggctttttggttttctcgttggccatggccatcatcatcttttctacaattatttactataccgaaaaacgggtaaattcgaaattaaaattggcaattaaaaaattgcataaatttgtttgtgcataaattgcccattttcaggtcactgaaactaaattcacgtccattcctgccgccttttggtataccattgtcacattgaccacactgggctacggtgactttgtgccgcatactgtacatgccgaatttgtgcattaaaatttacataaattcattcatatttgaatcatcattacaatttg

SEQ ID NO: 514 - DNA, 8665 bp, Heterodera glycines
  unsure (1)..(8665): unsure at all n locations
atcgcttggcctttggaagcgtcgtttaagcccccaatttttgcagaaagctcggatggcacgcattcggctggtgaagaacgcctcgggccaagcgctaacggccaaaaaacgggcgcacgaggcgcggatgaacgattttgagcagggactgttggacgcggaagagctgaaggatgaggacatcttcgagctgcaacaccaccaccttttgatgtgcctggagaaagcgacggttggtaaaggaacactcacaaaatgggcaattagcgaaattgtgacggcacaattttgttaaatttggggaaaggactcgtactccatgtgccatggaaagattttcctttcatgccatttgcgttttttatgccgttgtaggaacgggacgcgcttcaacagcaggaagaaatggacgtggagagtcagcgcgagctgctcgatgcgtccaacagcagtccgccgcccgcgagtccgctgtccgtccgctttccatcgggcggtgcgttggcacaacactttcagcgcggttggttcgcgcaaatgcgacgccactgtgccgactctcgttggtgcagctgttgcggaacccagcaacagcacagacaccgaagaggcggaagcagcgcaagcggaagcagacgcagtgatcacagagaggaaaagggtacggctgatcagcacgcggagggggaccaacgggactgatcaggcattaacatggccactcacttctatgatcaatccgtactaagaatgaccattggaaactcgaaatgtcattaataaccgctaattgaactgaaaagacagataatattcgagactatagactgtatagaagaaatttctctgatcatacattgccgtttaaactgccggtcaaaaaaggcatttattgggacaacagagagggaaatggaaaactgctcatagcgcattgatgaggataattagttttaaatattttacagtacccgagatgaacatgtaccagcaacaccaccaccaccatgttaatcagctaaaatatacggacatcaacaaacaatccaaccaattgtattcatgtacgaccgccacaacgtcggtgacaacgccgcactgcaacggcgacgacgacgacgacgacaacggtgacgtggaggaaggcattggcattccgatgcgacagtcaaaaggcaatttccgaaatggtaaattgttgaccgatccaacaatcttgatatctttcgaaagctcttcacaggctctattagcctaataaaaattacagagaatgtctaactgaaaaaaagaacagagacaacaacacttttttgtgagctacttcagcatttagaaataacttatttgttggcaatacatatcttctaatcatttaaagctttcgaatgatatcatgtttgttatgtttggtcaacagagaaaaaagttatagctttgtgaaatttgttgagacggtgttgactcctatcgaaatgggagaggcaattaggacattttaaacattaattacaacagtccagcaaccacttagcaataattaaaaccattagcttccttttgcgtaatgatttagccaattcttcgccatctccgcccgtccgaattgtcgtgtcggaagaaaacgacgaatacgagccaacacagcagcagaagggcaatggtcaagatgaagcaggggaaggacaccaacattatcaccaacaacaatggcatggccatgatgaaaatgatggcgatgaactgttgggagacgaagcggcggacaatgagaggcggaagagttcaacggaagaggatgagggagaagaaatggaggacaaaacggaagaggaacggacgaggaggaggaaagggaggagggacagcagcaacgacaatggcaccacagaaatgcccggcacggaaagcgtcggcaaaagcagcagaagtcgaagcagcacatcggcacgggacaaccgctgcagtccgaccgccgcagcggggcggagaagacggaaacggcgcggatgggcgcaaaaaaggggcaaagcgcaagcggaggaggaagaggaggaggagtgtatgtccactctttgaagtgggggggggagggggaaaagcataagaggagaagccaaagccaacaaatgccatcattcgtcaatcgcagcaaatgtcaaacattggcacgggaaagtccttccattttaaatacatagagggcaaatcaaatttcaacaatctcagatgatcaaattggtcatcagaggagagagtctctatgtttttggcatttattttcgaattctcggcttgtgtttaaattggaattctcgacttgcattgcgttttccaatgggactttcctaccatatcaaagcatcattatcagccataatcattgtgtttgtttttttattacttttttatttactacccaatccaaaaatgattaattaattaattgaaatttaattctctgattgggcagttgattcactatttcttaatcattttcttccattttttgttgtattttctcacagattctttcactttgattaaactattaaaaaaatattcaaatttttcaaaatacaaacaataatgacattaattagctgaacgtgtgagactttgaaaatcaccggcgatgggttaatcactaattattttattttattttaatccaagaattattccgatcacaggcattgaggtcttgaacaacatctgaaagtcatcagatatttaaaaacataaaatcaattatttataaaaattaaatttaaaaatttttaaaaaacttacattttgtgcctgaaactttcgctgtacacacaatagggaaaatcgacgaatggacaactgttaatggccgtgcattgcaatggcaaattggagtaaccggggtacatttttggttggcctattgaaaagcaaattaattaattaatgactaattaggcctaaattcgaaaaattaaagtgttattggtgatccaaatggttttctcaaaaataaattcaaataattttaaatctatcgaaaagcataaataatttaacccaaattaaaattaccgaaaatcggattttctgggcccacgccgcagcaaatgtattggcccgttttgtacacgttgttccattcgcaatggtaacccggcgaacacttttggtaaatgcaatccttcgggattccgctgaacaattcgacctccgccgacggattgcgacatttcgctgacgaagagacaaattttacattgttaaaaatgttttataaattgaatatgcatttattattttcaattaaaagtgccgacggaatgcccgctgctcctccgtcggctcccaacttcggccgatttggctgcacacgccgttccggcagatcagtgccgcttcgcccggccgtccgcggcactgcaaatcgctgacgcaccgttcgccaacgcccaacagcggaaagcattggccattgacacgcacttggttcgaggaacaagcagctgaaaatgggaaaattaatgaaataaaatgaatggactacgattggaataccatatttttccaaaaattaaatttttttttaatttgttaaaaatgattttatttgccaaaaaatctatttcctttgcgggaagggcaactaaactgtggaattaattaaataaagaacatgcaaaaataataattttaaaacaaaactcaaaaaatctttagaataattataaggccaaatgactgaaaaaatatataaataaatctttaattaattagttacataagcgctgcgataattttgataaattgagctgcattgacttatatttattttaattgtgcggtctctcttttatttttattttccttaattacttttggacaattaatttatttggatgtccaaaaagtaacgcatctctcttttgtggatcttttctttattgacaacaaataaataaatagttattaaataatttaattgctttcccctaacaaataagtggattttgcccttcgcttttcttaccgtttgacggaatgtttgggtcgtccgcgcacttttggccattgtaaatttggcccggtgggcacacacagcgccgctggtagcagaagccgcccaggtaattgcattgttccgctttaaaaggccaaatattaaaagggaatgatgatgagaagggcaaaacggtggtgtacagtaatcgcaggtggcaccgtaactgacgtaactgtagcaacgaccgttgatcagcatttggccggacaggcacaaatttgacgattgcggggcatcatctgagaataatccggcgggaatttggttattaattaaattattttttaattaaattaaatttttacactccgtcccccgcgggatgcattcgtagccgtcaaagctgtacccgaacctgcagtagcatatgttgttggcacattcgctgtttgtgaatttgcaatgttctgccaatgtgcacgcggcaccgtaactcgagagggacgctgtttaaattaaaaacaattaggatgatttattgttaatatttcaaatggcaatcggccggcatattggacaccaaatggcttaatatgtccgcggcttgttgatctcaaaaacccaatgagtggaagaaaagttgataaatttgcgcaaattaattggcaatttcaaaattttccggctattcgcgtcgaaataaattatatttgccataatattcgcaatttacgctttgccattgcgcaacagtgccctctgtagcagaaaaagccggtggccaaagcttggcactgcgcgtcctccgcgcagctgaccccgtcgtgcaatggctgcatgtccctggcgcactgcttggcgcccgccttcggctccaattgcacctccgccggcagcacagtgttggccaacagagcgggcagaacgaaaaagcattggggaaagcctaaaggggacggaggcacttgcaaaggttgaagtgggactgaattggaccatntaaaaagtaattaattaacggaatgagttgaaatttggaataatcgggaaaaaaatttaattaatttttattttataaaatgcattatttatttcgtttggaagagttggcatcattcattacctgggtagcagagggcccccggcgatgaagctaagtatgaggggtacgcttgaggagggggagggggcggcacaaaagggccggacattttcaaattgagaaacaatggagaggaattaattaacaaaaagtaataattattattttatttattattttatgcttttgttttttctccccaatgtctgtcccttctctctcagtgacttttccgccgatcgaataagctaatatcattcgttttcgttcgctatttgctttacctcttcatgatcaaaaacaacaaaaaagaaaactcactccaatcaaagaaagtagaattatattatgtggtaattcgatattgagcacaaaaggggaaaattcgtttaataaaaaatgaaaaaataattttgacattccaaaaaatcatattttattaaaagcatttgcagacgaaagcgccaaagatcaaaatttaacaatgcttattgtttactttacaaatcttttctaagtatttttctccttgaaaatcaaataattttttaaataaactttttttttgatttttcattttgctaatcattggcaatgactcactcttttcttccttcattcattccttacttcgttcattggccacaaattgggcttaatccgatcagttcgcttaccctttcgcctccctttggcccctttcattggcggcgtattgcgcgagctttggagacggatcaacaaaagcagcaaacaaagcgaggagagaagggaagaaagcaaagagaaaagaaacaataaataaatgggaaaataaaaaggcaattaaacgataattgattagttatttaattaattatgcattcgactgattacatatcatgatattaaattctattttttaaaattattattgcataaaaacaaattttttaaacaacattgcaatcgattaaatgcttcgaattaatttcctgaatttacaaatactaaaaatttcatggaaatgtcgccagtaaccttcgattttttgtccgatgttcttttctgattccaaactttgttaagcctaatggataaataaaacttttttttcgcatttttaatgttctcaactttaattgtcaatttgttttaattgtgataattatttaatactttaaagagaaaagttttggttcgtttttattttcaaatttaagttcggatgatcaacgacccgaaaaaacaagttttctgtctattcatcatctttcaaaaaatttttgctaggcaaaagggttccgcccttatggtttttaataaaatttaaattgggccatttggccgcactttttccatccagcaaaatccatacaataaaagcatttttcatttatgtccccccccccccccgtattagacaacccaacaatcaatcactaggccaaaaaagggcaaaaagtgacaattttttggcaaaatgccttataaatttttgtggccatataaaacacgtggtaatcagaggaaatacaaatgcttttgtgaattctatgaatttatttataataatcattcattttatattataaataatatttcagaagtaaaaaagaatcttttagcgtataatttcattttttcctactaatgcttcttttttcttctgctctgctacggttttttgtaattttggcccatttctgcgcgattcattcgggtttttaactaattgaatttaattttaaaaatatatttttataaagctaaattgcaaaccaatgaaaattaaaaaagcccgaccccattttgaccttttccgaatcccgaatttaaatttgaacaaaatcgaaaccccaaatttatttttttaccatttttttggaattggtcaattggatttatctgcgatgacgaaaaccgttaaaaggattttcacgtctttttgttaaaaaataattttacaaagcaaagggtccttttggtttttaataattttcaaaattaatgaattatgaaaaagcgtcgttttccattaaattcaataattaattaaaaatgaaaaaattattcttcagcacccgttaaacaaagtgtggaattggtattcacacaaatctcagaaatagtgataaaaatggaccaatttttggcaacaaaatgcaaattcgagaaagaaaaaataatgtcgaaaatgaatgagaaaattagagaggaaaaatatggccaaataattggccaattgaaacaattgcgactctctgaacttcaatttggacggcagaaggaaaatgtaggcgaattgagccaacaaacagaagagtttatcaaaatcattttggcacattgggtcggaagcctcgaggcaattaaggttttgaaattttatggaaattaaaaaaaaaccaaatttaaattaaaaaagaaagttgaaaaaattgttgtgaatttcatctacaaataatttcttaagtggaaattttattttttttttgtaatttttggcagagagataaacaaagacaaataataaaaaaagaaaagaaaaaattgtacattgtaattttagaaatgtttaggtttttttgtaattaaaataataataaaatttattagcgtgaaattcgaccgtcggagttaaacaaagaactggccaaattgaacgaaccaaaagacaatttaatagtcatggagaaactgttcgatttggcatggtttttgtgcgcaaaattgaaacatgacgaaaagcggtacgaattggcaagatcgaagacaatttggcgaatgatcgattggaactattacgaagaattggagtggaaactgtgcaagactcgggaacttattcggaaaatattagtcaaggaatttcaagtgccaaagtcaattcattcagccattaacagactaattgactaaaataataataataattagagtgctcattttgcagcatatgctgtttttctttgttgctaacttggggcgtgataataagcatgaaaaacgcattcctaacttggtttgaggcttctaagtccacttttttcatgctgatttttgcagatttctcgattttttgatttttgtgctgatttggcgtttttatgcttttttatgctgtttcgtcattttgagcaattttttaaaatattttcagcaattttcaaaaaatttattaacaaaaatgcaataaaaacgaaaaatacacccttatgaatcgatccaaaaaatttgagaaaaatacacccctaagaaatgaaaatttatacaaaaataattcatctccaaaatttatttaatttatttttttgacaagattttgattttttaaagtatctcattaccatttttagcacctatttttgaggttttttataatcagggagcaaataaacgtttttttgacgacttttttcaatttttggtgcctttaatctcttaatttttatgtttttttccaattttttgtgctgcttttgccttttttgtgctttttcatgcttattttggaaaaatttggtgctgtttacagtgcttaatcggtgattttttgtgctggaaactgagcactctattaataa

SEQ ID NO: 515 - DNA, 649 bp, Heterodera glycines
cccccctcttaaaaaaaattcaaaatagaagctttttccacataaaatgggtataattggatcgaaagtgagcccaaatgccccccccccgtctcattatgcacttgtccatgccccgcgggtcggccattttggcggggacggacggacgccccgcagtcggtcgtctcaaaattgctcactttcgccgccccccccccccaactatgcttcatcttcggctgctttttctgccctttccgtccaattcgtccagctgtgatgggatgggaaagggagggacacggcgacaattaccggaaaaatacttgcgcaaaaggaaaagtgaaaaaacgaaaagcgtaaccgaacgaagggcaaagtcagccgaacagaagaagaagcagtacggaagcccacctgattgcttcttaaataggctgtcctgctgcaaaagctgctcatttttcacattttcaaaaacccttaaaaaatttttcgctaaaatgcgacgaaacaacgctttgctgtttctgctgtacggagtgggcctttccgcactgcttgtcgagctggtcgatgcgtatttgtacggcggaaacattgggtagggaatggattttaaagaaatatttttaaatatttatttatttattaaaattaatttaaa

SEQ ID NO: 516 - DNA, 767 bp, Heterodera glycines
caaatttttaaaaaatgggagtgcgttacgttcccccaccaggagcagagctcgtttccccctcacccagaaaaaacaaatacaacagtttttataagaaaatttgaaacaatttcgaaaaattttccaaaaaacaaaaattttcttacccttgccgttatctctccacgccataaaattaaaaaaaaacaaaaaaaaaatttttagttttcaaactctcttagactttcctggtaaagctagaatttttcaaaaaaaaaatctggaaatttttttttttttttacaaatttctattagtatttattgcgattttctgaattctctctcgtttctcaaaattttttaaaaattatttattttaccaaattttcattctcctcctccatcctccgctttttgcactttgtctgttgttcatcctcggcctccttctgctgctgctgctgctgctgctgctcacttttggcttcgttttctgttgccataaaattggagcaagaaaaatttaatgaaataaataaaaaatcgcttaaaaaacgcataaaacaattaaaccacaacaaagcattggtacttccttgttttgctaccccctccccctcgaaaatttaaaaaaatcatagatattttattaaatcagtgactagatgtcatagatatcaaaacaaacactattttcatagtcagagtgaccttgaaaactccaagatatgaattttttaatttttcgagggggggggggggtagcaaaacacggaagtacca

SEQ ID NO: 517 - DNA, 2337 bp, Heterodera glycines
ctaccattgaaaaatggacgcaccccaaatttcgccacctattctaaaaagatatattggacttaaaatagcaatttttcaagaaaaaaaaaatcttggaaaaaagttttaaacgaattttctagaaaaaatctaaaaaatttccttacaataagattttttcttgaaaattttcaagaattaaaaaaatgttggcggtaaaattcggccggcgaaattccggcggcgcaattttgttttattttttaacataatttacaattgaaattttgatggctgaaaaagctcagatttcaagtgatactaaattcgttcattttgggcaacttgaaatgagttatagccaaaaacacggattagatcattttcagtagagaaacgacttggggaaagtgaagtgcattcaacgcccagttgtcctttccgttaaagttatataatgtgacctttcatcacaacttcaaaaatgatgcccgtgtagtaatccaagccgcgtgccagcgacggctggaagacaatgcgcgacggatcactgccaaaaagttgcgcatatcgaatgagcagtttcatttcggcaacggcttggtcaataatttgcaagtgcttctcagaaaagggtggaaaattatcttcgtcggtccatctcttttcggagaaccattcgagcaaagtccgattgtcccagtccgggtgtctgtctgaaaaacgaattcaacgagtgttttagtcagggctcccaagtttttttttcaaaataagacaaaatgggtgaaaaactaagattcggaccccaaaaataagattttttctgaaactaatagtagcgcaaagaaaacacaataaaacgtgaaaaatgacttgaagcaatattttattagcctaaaatgcagggctgccaactgtaaattttcaaaatcagcatttggctgacaaaaaatcttcatttgggatcaaaagtcagcattttgaaaaatttaattcaaaatgaaaaaatctatattattttttttgcggcgcgctttttccaaaaaacttttggtgaatggggtggggtccggcggggccaataggcgccgtgggaaaaattttagaaaatttcaatgcaattttgtggcgctacttaaaaagagtactcttttgaaaattttttcacttttttttggtctaatttttttttttgtttgttttgatacagaatgatgaacacattaagcattgagcataatttggcgaataaaagtatattcacgattttttatttcaaaaaattttgaaaacaaaagggttccccctttggttttttgataaaattcaaaatctttaacttttttttgttgttttttttgtcattcgtaccatctgttaaaaaaacaaattctgtatcaaaacaaacaaaaaaaaaatgttgaccaaaaaaaaagtgaaaaaattttcaaaagaatactctttttaagtagcgcccaatttgttaacagagttccgccagaaaatgaccaatttttgagattttgagccaatttttaagaaaacaaataagttttggggacccgcggagccgaaaagcgccgccggaggaaaaatagaaattttgactgttttttacagattttctctgaaattttgggtattttacactcaataaaacgaaataaatttgaattttttcaaaatcgaattagtaattcaaatattcgcttcaataaaaaacgataattcaaaacattcattaaaattttgcatttttttattttcaaatcccaaaataagcacgtaatgctgaaataagcacattttaggtttctaagatccggcccctcaaaataagcacaaatcttagaaataagcacacttgggagccctgggtaaatgccttttggtattctttattttgatcaaccataactcgcttcattccccactaaactgaacaaatttggtatctaaaaaaagtttttgaaaagctgaatattttctaagcaagtgctaagcatttgtcatgtcagaaaaaagttgtgagagttttaaattttcattacgttataactcaagccctaggccgccgtttttaaccaaaatgcgtaaattgattctttttatattgattctaaaaaattaaagtgattttataccattttatcgaaaattgttagcatttgcgaatttcacgtttttcattgggtagagatatgaaaatagtatgccaaacggagaggaaaagaaataagtttttatgttattgtaaggattattcgacgcatttccctcatttaattatttcccattggccattatcaattcaatcacatttatccattttcacacgtttttccttttctc

SEQ ID NO: 518 - DNA, 3316 bp, Heterodera glycines
ttttgaatttttttccttttttttggtctaatttttttttttttgtttgttttgatacagaatgatgaacacattaagcattgagcataatttggcgaataaagtatattcacgattttttattttaaaaaattttgcaaaacaaaagggtccctcccccctttggttttttgataaaattcaaaatctttcacttttttttgttgttttttttgtcattcgtaccgtaccatctgttaaaaaaacaaattctgtatcgaaacaaacaaaaaaaaaaaaaaatgttgaccaaaaaaaaaagtgaaaaaattttcaaaagaatactctttttaagtagcgccacaaattgttaaaagagttccgccagaaaatgaccaatttttgagattttgagccaatttttaagaaaacaaataagttttggggacccgcggagcctaaaagcgccgccggaggaaaaatagaaattttgactgttttttacagattttctctgaaattttgggtattttacactcaataaaacaaaataaatttgaattttttcaaaatcgaattagtaattcaaatattcgcttcaataaaaaacgataattcaaaacattcattaaaattttgcattttttattttcaaatcccaaaataagcacgtaatgctgaaataagcacacttgggagccctgatttaaacttaaaaatacgaccccacatttttgctgattttatttggcaccattgtttcagtgatcgcggaaatgtggaaatcgggtccggggctccgaatcgattgaaagtgatatcatattcgtgatcacttatcagtgtgcctacgattaaaaagtgatgcataattaaagaaatataaaatattttttttgttgcctgagggcccttaacttttttgcttcccattgtaattttgaatatttgatttgaattttgatagattcccccccccccctcgccgctccaaatggaacaaagtgaagacgttgatgccgagccgaatgatgagttgacaacggcgcggcggataagaagaatgagttgaggggatgggaaatggtggcataaaaaagggaggggggggggcagagaaaaaatgactgaccgactaattgccgttggcattcacccatcgctgagctaaggaaggcatttgatcaaattaatatttttaaatgtggcttgtttatatgccggaatgtgacggtttaaagaaaatcactaaaatttatccgaaagcggttaccattcatacaaatttcgaattttatgcttcctgtattaaggttaccctcataggcaagatgccaatgaggatatcatccatacaaattttctaattttatttttgttcgagttcgggtcaggagtttgaaattgacaaaaatgggtgctgtattcgtgatcagcgaccctaaaaatcccttaaaacttattttctaaaacacatttataggaatctgaaaatgtatgttaaaagtatcatgtaaactagacaagtaccccgaaagctatacataacacaaataaaagttgatcaccgcaacaaaacaacaatgttatacacatcaaataggatcaaattcattctccaacttcacaattcaaattgatcgatcacttctcagcaaatctctcaaatgtcgattctgttccattggccattgaattgccagtcaatcgcttccttttcccatttcgcccatttgtccatgtcgcgcacaattggacaacggatcagaagaaaacggccgacatcgttcatccatttcaacgtcagttgttcctgagtcacttcgttggtcagatcaaaggccaaattggggtcaacagaagccggcggtcgccaaatgacaacaatgaaactgacgggagatgaagcattggcaaatgcctaaaatatgggacaattgattaagaaatcataaaatgacgcaatttgcattcgtcaaaaacgagttgaatgccgtccaaactattttttgtcagcgaacccaatgaacgtaaaatgccaattaaaatcaaatcgaatcaccgctttgaaggctccaatgcgcgacgacaaattcccataccaccacggatgcaaccagcatttgaacacctttggcacattgtcaggacgaggagtgaacagccatttggccaacgcttgtccatccgatgccatggcactgtcatcgcaaggaaatttggcgaagaaaccatcagcataattggaattgacaacacgaagcgatggacaatcgttgagaagtgacgggacaaagcgtcgcaaacggctgagagcatatcggggcaattgtatggcacaaatgtttttcgcaatcattggccaaaatttgcgcaaaatgaactccaaagtgcggtcatcgtccgtgtagataaacaaattaattggagaagaggcgaaaagttggcgaaaacgctgcagaaaagtgatggcattttggtcgatgtaactgtgaaaataaaggaattgttttacaaacagaaaacaaaaaattaatcattcatttcactttattgaaatggcttcgaatcccacgactttctttggcagcgctttttgtggagttggcaattcttttccatcgcaattgacaatttcccatccatttgtgccatccgcttcaaatttggctttaatttccatggctttgagcgcccaacgccgcgtcttgaagtgttcgtcgacgtaaaagtcaaaacggtggctgacaagtgcaattccaaggcccagttgagaaggctcaagcaaatcgaacactaaaagccaacagtctgaggagatgaaactgtaaaattaaattcaaatttttagatttaatttttctattttacattttctttttgtgaatgtgtagttttttcatttgtgccctataaatattagaaatggtgcaaaagacgacaaacattgacacaccatacaaactaagaactcagaagggcacagggacccttccaattaaaacacgctgaacccaccaaaagttttttaatagtattgccatggaggaacaatcaaaccaataaacagttccatgaaaagaaaatgaaaaaaagggaaaagttttaagatttaccgcaattttgaaaattatttaaaaaaattctaaattttaccgtcatggcacattgcgccaagaacaaaatgtgttggagtgcgtatagatttatgggagagagcaatgacaatgtacgaattgctattaaacagtgtgtcaaatttagagggtcttaaatttttgaaaattttttgaaattccgtctccaagcatttttgtatgtaccggtatgccacttt

SEQ ID NO: 519 - DNA, 12456 bp, Heterodera glycines
  unsure (1)..(12456): unsure at all n locations
tctcctctttttcttcgattgcatttttcaaatgaatttttctaagaaaataaagcccatttaggaaactaaaaaagtgccgaaaactgtcttaataatttgctgcaacaaaatgtcagacaacagaaaagaagccgaagaaaaaatggaaaaagcaatgtaaaattaaaatgtcaatttcaattttaaattttgttttcctttcagttttatctctggcgacggttggctttgtgtgttcgatttgcttgagccttctcaattgggccttggaattgcacttgtcagccaccgttttgacttttacgtcgacgaacacttcaagacgcggcgttgggcgctgaaaccaatggaaatttggagcaaaaatggaacgaatggcgcaaaggaaatggaaattgtcaattacgatggaaaagaattgccaattccgcaaaaagcgctgccaaagaaagtcgtcggattcaagagcattttaataaagtgaaatgaacgattttttgtttgtaaaatgattccttaactttcacagatacgtcgaccaaaatgccatcgcttttctccaacattttcgccaacttttcgccttttctcagattaatttggccataaatacgtccgatgaccgcactttggtgtcgtttttgcgcaacatttttccaatgatcgcgagaaacatttgtgccatacaattgcccggatgtttcgtgccgtcaattctcaacggttgtacatcgcttcgtgttgtcaatgcctattctgatggtttcttcgccgaatttccggccgatgacagtgccatggcatcggatggacaagcgttggccaaatggctgttcattccccgtccggacaatgtgccaaaggtgttcaaatgctggttgcagccgtggtggtatgggaatttgtcgtcgcgcattggagccttcaaagcggtgatgtcgatttgattttaattggcattttacgttcattgggttcgctgacaaaaaaatagtttggacggcattcaactcgtttttgacgaatgcaaattgcgtcattttatgatttcttaatcaattgtcccatattttaggcatttgccaatgcttcatctcccgtcagtttcattgttgtcatttggcgaccgccggcttctgttgaccccaatttggcctttgatctgaccaacgaagtgactcaggaacaactgacgttgaaatggatgaacgatgtcggccgttttcttctgatccgttgtccaattgtgcgcgacatggacaaatgggcgaaatgggaaaaggaagcgattgactggcaattcaatggccaatggaacagaatcgacatttgagagatttgctgagaagtgatcgatcaatttgaattgtgaagttggagaatgaatttgatcctatttgatgtgtataacattgttgttttgttgcggtgatcaacttttatttgtgttatgtgtatgcatttaggataaatttagggattttctgaaactgtaattggctttaagaaatgctttagaaggttttttttttttgaaaaattttgccgcaaaacaattgttaaaaatctgattgtttctaacccaaaaatgcactgaaattcactaaatattatttgtttatttcttctccaaaattgttaaagatgataatcggaggcgaaaattaattaatataggtaaccaatttttaaaaatggaaatttcaaaataattattttttaaaattcaaataaatagctttaaaaatgtttaaaattttcgttttattcaacgcttttttgctgatcaatttggcaatcactcatgaaggaagaaaaatcggtgaaccggttgaaaaggatgtgaataacaaggagattaaggtaaaaaaaaagtaattaaaagcaattctcgacaatctaagttttcgaaccgagaaaataaaaaattgactcaaaaattgcaaaatttggaattttgtaacaagattattttaagagggcgtataattttaagagtgggatataattttttgggaaaatcgggatcaccaaagtcggataagccgagctcagcagtagaccctggactgacagtttaaatcggatttgtatcgggattacttttttttctcaaaagtcggattggaattattgggaggaataaatgtgaaattaaaaaaaaaaagaataaaatttaaaacttccaatgaaaagcaaagtgaaaagtgaaaccaagcacgtatacaattttaatttaaaaagtgatgtttttaaagcagccaaaggcaaagcgcgcaaactgtgtaacggaaactgttccggcagagcgaaaggcatcgatttcttatttaattatctgctaattagcctaattatctattctttaggtctttgaagtgagtgtgttccaacaaagttggaaaaatgttgaggacattacattcgtacccgaagaacacatgggcaattcgacaaaaaattgtgaataaaatgataagcaataatcgtgggtgaatacaaatttttaatttggtgcaatttttaattaataaatttgtgtaattggcttaaatcagcaaagataatttttatttgaaataactgttgttcttcgtctattgttttcttgatttgctctaatttgcaaacaacaaaaaaatgcctattcacataaaaactcattttaattttttcactttttaaaatatattttaaaaatttataaattatttggtaaaattgaagaatatgtgtacctcaccgaattcgaagaatgatatatcattcgacgcctctcggtctgtaaggcaaggatcttaaagaattttttgtcggaaaccactttgggccgagttatgggcccgggactgaagtgccgtcccttacggtcattttttgacagggctcccaggtctgaggctttagcctcattttgtggttttttgataggtcaatgaggctaaattttcaaaatgaggctttgaggctttttgtggttttttgagaaattttgaggatttttgaggcttttggggaaaatcctcagaatcttttaaattttgataaattggcataatgtttggcaatttaaagaatttttttaatgaaaatacgcaaaaaatatggtcaaaattcttaatttttccaacggcggcgcctatcggcaccgccggaccgtaaaaatccttaatttaaaagcaaaaatttgctcaaaaaaagcgccgcaaaaaaatcaacttcgtttttcatgttcagaatcccaaaaaatgcttatttctaacaaaaaaaaaatgctcaaattgatcatgggcgatcaaaaatataacatttgaacattttaaacgtgttttgaataaattttgtaaaaatgaggcttttttacccaaaatgaggcttttttgcctaccaaatgaggcttttgaaacttttgatctgggagccctgttttttgaggacctttggacggtttagtcccacagccatttggccacttcagtcccgggcccataactcggcccaaagtggtttcctccaaaaaattctttaagatccgtgccttacagaccgagaggcgtcgaatgatatatcattcgtcgaattctgtgaggtacacatattcttcaatttttccaattatttttaaaactgtcagaaattaatttattttaactaatattttcaaaaaatcaaattgaaatcaccgctttcaagtgttcaatgcacgacgccaaattctcataccagccacttttcattattttccattcgccattggatttttgtccctgacaatgccttcaaaaatgcttctgtacgttttgtccattttatttcttgtcgacatttacccttttccttctcattttttagtctgtacggtgtgccaatgtttgtcggctgttgcgccattctttggatttaaaaaaaaatcatataaaagtggttgctcctccaccacttttcattattttccattcgtcatttgttttcgactctttcttcgcgttttttccatgacaaaaccctttaaaaatgatttttttacgtttaataaaataaacttttcttgtgaatttttacataattttctcctctttttctttgattgcattttttcatatgaatttctaagaaaataaagcccatttacgaaactgaaaaagtgccgaaaactgtcttaataatttgctgcaacaaaatgtcagacaacagaaaagaagccgaagaaaaaatggcgaaagcaatgtaaaattagaatgccaattttcaatttcaattttaaattttgttttcctttttttcagctttatctccgccgactgttggctttcagtgttcgatttgcttccgccacttcaactgggccttggaattgcacttgtcagccaccgttttgacttttacatcgacgaacacttcaagacgcggcgctgggcactgaaaccaatggaaattaaagccaaatttgaagcggacggcacaaatggatgggaaattgtcaatttcaatcgaaagccgttgccaattccacaaaaagcgttgccaaagaaagtcgtcggattcaagcgcatttcaataaagtgaaatgaatgattgattttttcttttgttgtaaaacgattccttcaattttatagacacatcgaccaaaatgccatcacttttctccgccgttttcgccaacttttcgcctcctgcccaattaatttggtcatctatacggacgatgaccgcactttggagttcattttgcgcaaattttggccaatgattgcgaaaaacatttgtgccatacaattgccccgatatgctttccaccgtttgcgacgctttgtcccgtcacttctcaacgattgtccatcgcttcgtgttgtcaattccaattatgctgatggtttcttcgccgaatttccggccgatgacagtgccatggcatcggatggacaagcgttggccaaatggctgttcattccccgtccggacaatgtgccaaaggtgttcaaacgctggttgccgccgtggtggtatgggaatttatcgtcgcgcattggagccttcaaagcggtgatgtcgatttgattttaattggcattttacgttcattgggttcgctgacaaaaaatagtttggacggcattcaactcgtttttgacgaatgcaaattgcgtcattttatgatttcttaatcaattgtcccatattttaggcatttgccaatgcttcatctcccgtcagtttcattgttgtcgtttggatttcggcgcctttggcttttcccgcacaatttgatctgaccaacgaagtgactcaggaacaactgacgttgaaatggatgaacgatgtcggccattattttttgatccgttgtccaattgcgcgagacacgaacaaatgggcgaaatgggaaaaggaagcgattgactggcaattaaatgatcaatggaacataatcgacatttgaaagatttgctgtgaagtgatcgattaatttgaattgcgatttggagaaatgaatttgatactatttgacgtatatatagtattgtactttttgttgctatgatcaacttttatttgtgttatgtgtatgcatttaggataaatttagggattttctgaaactgtaattggctttaagaaatgctttagaagtctggcatgaagatttgtggcaaaatttggtcatttttcgacaaaaatcagtttacaaatcgcattaaaaattacaaaaaattttccaggcggcgcttatcggcgccgtcggacccatcaccgtcactccaatctccaaagtttttttttttttttgaaaaatttgccgcaaaagaattgttaaaaatctgattgtttctaacccaaaaatgcactgaaattcactaaatattatttgtttatcctctccaaaattgttaaagatgatcagggaacggatttatatgtatcaaaaaaatcgccaaaatatgtgacaaaaactgccgaaaccccaaaatatgtttttattcccaaaaagtccaaaatatgtttttatatgtgctaaaaactcgctctgattgaaaggaaaacaagtaaaaatgttatttttgagcttttcatgcgatagcatatgcgcaaaaaaaatatgtaaaaacatataaatccgttccctgaagatgataatcggaggcgaaaaagataataggtatttaataattttttgacaaaataaattgtaaaaataactgatttgaagcaattttgcaaaatgtcctgatttttgaccccaaaatctaaatttttgggcatgatgttctgattttgaaaactttcgatagttataaaaagaaaagaataaatcataaaattctataacttttttgaaacataacaaatttttcgaaattttttacaggataatagagaatgccaagggctatcgaatgataccaagattgtccaatttggttggcaaaaaccttcaaaaataatttccgaaaatcgtcattttaatttttggacaaaaatagataaaaattcatgtagcccaacggactcgaacctcaccccctcctcctcactatgacccttcattttcttacaaaaaccatttcgccacacatgtaaactcttaattgataactcaaaattgaaacgatgtgtaataaaacataaaattcattctgtgtgttgtccttttccctttttttgtttaatttggccaatgaaaaattcacaaaatgataataaaataaataaggaattgaattgaaaatgtgcttttctgaattaattatagcaattagtaactgatgaaggaacgaaagaatgattgatgaattcggaagctataaaagttggtgccaaattttaagattttccattcattttcttaatccaaaaatttataaaataaatttcaattaaacagctttataaatgtttaaaattttcgttttattcaacgcttttttgctgatcaatttggcaataactgatgaacatgtaattaattgtgtaaagactggatgggaagtggagtacaatccgtataaggtaaaaagtaattaaaggctattctcgagagtctgtttcgtgtcgagaaaaaaaaactggctcaacatcgctttatttggtatttttttggacaaaatctgttttaacaaatcggattaaaatattttgaaaaatcttccccggcggagcctgtctttaaaaaaaaagtcactacatgcccggaagccttcgcaaaaatttcgattgaccccccncccccccccaccccgttctttgggactttggtctcgaattattatctaattttgggctcgagtctcgggaaatgttcggtctcgagcatcgctagtaattaattattgaaacattttggcgcaaaattccttaattattaattatttcggtttaattaaggcattcgtcgctcgtgcggtggccaaagcgaacaaagagtccaacaatacgtatcagtttgtcgatttggatgtaatcaatgtcatggtagaacccagagaagaagtgtatctctatgaagtgaccattttggctggacagacaaactgtgcaaaaaatgtaagtgccaaatggactgaaattggcacaaaaatgggcaaagtcggcacaaattttaccccccaaagtcgaaagtcgaacattccaagatcagcaggccctggggttgattgacatctgctgagatcagatttgtaccatggatttccttttttaaaaaagtcggaccgggaattgttgggattgctaaaaatgtgaaattcgaaaaaaataaaattttaaatttccgtaaaattaaagttttttaattgggcaaacaaaagcaggtgtatataattataggactttaaaataatgctgattttttaatgcagccaaagatggactactcaaattgtgttgaagtcgatcgggcaacgcgaaaggcattaattaatcctaataattattttttaattagcctaagccctaattactcttcagaaatacaaatattccgaatgtttatgtgccagaataaaatagaacaagaaaaaatgatacgaaaggatgtaattgggaaaaaattgatcatcaaattatcaaaatgagcatgttattgaataaaatgttctaattgacattcaacttccttaattatatgactcatttgtcacaattattgtaaattgagaaattttgtatttttaaatatttcaaaatccataaaatcgccgggatttttaggaggaaagggaaaaatggggaatccagtcccgattttttcgttttcccgtttccgaaaattttgttttaccacacttcacgttaaatataaaaagaaaagaaaaaataaataaaattaattctgtgtgttgtccttttccctttttttatttaattttcccaatgaaaaattcacaaaatgataaaaaaataaataaggaattgaattgaaaatatgcttttctgaattaattaaagcaattagtaactgatgaaggaacgaaagaatgattgatgaattcggaagctataaaagttggtgccaaattttaagattttccgattcattttcttgatccaagaatttataaaataaaattcaaataaatagccttaaaaatgtttaaaattttcgttttattcaacgcttttttgctgatcaatttggcaataaccgatgtgcaagcattgttggataatacagaacttctggacccgaatgacaagaggtttaaggtaaacaaaaaaaagtaattaaaggcgatgctcgagagtctcagtttcgaatcgagaaaaaaaaattggcccaaaagcgctttatttggatctgttacaaattgtcttaaataagtactatcggcactagggatggcattccgaggccccaaacattttcgaaaatcggaattccgagacccaaaaatgtcagaatcggaatttcatgccatcccagatcggcaccgctttccgaataatttggcaaattcgtttcattaattatttctgtttaattaaggcactcatcgctcgtgccattgacaaaatgaacagagagtccatcaaaccgtttctgtatatgcctgtcaacaagatactcaccgtaaacacaatgcatggaaataactatgtaatgaaaatggtggtcggagaatcaaaatgcgtaaaaaaagtaagtgcaacaatggactgaaattggcacaaaaatgggcaaagtcggcacaaataataaaatactcaaaaaattttcccggcagcacctatcggcaccgccggaccactattttaccatatttttgaaaaatggagaccaaaacggcaataaatagtaatttttggcgaaaaacggcaaaaaattttgtaaaatacacccccctaatttgggatttcaaaaaaacgaaaaatacacccctaaaaatcgagtttttaataaaataatgctaatttttaaaggagccgctgcagccgccgccaaagattgactacacaaactgtgaagcgaaagctgacccggcggcgccgaaacaggcattaattaattcataataattatttattaattagcctaagccctaattaattactcttcaggattacaattacaccgagtgtgtgtgtggcaaactttggtgaattttgtttgagtcgattgaattcgataaaaaaaacattggtaaattcaataaattgttacgaaaggatgtatgggagggataaagtgatcaccaaattgtcaaaatgagcatattaaaatgccaccctgttgaataaaatgatcatccttaattatgactcatttgtcacaattactgtatttgagaaattttgtatttttaatatttcaaatccataagaaaaatttgggaaatttttgatgatttgttcacaaatcgtgtacgcctgctgctctttgcacccaaattaagaaattgagataattatacaaatcactgcaaatggtggatgatccctcgaaaactgatttttataccaaaaatgtgtagcgataaacagttagttacctgaatagaaatcgaaaaaatatgagtaaattaatttcaggaatgtatggcctatttattgcgatacaaaaggttggggatgtatgaagtattgacaaatcggcacaaaaatattgtttttattgtatagttcaaggatgtcatttcgagaccccaaaaacgtcggaaatcggaattttaaaatttggtatatttccaatttgcttaggaaaagggtgctattgcacttttttgcggtgcgcttttgcaaaaactttttggcaacatggcggtagggtccggcgatgccgataggcgccaccgggtaaaattttgttaatttttaatcgctttctcctttttgggtagaaattgtattttattcagaaactctttcaatggagaaataaaatggggaaactttaattttattgaatttaaataagtcccgtcttttcctgatttaggcaatgttgaaaatgcctccaaattttcggcattgtttatttttcggagttttctattttttttgaaaatcattcagaaaatctcattgaaaattaacgaaaatttctctctttatctaacccacctgtgatgttgttatttgctcaacctttgctcccttttctttatcatagggtaaggcccagactcttttgggattcttttggggtgagaaagtcgggtcgggcccctgccctaatttcaacttttttgagtttcatttttcactatttattaattttcattttttattatttttgcatttcctttttgtgaacattaaactaaaaatcatcatcaccactagagaccggaaatttcaaatttgcggatcctgttgtaggattgggattcaaaattttttacaggacagaatccggcaggattaatcctgcaaatcctgtatcgaccaccgacgaccgcctcacgtggggcggcgccggggggggggggcttttctccccctctgctgctgctgggcggaagacggacgggaacgggtcgggtggaccaccgaccacgtgccctgctcaatgctgccacaccctctctctctctttttttttgcgtgtctctcggcaggtcgtccgtcgatgatgatgaaaactgtcaaattgtcacccctcccaaattcacccaaaagtttctcacaagtactcctccgtccctcgttaaaatttgaaaaattgctgttgcttggctttttgccgtgttcaaatgccttcccccattttacgccggcattattttttgttgtggaaagagttgacaatgggcacaaccatcgccgcaagacaccagcaaatttgttgctgttacaccaccactaccaccaccattaattctctatcgaatttggtgagaaaattggcgggaccgttggagccgaaatttttcgtaaaaatcctgctgggtcaattctgaatttcattttataattcctgaaatatcaaatagcccctgctaggccagtaaaatttcaaaaaaaaattcggcaaatttttttttcttattttgtaacgaatcatagcgcctcaatcgtcccccccgtcatttttcgctttgtggggggaacatttattatcatttatcaaaattatcagatctgaagaatagcggaaatatgggatttaaaagtcagttcgctgtcaattaggattccaagatctcggattgtttgggtctctttaataatttttccattaaattggcagggaactttaaaattatccttgccaatgtacagagaagctgatttttctggtgaaaatggtagaccccacataaaaaatttttggaaaaatacacatgtatcttatttgtaaccgcaattaatgaataaaattgcttgtcttaattcgaaattacttttcatgtagaaaacagcaattttaaaaattatacccctaaatttggaactttttcgacctttttttcgcccttatttacggccttattttggacttctttgcccttaaaaatcctcaccctaattataaacattttgttgctttaaataagagaagggaccaaaacacaaaaaactttcaattttaaaaaatgcataaacaaagtaaactaaaacaaaagctcaaaacgagagaaaaagaaatgcaaaatttcatcaccccataactttaaaattggatagaaaataaataaataattcagaattttttttctctattacctatatgcaaaatttgttgtggatttatgtaaaaaatttatttttacataattaaaacaaagagatagtacaccaaagtgagagaaattacaaagaaaaaaagcaactacgagatagtatgtgctaggcttttctctgcacagtggagttgacccatagagcacacctctgaaccaaaaaaaaccttataaatatgtcgtctcttggggttaattttcattttgttgtatccccattgtttttacaaaagttcgctaaaaacctgaatccgcatagtttttcgagaca

SEQ ID NO: 520 - DNA, 1671 bp, Heterodera glycines
  unsure (1)..(1671): unsure at all n locations
atcgcatcattgccttgcctttcttcgcatcattggcataaaagtggttttgagcaatttgnagtctgggagctatgattaatatttaccgaacagttaattatttttacgttttcatttttcttaaaatttgctcaataattcggtattttttcgtaaatatttatttaaatatttccaattaaatttggttatattgaaaacacagaaaaagcatttatttgggagagtaaatgcgacttaatctacagaataacaaagtaacagaaattattttatcagcatggaacataaacaaattgatacaactatgataaaataaaaattacttaaaatgttcttctatatataattatggtctaagttgtaaaaaagaaatatgaaatttcaaatttttatatagaatcatcaaaatatcaaaaaaataattaaacgaagctaaagtcccgaaatattatatattaaaaaactatataaattactaataccccaatgagtgtcaaagtatatgcttaaaaatcaacaaaaatggccataaactataaaaagccatttatattaattaaaaatcttaaactgatcttcaaaataattttccttcaagtatcaatattgttttttttgttatatcccaaaatttatttaaattcaaccaaactgagctcacaaataagtcagtcaaaatatgttttattttttattcgtcaaagaattttattaattttcattgatgattagtttttttaatcaattaaaagtagagttgagcgggaccgggactggtactgaaaaaacgggtacaactgagtacccagtcccggttttgaccaattttaccgggaccgggaaattcccgggttttttcccggtcaaaaagtcccgggttttcaacccgaaaattcccggtcccggttttggtcaaaattcccgatcccgctcaactctaattaaaaggaagcagtaaaatcacaaaatatgcaaaaaacaggcaaataaatttttatggacgctttttaggtggaaaagtatttttattatattttaataaaattcagaattctttttcatacctttctttaagcacgagaaattgcatagaaagtaaaagttcagaaatattaaaagaaatagaaaattgaatttaaataaattttgggatataacaaaaaaaacaatattgatacttgaaggaaaattattttgaagatcagtttaagattcttaattaatataaatggctttttatagtttatggccatttttgttgatttttaagcatatactttggcactcattggggtattagtaatttatatagttttttaatatataatatttcgggactttagcttcgtttaattatttttttgatattttgatgattctatataaaaatttgaaatttcatatttcttttttacaacttagaccataattatatatagaagaacattttaagtaatttttattttatcatagttgtatcaattttgtttatgttccatgctgataaaataatttctgttactttgttattctgtagattaagtcgcatttactctcccaaataatggctttttctgtngtttcatataccnanatttatttgggaatattttaataatatttacgaaaaatacccgattattgagcaattttaagaaaatgaaa

SEQ ID NO: 521 - DNA, 9085 bp, Heterodera glycines
ggcaaggcaaatgatgcgatgggaccgcgtcgttttgtgtcgattggttaagaatgaagcgagagagagagacagagagaccaacgtgcgaagatagagtgagagagaaaaagagaaagtgagagagtaagagagagagagagacacccagagagacaactgagcgaagagaaagggagagggagatgctgcgggtcggggtcacttcggagcggaccatttcggcgccgcaaattttgaaatgctataacttttttatttatcagttagctttagccaatctagcatcatttgaaagctctatgtgtgttctatatttacatgtaaaaatagaaatgaattattcaaaaataaaaaagttatgccacgtggcgccgaaaaagtcaatttttgaggtttttttttggccataacttttttgtaaactgacgaaattttttgaaattttacaggctaatagagaatctgaagagctatcgaatgataacaaaaatttttaatttggttgatcaggaaaaaagttgttagcaacggcgccgaaaaggccggcgccgaagtgggcggttcccgatgctgcttgaatattgcataaaaatcggacccttgctagcaatttttagagcccccccccttttgggggcgggtggttatagggctacgaatcatataaagaattaaaatttcagttttgttgaaaatttcatttgatggtttttataacggcatatataaaatcagagccaaaaaccaagcaacttttcaatccgaaatgaaattcactcattatctccccgaatttgttcacaaattcgacaaattgataatgaaaagtggctaattttcgatcactccatcaaatcgcataaaaggcatctttttcataagcgcggctcaattctgcatttgtacggaatgggatggacagaaaaggccttttccttctccgaagcggcggaatcagagggtcaacgggcaaaaaccttaaaaatttaatgatcaaaatgtgattgtttgtaaaaaataaacacaactttttgaaaacccagcgaaatttataaaatttttgtgcaactagagaaagccaaaagctattgactagaatatcaagatcatttaatttggttgtattaagcaattataacgtttttttctcgaaaaatctgtaaaatttgcagttttacgaaacgacacagcacgggtgaaaagtgatcaaagattgatattcgagtcaaatggttgagctcgagaccgagaattgttctcggcttggtccaaatcttgttagtatagagaagtaaagcttagagaaggaaaagcttcccattttgctcaatcatacaaagaacttggaatcgaattgagaattgcttcatagaccctaaatgtaactaatcattttttggattagtagaatatctgacttcttaaccccaaagatgtcggaattccattcgtaattacggattacagtaattacggcctttttggagttccagattacgggttaaggattttggattattccgcaattttgatccgtaaatggtttttttagattatttttcgttaattaataattttttcatatttgttgccccctgaattaattcttttatttgttataaaaattcagttttattaaatgcactaatgaatacttacgtctcgtatcattaatttttttggatgcgtttggtgctttttttatattttgtacattaattattgaataattaaaggcagcaagcacgatagagatcacaaaaataagtcctccgctttatagatgaagcgcgtgctatggaaattcttttttgaaaaaaatggtatattttataaatttaatcattattgttttttatttattttcatttatattttacttctttattttttccttaaggttatttattttatgatatatttactttaatgataatttacaaatttgagaaaaaaaggaaattcccataaattttacatttttaaaatatgagaaaattttacataaaaaatacttacaaacatagaatttccagagaaaactttagttttaattttcagctgtttttttggacaattttaaaaaaatcttagtcaattattattaaattttgaataatattttcatacaaaaaaatattttcgacaaaccggaaaatggaatgtcacgcattattgtcgctgtccaccctcgccacagtgccatgtacccatcagatttgactgtccgaacaattgcacctcgcaattctaaactcaattaaaattgcaaaaaaaaaattttttttttgattactctaaaattttttttgttacgcccctctcacaagaaaaaaaaactgcaaatttcaaaagcggggccatgaacgctgaaattagtgcataggtatataatgaaaaaaaagaaaatttcgctgaggtttcggtaaaaattccgtacaaatttttgactgccgaaaagcagcaaaaaaaaaattttttttttctaatttacactcaccggcaccgctgaaagtgctgttgaaaacacagtggcggggatggcacggagccttaaaagggcacttttttttaattcaatcattaatcaaaacaagtgtaagtgcacactttagttcccaccacacgcaaagaaaatttaaaaaaatataccaaaacttaaaaattttcaaaaaaaaaacctcttaaaattgtaaaaaaaaaaaattttgatttgggatttttttatgaacaattctgtaagttgtagtaaaaacaaaatttaaaacattatttcgccaaaatttgcaatttttttaataagagttgccctgtttcgttcttattgtttgccgaagatttttgagttaaaatgagttttaatttgctgaatttttacattgtgggcgacaatcctgaccagagcgaacgaagtccctcaattcgaacaattttcacgaaggcgtcctgaaaaaaaaaattttttttcaataagatgcaaccaactatggtttccaagacggatcaggacgagataaaattaactgattgtaaggtccaaaaaatgacagaaatttttttctgtcccagataatggggtactgaaaccaaattggttgactggtccccaatttttgggacaaattacaccaggaattggcacaaaaggccgactattaaatttgggccgcaaaaatcccaaatggtccttaaataatgaaatgtcgaatagcagtggaacccaaaaatgcctgaaaaacccaccaccgaccattggacggaataaacagagacaaattgtccaattgaacatccaatttttttttcaaaatttgctactttttagctttgttaagtaaaaattttttatataagcctaaaatggaccagcaaacaaatggtccaatggatctcaaaattttatttattttttgaaaaaaccaacctaaaatttaaccaaaaattgattaaataaagacaaaaaattgcccaattaaatgtgcgatttttttcaaattattaatttatgataaacgatctaaaaaattatcaaagtccaaaacttcttgaaaatgcaaaccgtttgagaacaggaaacattcgccctccgcgaggggcctcacttggctttgcagacgaattttcacgacgtccatcggtgtaacttaacaaaaaaaacaatttttatttgcagtgggtgcagaaatttccggttctagtcggttttacgcgttccatggcatttttttgtgtccatggcggggatggcattccgaggccacgaggccacaaattttcggaaatcggaattccgtgccatccctaactaagaggaaacctatttttttgtcgtgtatttagtaaattttcaactaaaaatttcgttgcttttttttatttcggcgtttttgcgcccgaacggaaaaatttatgctcggcggcactcagtcccaatttccgagtaaaatttgttctgtttttttttgttggcattgactgacttggcacagcgaaaaacgggaggctgtaaaaagagggcattcacatgtatttttaagtgaaattgggccaaattttggaggcggtaatccgacgaaaaaaaacaaaaaaatttttgcgggaaacccattttctggaaaaaaatttttggttttacaaaatttgtggcataaatattgggaaaaacggcaaaattttcatttcgtttgttttttaaaatgaattttctgccattgatccccttcaaatttagcccccgagaaaaaattttttttccaaaaaacctgtcgctgtgctgttcgacgctgccgtggtcgtagttgctgaactgatcgaacttgtcgatgatgtccaccgttgcaatcgttctagctgcacttgacgtcgcatttcgtgcccatgcgaactttgcagacgcgttttaaccacctgaaaaaaaacatgacaaaattgcaaaaggcggacattttatagcacaaatttttaatcgaaaacaatcccaaattgtataaactggtaatgatgcatttttttgatcctatattgtatcttattgtgcgaactgcagaaagaaatcttaacatcctttgtgttctgtgtaggtagcttgcgaggccgtcgcgggttatttgcgcccaacgcagaggatgtgtctctatgattaactagcgtgccaccaccaaatgcccgtccgccgcttgctgacgacagacccgttcgattgggtttgtgcgctggtaatgattcatggagttattggtgggttggtagtgcatggtaacggtgaaaggcgctaacgcgtcagtgatttgtttttggaatctgttgagcttgacaagaataagggttccccacatgtgaatgtgaattggatagacaggtctgtttagaaagtgccgcgagcaatgtgtacttcttccgttggatttggtatgccgtccagtgctgcactagtgaaagccaactggtaggctgcttgtgtggtaatgggatggtggcggatcgccttgctttggtgggtttgctgtccggcggaggagacacgttcgtggtgcgaaagaaaagtgcgtccatgcgctcgtacgtgagtaccctgactgcagcaggagaaagcgtatgtttgagtgttatggatggactcaatgttgaactagcgaggcaccaccacatgccccgtctggcgcttgcagacggtcagacccgttcgatgtggtctgacgctggtgatgatacattgttacatacggttcacagtatgtcccgtgaccctcatgctgaagttaagggagtgtcgtggtgcgtggctggtacaacacaagacataaacttttctttgcgaaggcatgttggtcttaaggcaagattttgcccgggtccacgcacctgtgattcaatgaattagatttcccaaattgtaagggagccgggcgaggtggactggcagcgaccggcgatgggagcgatcggcgcaggcaagggcgccgggcgaggtggactggcagcggccggcgaagggagcgatggctcccttgtgttgagtgctggcagcggtcggcgaaggcaagggagcccagcgaggtggactggcagcggccggcgaaggcaagggagccgagcgaggtggactggcagcggccggctcaggcaagggagctcctgcctgcacacagtatgtcccgtgaccctcatgctgaagttaagggagtgtcgtggtgcgtggcttgtacaacacatgacacaaacttttcttcgcgaaggcatgttggtcttaaggcaagattttgcccgggtccacgcacctgtgattcaatgaattagatttcccaaatttcatgcccatccacttcaaaaagccttttaaataccgaacactacccccacgcccctcccccacccatcttatttttaccatccaccataaccatgcccctttccacgcccatcatcacccgcaaccatctcatttttaagcctattttttgcctattggctcaatttatttcctacgcgcgcgcgcgcgtgttgaaatggtactgagctcaatttattttctacgcgcgcgcgcgcgagcgtcaagggcgccgggcgaggtggactggcaacggccggcgaagggagcgatggctccctttggctgagtgctggcagcggccggctcaggcaagggagccgagcgaggtggactggcagcggccggcgaagggagcgatggctcccttgggctgagtgctggcagcggacggctcacgcaagggagccgggcggggtggactggcagcggccggcgatgggagcgatcggcgcaggcaagggagccgagcgaggtggactggcagcggccggctcaggcaagggagccgagcgaggtggactggcagcggccggcgaagggagcgatggctcccttgggctgagtgctggcagcggacggctcacgcaagggagtccatcgaggtggactggcagcggccggctcaggcaagggagccgggcgaggtggactggcagcggccggcgaagggagcgatggctccctttggctgagtgctggcagcggacggctcaggcaagggagccgggcgaattggactggcagcggccggcgatgggagcgatcggcgcaggcaagggagccgagcgaggtggactggcagcggccggcgaagggagcgatggctcccttgggctgagtgctggcagcggacggctcacgcaagggagccgggcgaggtggactggcagcggccggcgaaggcaagggagccgagcgaggtggactggcagcggccggctcaggcaagggagctcctgcctgcacacagtatgtcccgtgaccctcatgctgaagttaagggagtgtcgtggtgcgtggcttgtacaacacatgacacaaacttttcttcgcgaaggcatgttggtcttaaggcaagattttgcccgggtccacgcacctgtgattcaatgaattagatttcccaaatttcatgcccaaccacttcaaaaagccttttaaataccgaacactacccccacgcccctcccccacccatcttatttttaccatccaccataaccatgcccctttccacgcccatcatcacccgtaaccatctcatttttaagcctattttttgcctattggctcaatttatttcctacgcgcgcgcgcgcgtgttgaaatggtactgagctcaatttattttctacgcgcgcgcgcgcgagcgtcaagggcgccgggcgaggtggactggcagcggccggcgaagggagcgatggctccctttggctgagtgctggcagcggccggctcaggcaagggagccgagcgaggtggactggcagcggccggcgaagggagcgatggctcccttgggctgagtgctggcagcggacggctcacgcaagggagccgggcgaggtggactggcagcggccggcgatgggagcgatcggcgcaggcaagggagccgagcgaggtggactggcagcggccggctcaggtaagggagccgggcgaggtggactggcagcggccggcgaagggagcgatggctcccttgtgttgagtgctggcagcggtcggcgaaggcaagggagtccatcgaggtggactggcagcggccggcgaaggcaagggagccgagcgaggtggactggcagcggccggcgaagggagcgatggctcccttgggctgagtgctggcagcggacggctcacgcaagggagccgggcgaggtggactggcagcggccggcgaaggcaagggagccgagcgaggtggactggcagcggccggctcaggcaagggagctcctgcctgcacacagtatgtcccgtgaccctcatgctgaagttaagggagtgtcgtggtgcgtggcttgtacaacacatgacacaaacttttcttcgcgaaggcatgttggtcttaaggcaagattttgcccgggtccacgcacctgtgattcaatgaattagatttcccaaatttcatgcccaaccacttcaaaaagccttttaaataccgacgcgtgttgaaatggtactgagctcaatttattttctacgcgcgcgcgcgcgagcgtcaagggcgccgggcgaggtggactggcagcggccggctcaggcaagggagccgggcgaggtggactggcagcggccggcgaagggagcgatggctcccttgggctgagtgctggcagcggacggctcaggcaagggagccgggcgaattggactggcagcggccggcgatgggagcgatcggtgcaggcaagggagccgagcgaggtggactggcagcggccggcgatggcagcggtcggcgcaggcaagggagccgagcgaggtggactggcggctcccttgggctgagtgccgaggaacgctgtgaatgaactgttttggtgctgcagattgaatggcagagaacggctttcgtgcgagttgtctgtcgtttgacgtgatgcaggctactgtggtgcagcattgtcgtggcctcaattttcggatgttgatgcgcgtttgagcgtgtaagtcgcaagtgaactcagagctaggaagctgatgttccgtcctgagcacgacgttaaactgcttccagggaaacctgggttttttcaaagctgaaacttgtctgtctgtgttttccaaatctgtcaatattttgaaagatgcaaattcgtgtttgtcatgaattttcttgatgattgcacgcgaatttcctactgctgatttttttgtgaatatgatggttttcaaaaaaacaatttttcattttttagctatttaaatgttctcctttattattgttttcttttgcctcctttctgcttcccgcgtcagctccatcgacccggcgggcgtgtcgctgccttcaacttccgcggaggtggccgcggatgttgatgcgcttttgggcgagatggtcgaagcggtcgcagcggaggttgctgaaccgtccggctcggaaacgttgaatgcggtagattcagtcgatttctggagaattgttattttttcgtattaggatgacgaagtagtggtcagcggcctatgggcgagtcaagcaccgggcggcccgtgctcaacaccggcacgcgacga

SEQ ID NO: 522 - DNA, 7614 bp, Heterodera glycines
  unsure (1)..(7614): unsure at all n locations
ttttatgattaacnagttttgcaattaggattaaatagaactgccatcaacatcggcaccaccaccaccggttctgtctgcggtcgcccgcagacaggtgtacgacgtagaggcgggttttgctcggtacgaggatgactcgttcgacctcgacatcggtaaattacttgatcaaaaaatcataaagtgaaaatttaaacccatagaactcgccgaagcgcaagaccaccctgctgctgctgctgctgccgaagcggaagcagttgtcgactctgccgaccctgctcacgatgcgacaacgtgatgcagcagctgacttttccaccacccaatgatcctggacgtttccgtcctggtgagggttatatggcaccgtggtttgtctgttttcctccgtccaggtcctcgatcctggttgccgggcaactcgtttgaggctaagagacggtcaagcgaaaaaaacagacacaaactgtaactttacgtgcgacgttttttccaagctgtaactttacgtgcgaggtccgtcctgagcacgacgttaaactgctcccagggcaacctggatatttccaagctgcaactctgtcgtccgtatttccaaactgtaactttacgtgcgaggtccgtcctgagcacgacgttaaactgctcccagggcaacctggatattttccaagctgcaactctgtcgtccgtatttccaagctgtaactttacgtgcgaggtctgtcctgagcacgacgttaaactgctcccagggcaacctgggttttttcaaagctgcaactctgtcgtccgtattttccaaactgcttacgcgcgaatttacgcattatttcaacaatcaattggtttcccatttcctttattccaagcagttttttgcctgctccatagcgcgcgcccttattatttcatgcatttattttgtcgtttaaccatttcattatttttcacaatataatatattaataatttttttcccttttagccaggtattttgcgtgtttatttgcattactaattttcccattttggacagctttcatcttacgttctttatattgttctcagcttcatttattggtaagctgtgtgtctacacgcgttttcccaactaataacatccccatttttcagacttgttcttcttattatttgttttcttctatttttcatttatttttcattgtccttcccgatttgtcccgtctgaccccaatgccttcgggctccctctctcccctttccttccccatccttccccagccccgccccctatcccgactttcgccacgacccgtatcccaaacagctctctttagagctaaccccgctcctctctctctctctctctcgccttcttcgtcttgccgtttgacggttggcaagccatcgaagaaaggtcagcagcatttcttgtgtaataataatctcaaatatttacctttttacagccaaatttgtcccggcccctgccacggcaaccggctttgtcgggcccgcacggcgccttgcccgcccacgttcgccaactccaactggcgttcgtgtcgctgcgtctccggtccgctcgtaccggccgaaggacatcctcgccccgccgaatctccccaaggacatcgacttggggattttcaaaaagccgattgccgtatgtttgtagtcaataattaaacaacattttcttaaattattctcaaatttagggccgggactggagcgaggactgtgccacttgtgcggcattcatgggcgccatgtcagaacacatcgacacgtgcgctctggcccgccttcgtcacctgattaaggagatgaagaagtttgccgctggtgccaaagacaacttggcccactcgcgtggcgtcggcatcgccctccaggtgccaaagccgtggccggtggcagaggaggatggttggacgggcgtcaccatcccgggctgtgaggaaaaatcgcccgttgctgagccggctatcgctgaactgtgagtgcaaaatacatccttttcaccaaaattctttccttaacccacatttttaggcgtaagccgaagaagcagaagcttccaaaggtggtgcctgacaagcgccagccttggctctgcaacaatgatggccggccgattccgggactggctccggtagattcgttcatttgtttttctcaaaatattgtttccttttttaggttgcgaaacagttgccggtggctccgcttcgcaagttgccaactgacatgccgcgccccaaaaacgtgtaccacacgatcgttaagggcaaggtgaactgagtgcgaattgcaatcctttatttttttgcttattattttcaggctgtcgcgtcaatcaagcttttggagctgtcgaagatcgacaagccacgcgtgccgatcggctacgcgccaattgctcgagccgagaagccagcgcttcaaaaccgtcctgttttgaacgctgtgccgaaaccggtgctccgcgaaccgagcgaggaaatgttcgtcgttgtgggacaggtgtgttctgtgttttttaaatcaattatcgttactgaatttttttcactttaaggccatcccaaaatcggcggtggagaaggccaggaaaatgcccgacgtggtgaagaaagtgccgccaaccgtccgccacagaagaactgtgtggaactcctcttcggtcagcttcgtcgtcccgtgcttttatgtgcttcaacagtacatcaaagcaacgacttccgcggttgcgtcttctgctcccgctttgaagtcgtcatcgatgagctacgctcaagctgtaatcattattctttattttttcaaatagctttttctgttttagttaacgaagccgcttccgagcaagccacgtgctgtggtcgccagtgcacccggcattccgaataagctgcgttttgaagctccacgcctcagtgaggagccgaattggcgcttattcgtcgggacgggctcgcgtcgtaacaacatcacgacaacgcccaacgcaccaaagctgccgattctgcagaagacctatgcagaagcagctcgcacgcccaaagaagctacgaaaaagcctcttagtgcgacggctcgctcctttacccttggtgatttcttcatcagcaagggtgtaaggggcgcatcgaaagctgaccgatgtgcgctgacaactgccgaagctgctcctaaacgacagcgaggcggcggccgtgaatcgagccgaagcgctactccaacggggaacgaagagcagcacgcctttctcctggactgcttccaaagaagtccaacacaaaaggaggaagcgttcaaagcactgaagaagcagttcaagaagacggtttcaccgcggacctatggccgatggtggcagaatttttgtgacgggaagcttactttgagccaacgcggaagtgagttttttatatactcgttagttatggtaaatgccctaactcaataggaacatcagaacgcagccagtccgttcgagaaagtgtgtctccagcccagtcagttcagttggaagaacaacatcaagttccgcaggaattggaagctgcaggcaacccaacttatgacagcgaactgatacgcactcaaacaagtagcgcgacaaatgaagaacagcacgccttcctactggactacttccaaagaagtccagcgcaaaaacaggaagccttccaagcgctgaagcagcggttcaaaaatgttgtttcgccacaaacctacggtcgatggtggagcaactttttgaaaggtcaactcacgttgagacagcgcggaagtgagtttattatttgtccactttcaagattaatttctgtctgcctcaataggaccatccgaacgctcttcatcagctcgtgaaagcgtgtcgccagcccagtcagttcagttggaagaacaccatccggccccgcaggaactggaagctgctggtgatccaactggggacagcgagcttattagtgctgctgtacgacagaaggaactggatgagggcttcggtaaaattgtaaccaaaattctcttacctttattcccacattatagacactccatcatcgaaacaatctcgaagctcacgagggcaatttggcaagtcaaggaaatgcgttttctgcacaatccctttgaacgatgctgatggctatgcaatgttaaattgcggacattcatgccactttgaccagccctttgccgaatggtatttcaattattacatttattaaacaaaacgattcataggtataccgatgtgccgaataagaaatgcaaagttgcacggtgcaaaaaggcaacagttcttaaatgcaatgaatgttgtcaacgcattggtatgggcatttacgaaaccggctgttattgcgcggaaacctccgcttcagtttatcacgcggatgaattggaagcgaggtgctctttcataatgcaaatttgttattttagttttattataggctcaaagcaagcggtggcaaatgcccagattgcggcacgcaacaccccggcttttgcatgttgtgtcagcggctgttcaagctgcaggcaaatgggcttcgtcagagcaaggtgttcctgccttgctgtgactcttacactcacttcgaatgctggtagtgtttaatcattttggatttttaccccatttccttttggcaaattaggtattcgcccgcaccgaagcagagctgcccagcaaagtgcacaaagccgtggcaagtcgttcaggacatgcattaccagtaagcgactcatacattttctttcactagtatttgcatttgtattttagccaaatttgtggtgtccaaaatgctgctccgttgcctgcagtaccgaagccaagaggcatcgttggtggacgcccgctgaagaatgccaaggctgcgtcgccaacagagtccattccatcgactgttgacacgacgacggccgcggcttcggatgtttccgccaatgaatcccaagcgctgacggactcgcatcttatgccaccaccatcgttggctcctcgccgcagcacacggatcagccgacaagcgtccatcgcaagcaatcggcccagtgctgtggcgccaaagcccattgctccagtgacgcactgttgcggaaccattcagtctgctcactttggatatggctgcggttccaaaaaggcgaaccatctgccttcatactacaactcgcttcgggatcaagtgggtttaaagtatttgaatccagtagattagttcattctatgtaggcacaacacaattgccctcactgcaatgcgttgctgttggcttccgaagcagttggaccaaccgcctattcaaagtgctgcgcaaaaggacgtgtcaacttggcggaccgctacaaagcgcttcgtgctcggccagccgaattggacaacatcctccaaaacccggcggggcagtacaaaggctggagggactcgctctttcgccacgtgctgagatacaacaacaacttggcattcgggaacatcaacatcacccgcagcgaagagcgaatcgacttgcatcgaatcgtgaagtgcaacaacatgataaactacatgttgtgggatttcaacccacccgatggcggcaaaccccatctgcacggacaacttttcacgatccctccagccgatgcgcgtactcgcctgggcgaaatctctcgggaacattcgctggacgtaagattgacttatgtttccaatttcggttttattttttattttacttcaggaacagttgatggcggccctttacggcgttcttctcgcaaaccacaagcttgctgtggtctacgagacggcagcggagacgtaccgtcagctgccggaagaagaccgaatgcagttccgaatgctattggtggacaccaacaagcggggcacagagcgaagattggatgccaaagatgcgccggcaccggacaatttgcatgttgatgaccgggccaacctcaggcacatccatcctggacggcttgagaccgaaacggatgctggaagtcgccttgtggctcaagtaagcttcggcgtttggtttcatgtcatataaacagtgttcaattttttccagatttttctggactgcggagcgaatgtgatgccaccgagcgtgtacgacgtggtgctcacgggccgtgctaccaccaagatcgtgcacatgaaatggtggaacaggaacattgatcctgccaatttcccgctgatcttttccttcggccaatttggctacggtagagtgtttttgtgacggtgaagcattggtgcaattttcctttctagaatatgggtccaaattggtgttgcggccgcacgagcgcttcgactccacctacaagcagatcaaggacaaaaacaacaatgtcctgcttgacgccaccgaagaccttggcgaggaggaggagttcctcggctctgaactcgagcagcagttccatcgccgcgacaacatctcgcgatcgcaatggttccgctacatggctcacatcagaggcccgcacgccaactggcgagacggacattggctgtgggactggcgcactctggcccagctctacaccatcacgttcaacaaccggatggaggcccaaaaagtccagttcatgaagcagctgcagggaagacgacgtcttgtccttcccagctccatcatcaactggctaagtgctctgcgggacaacaaaggtagggcaaacatttcgagtttaataatcaaatagctgctatttagggtacaagggcgacatcggccgagtctacatgaccgacgagcactttcgcgggtcccggcagtactaccagcgcgagtacgccaactgcatgaccatctgcagagaaattgggaagccggatctgttggtcacgctgacgatggaccccgactgccctgagttggacgacatgctgccaactgatccagatgggcaccgccagcagtggtacgaccgcccggacgtgatttgtcgtctctttgtcgacaaattcaaagagctgtgccatgaccttaccgtcaaggaggtcatggggcccgtccgcggatggttctactcattggagcaccagaaacggtagactgagtcgtttggttttgaatagttaggattcctttttagtggcctcccgcatgtccatttcgcactgattttggactgggacagaatacgaagcggcggcaacatcaacacgccagcagagtacatcgagcagtacatctctgcagaaattccggacaatccatcgggccgctcacccgaagtgttgctcaggcgagagctttacaaaacactgaggctgaagcacatccacacgtgctcagctcgaagatgtttggttgacggaaagtgcctcaaacgttttccggttagtcaatattttacttcacttttatggttatcaagcatatcaatttagaagccgttctcgtacgacaatgtctacaacgaacacgcttacccgcggtaccggcgacgtcctcctgcccctgacgccagggcagcagctcgacaccctgagcaatatggacgcgactttcagtacacggacaaaagcggcaagacgattcgggggggacaaccgttacgtagtcccctttcaccccttcc

SEQ ID NO: 523 - DNA, 1131 bp, Heterodera glycines
  unsure (1)..(1131): unsure at all n locations
tcgtccgtgtcaatgcgatgagatcggttccgccacctctcaatgcaacgagaagggccaatgtcgctgtaagccgggggttggaggccaattctgcgaccgttgcgaacatggattctacgactttggtgccacaggatgcaagtgggtgttgagatttgatttatacacaaatgtaaatctgggggcattgatctcatcgagtgcgggggagcgattgttatatgatttaggcttttcgggacttaaaaggcagtggatgccattggcggaacgaaccaacttcgtccaactccgtctgagccaatttgaatgaatataactttagtgaaggtgctgatgtccatgcccagttgacgaacggaatgagaggaaaggaggggacatcgtattcgggggaaagggatgaacgagccaatgatccgggccctggattaatggcctccccgaattgggatccccgggtcgcgcgactgattagatgcgtatggagaaatgccaagaaggagtaaaacagatatcatttattagccgataaataagttgaaaatcccatcgcaaaaagcccatctcgctctatcgctcttgactctttagccccccccccttgactgactgccgcgagaacggggagaacgggaaaaggaagcgaaaggggcggggaaaaagacaacaaagtgatcgatgatcgcttataatcatattccgtctctgtgcctcacacgtccctccttcttttgagtttgtccacaaactctcagttctgtcgtgctggtggattggtgcaacgagtggagacatgacctggctggttacaacgccaacatcgaatttcggcacgagttcgtgaaaattcgcgctgaacatgacgagaaggaagtggcggattggagatgtccctggattggctgataggagaattttggaaattgagattatttggtcgatttaaatcgttcaatggcctcccatttcgagacagaacagccgcggttgaagacgaatgaccgggtgccaaccaatcagcatgaaaacgatangtctggactgactcaccagatcatcgactaaaagtcacggacgtagctcgaactcgggcttttgatggacttanncacggacggggatgtt

SEQ ID NO: 524 - DNA, 4733 bp, Heterodera glycines
atcatttattagccgataaaaacagttgaaatccaatcgcaaaaagcccatctcgctccatcgctctcgactgcctagccccactcaactgactttttcgagaacggggaacgggaaaaaggaagcgaaaggggcgggaaaaagataacacaaagtgatcgatgatcgcttataatcatgttccgtctctgtgcctcacacgtccctccttcttttgagtttgtccacaaactctcagttctgccgtgctggtggattggtgcaacgagtggagacatggcccggctggttacaacgccaacatcgaatttccgcacgagttcgtgaaaattcgcgctgaacatgacgagaaggaagtggcggattggagatgtccctggattggttgataggagaattttggaaattgagattatttggtcgatttaaattgttcaatggcctcccatttcgagacagaacagccgcggttgaagacgaacgaccgggtgccaaccaatcagcatgaaaacgatagttttggactgattcaccagaatcatcgactaaaagtccacggacgtagctcgaactcgggcttttgatggacttaacaacagacggggaagttaccaccgtaaactcaatggccttattcagaaatctggaccaaattgggctgcctcccaattcaagaaagtcgcctattacaattagtccatgttttccacgggaaagggcaacattcaccctttgggcatcaccccaaaattcactcttacgatcctttgaaaaattggcccgttgccaattgctgaactgttgctgcttggtgactgtcgtcgtgacgatggtgatatcggcctcgtgcccctgcattgcgtctgcagtggcagagacaatggaccgactaaacccttgctctttcagctcagtgccaatctgcgcagcttgcccagcataaaaggaaattatgcggatgctgccggggaatccgtccaacaaggccaagaggtccagtactgttcgagtttgtccgctgtttgttgccgaaaagctcgtcagttccggttccattagtgattcctggtggatcaataaaagaggggattccgccaccggcattttccaaaaatcgattagcatcctgaaagaacccggcccaggctgaaggcgttccccgtggggtttgtacgccatgtgctcaacacaggccacaatctgccaatgagaacggtaatttgtcagcagtgttgtcctatccaccgctttagccttgtccaaatttatcagaactgtgtcaaacccaaatcctaccctaaccggctcgggaacgctttgcatgttgaccgccaattggtaccggtccccggttaccaaaaccttttttatctcacagagagccgacaaagttgagcagacttgcacgaatggtccctgaccagcctcgtccaacaccacgatgttccgttcacaaatcagccggccaatctgttcagcaaatcccaaagtgcagcacagaactcgcctccggtccaagttcagcacgtattccgcgatcagcgcctccttggcaatccgcgggcgtttcctcacatcccgcaaatatctgtgtacttcccttttctccttctgttcgagttttttccagaaatcttccgaagtgaccactgattccaacaaattccctgcaattttgtctaaataatccctgtattttcctttgccatttcccgaaaataacgccaaaggaacttcatcacatccttcggtttgtaaggccccgaccaattcttcgcacattttgacaaccgctacgttaagcggtgctaagcatagaattttgttttttgggttgctcattaaggcagcaacaatcgcagccaatgtatatgtcttccctgagccaggcggcgcttgctgtgccacgactctcggaacattgtcgagcattagttcggccgtgcgtatttggccaccttccagcttccgcaaggcggggtgcctctcaattcgtgccaaaacttccgaagaggtgtcttcattttcaacattgttctgtgccagaaggattttccaaatgcggctggtcccatcagacccgctcgacatgcagctgaacatgtggccataaaaacgctcaactctcaactccaaagcctgaaaggattcactaggagttattgacgcctcatggccttccgctaagcgctcaaagtcgccctcggcatcgtatttccgagccaattgaaacatgagaagaacctttgcctgtagtacaaacatttcttgtacaacacatttgtggacgtccaaaatgcgtccaacagcacaaggctttttggccccttttagtttggctgtaaccgctgcatcgatttcccaaattttggtcaaattcacaaacttacgtttttcctgtacaaaatgttcaaaagtcaccacaatattgtcttttccgctttccaagacgaacaacgccgtatgaatggtgaactcctccatctctgcttttgcttttagcagtgctccggacacagctgccgcaattccatgctcacatagcttcaaatcagtgcttgtcgaaaaggggaactcataaccattaacaaaaccgctaatccccgtgccaatgcatggttggtgaacaaccaattccctttcagaaactccctcaaaatcggctggtgtgatgtaaatgcccttagggccaatggcaatgtcggaagggcgatggatgcgcacgaacgtgacatttataagcactccaggcttaattttggccaagtcaattgtgctgtccaactggtgttgatacagtcgctggagaacttgactctcggggaaggccacgtccaccgctcttggcacatccttattttctctcaccatgctcattacaatccctatgcacttttccaaggaattttgaagaacggatgagactgtcatggcctcggcttcggcattgatcttaaaggcattagaaagccaatcgggaaagcgctcgattggggcataacttgtgacaaacacaatgtcaccaagtctgagctgtacacccaactcgaacgactcaggaattccgataatatccggacccttcatttttccgccaaaccgaatggcaatggccattttgtccgttatttgacaaataaccattttccgtccacttcctccgtcatccccctcattttccatatctttaccgttttcgtcttcactcagatttcggcgtctcttgcctaaggggtttttctccttaaacacttcaattccatcttggtccacttccaacacataattaactccctggctccgttcaatctcgacaacatccatgacagacggaccgaggtccctatttgcttcctcttcacccttctctccctcattttccatctctttcatgatcatttgcccaaatgatcctttcattttctgcgtctcttcaatcacttcaattgctctttcaatcaatctctcctcctctccctgtacggatagaacgctgatcattgctcccatggtttcaagagccccgctactcaccgcaatctcttcaaaagtgctctcattcgtgccgagtgcacgggtctcattcatgacagatggcccgaaggccgaattatccaacatactcttaatctgtggaccaatttcagatactcgatcagttcggccaacctcctctgccatcccgggatcatcagcgaagatccgatcaacatcttccggcgaaagcgttgtcagaactgcgttgtccaagtttggctcaattgttgacacaattgtattggctaccacggcgccagtaatgaccgatccttccggtgatgagatgtcttcatagaccgggtttggtagagcagagatgtccaacaatgctggtggacttgacaatgctgccgacgcagacgaagactttttggagaaacgttttgacttttggtttttgggcattagctaagattgaacccaattaaatcagacggtcatttgcttatactcaattattggataaggaaaaacattggaaggtacaacggggaaataaaaagagaaaaggagaaaaaaaactgaaattgaaaagctgtgctaagcataaatgaagtgtgagaaggatttgatcgagaaatgaatgatttgcctagcgaaaaaaaggtttaaatattaaaagagattttccttcgcggatgagaatgaatgtgaagatcgagatcagccttttatggacacattagctcctcccataaggcaaaggagccgatgaagaacacgtgaatggtcactggctaatggaacaacacaggtaatgcgaaatttcacggtttgggatgaaataggtagagagaaatgaaaaaaaaaactattacgattaatgaagaaaaactgtaatataaaatcaatgcatactgtagtccattactattactttttttgaatttcaatgcttactgtacataaaggaatatgggaaatagtaattaacatttaatgaaatgttattttatgaaaatgtctttttcttggaaattacgcaaaccaaaagtgtcttatttcaactgtacataaaacgagttggagattaaataaaaaatatttggcaagtagtttgatagctcaggctctgctctttttaatgaatctatatttgtccggattggtttcgaattcagggactagttaggttttttgtgaggtactcattagggtaaaagtgaatgaaatgacaagggatcgtgtaatac

SEQ ID NO: 525 - DNA, 5568 bp, Heterodera glycines
aaaaaaatgggaatattaacggtggaataatgttgaaaatggttttaatatttcgaaatattgggtcatttaccgtatcctaggtaaaatggtagtacgatagttaaaagatttttgaagtttatttatcgataattgacttaattataagtgcctaatcagacattcgccagcttcttgatatgtcataagaaagtgaatttcgtttttttttttgtattcgtcctatcggaacgcgcggaacaaatcgattttcaattcatcgctaattcatcttttagcgcttcttgtttttttttttttttattaaaagaatatttgattttaaccctaaaatgtcacaaaatcgttttttgtttttttttaatcctttttcgtctatcattctctctctatctctttttgtttggttttttgtttttgttttccatccttgacaattcccgcaaacgggcaactcgcgttccttttgttatgttcactttttacggccatttatagcttataatgccccgaaaaaatctgcgttcacggcaaatgagcgctcgccggcgggctcaagaatgctctaaatttgagcagcaaaagaagcagctttttgatcattttcatcggtctggcccaattccggcccatgacaatgatgtcgaattagccatttatgatttaattccgctttcattggccgcatttccggtgacaatcagagccaaatttccgccgcaagcacaattcgacgtgttcacctgtaaacttaatgattgggcgtattaccgtccacctcagggtcacagagacccaggccataggtccgcgccataaaatcagcttttatgagtgccttcagctttatttttttaagcttttactttaatgcctccggcattcgtgcacataccaagccgtgggcaaagcttgttgcgtgtgtttgtcacgaggtcattcactgcttatcccggcaattctgtggcgatgagacttctgtgtgcgcatcaatggtcggcaacaagaaatgttcggacagctttttcaagcttaaaaccattttcctcgagacttacccattcatgactgatttgctcgatatttgtgagtaaatgtgtgttgtttttttttttttttgcttactctgattcatttgttggtgataggcctattcagaatgattgtgcaaagatgattttgatttatctaaaatattggctgataggactcattatatacagaaaaatcattcagtgaaccgttttggttttgttatagccaatcgatttctcagagaatatcttttgtcaccactaatatctgcaactgtttggttggtcacattttgtctgtttgtaacggtcgattcactgctttcttggttcgaattatcagcttctgacggttcattgctctgcacttcttcctcatcatcaactgctaatttttccggcactatttgctcgtcattaggagtttttggcgatgtgcatggggggcccattagctcaaagcacttttttatttgattgacgtgtactttttttggtggctggttcggtgaaatgcagcttattatggtagcatggacaccattcagctcaactaccctgaaaattcccttccaaggaaggtgaaattttttggaagtgccaacttttccggcatagtttctaagtaaaaccctatcgccaacgctgattttgggctgtcgcattgttttgtcatattgtgttttcatcttattctgtgcttcttcaattgcctccgccgcacatttccatgcttttcttaaagtcgtaactaatttgtgagtaaattcgccatcatctttgaaatcaacttgactgtgaacgcgaacgtccaaaatttgatcaacacagaaaatggggtcccgaccaaacattaaaaagaaaggggtctctttggtggatgaatggcacgacgtattataacagaatgaggcaaattcaatgtactcgtcaaaatctgggttttccttggtgatatatttagacaaaatgttgtgatatgtacgaaaagtcctttcagtaatagcattcccttgggaccaatacggggtcgcatatgtcttatttatgtataacattgtacaaaattctctaaaaaattcggaagtaaatgccgttgcgttatcactaatcagttcagtacaacccccatattttaagtaacagttctttagaaaggcatcagctatggttcggcctttagcatcaggtagtgggaccgaaattacgtatttagtaaaccagcaaattatatttaacaaatatttatttcccttaacagttgtggggaatggtccggccaaatctaatccaactttggcaaagagagtattaacaggaaccacttgcatttcagcacgataagctggagtggggttatgtcggagttggcatgttatgcattgttgcacccagagaacaatatctgaatgcatcctcggccaaaaatactttttacacttttttaatgtttttttaatactcatgtgccctcctcctaatggggaactgtggaaggattcaaaaataagtgaccgtaatgacacagggacaaaaattcgcgggacattacttccaattttaaagtataaaactccggaatttagcaataaattacatgccaaaattgaaagttggtccttttcgctttccgagaaatcagccggaaatgatccatttttcagaaaatcaatgtatgccaaaatttcagggtcattcctctgttcttcggccaaatctatctgatagctattcccatcctcatgcctcagggttatcgtattaacaaacggtgcaaaaactatatgagatcttgactgaaccgaaaaacatattggaaattggactatgtcttccatctctggcaaaccatcaacctccttaattggcacatcctcagaagcacgtgacaaggcatctgccagtgtgttttgccgacctgccacatggacaattttaatctgataattttggagttcaacgagccaccgagctaaatggggatgggtttccgcttttttgagtaaataggccaaaggcttgtgatcagtatgcagttcaatgtcactcataaaaataaatggtctaaattctctcagtgcgtaaataattgcacacatttcaatttgtaccgtcggccatcgcctttcagatgccgataatgttcggctacagtaagagatagccgagaaagtgcctatttcttcatttttttgcattaatacaccgccaagtccagaccctgaggcgtccgtaaagatgtgaaaaggcttggaataatttggaaaaattaggtttggagactcggaaatgaatttcttaagcatttcaaaagctttttgttgctcctccttccattcaaacttgacagattgcctcgaaaggctcaaaaggggttcagctatcgtagcaaaattcttgatatgtctacggtaaaaacctgcttttcccaggaagcgtttaacttctttgacatttccaggaattggcatgtcttttatgagctctattctgctcatggttggtctataaccgccagctgaaagagtaaagcccaaaaattgcatttcttttgcgataaaattacacttttttggactaagttttagattgtaaagtctaaaacgctcaaaaacttttcttagcgaactcaggtgatcttttagagtgccatcctttgtgaatactaacacgtcatcaacataagatagagcacagtcttctaatcccaataaaacggtagtcattgccctggagaaagctgctgtggcattttttaaaccaaatggcatgtataacatttggtagacacaatcttccgtaatgacaccacatttccatgacgattcatctgacaattttatttggaaatagccactggagaggtccaatgaagaataaaaattgcaattccctattttttccatgattgcatcaaggcgtgggaggggatatctatcgggaaccatgacatcattcagtttcctaaagtctaagcatggtctgattccaccatcctttttctgtaccaccacaaatggtgtgacccatggtgtatccgactcaatcatgacaccagctgctaacagcttcgaaatgtgtttcttgagctcatcactgtatttgtaaggcattcgtcttggtgctgaagagattggcgtacctgttgttgtgacaaaatggtgttctcctcctgtaaaagatcctaaatcatactgacttttgctaaaaatatccgagaactcttcaactagcttttttaaagaatctaagtctttcccttcggcaacggatttagaaaaatcaatattaaatgaagggtcaacttcggatttttcatttttcaaggggactatactcgcgtcaatccggagcttcgctaagaatgccgtcattgtcctctaactcattggcatatgccaagtgcatgtttttaacaaaatatatcggctcatttgtcggatttaccaaagcaaccttgacagtgtcccctaagggcgcgcttaccgatgatatcaaaccaatgttccgatttgagacattctgatcagctcgttcaattaataagttcttttgaatgggaaataaagattcaattttcccttcaactatttgctgagaattcgcgggaattgtaatgttttgtaatgctgctattcttaagccctgagctaacttattacttggtcccatgggtatgcaattttctccaacacaaaacttcatttttgtgaaatcaaaagaaatttttgggagtctactgagtgagtccgtacctacaagcaattggtattcattggcggtatgaaattcgttgtcattcaccaaataaactataattgtcaccttgaaaccggccagcattaattcaacatttatcttctctttaaaatgaatcatatgccccgaggcactgactgcatacatacttgtcttaaaaatttcggcatttaaccttattgccaagtttctgggtgcaattgtcacggatgcgcctgtatcgatcaaacaattgagcaatgaagaattgactcgtgcaggcacaactgctgaattgttcgttcttaaaacacaaaccgtgcagagacagggtacactccctgttctgcgtacttggagatcttttatgggagtgtatctgatttctggcaaccgtaaattctcagaaatgccattaagattgttaagagaatttccgtgccgtcccctgctgtattcccgcttaaacatgaaataaacccggaccagcagttcaaaaattaaaattccaactaaaaaggtgatgactcctctccaagcaggggtccaatctcctattatatgtttgaccaaattatcttttaatgcatgccattgttcagatggggttgtcaaaatttcgccatctttctcatgaattttataggagacttcgttcaaattcatggtatcagaaaccaaaaaatgactatagaaatcagaggtattggttaaaaataagtggtgaaaaacatgtatgggaattgaaggaatggataatgactttaattcaactttatcaattaattcaatt

SEQ ID NO: 526 - DNA, 4666 bp, Heterodera glycines
agacttaaacctctgactggtgccgtaatagagtcaggcctgagggttggacagggagaaaggacggaagagcccataaatggcccacaagttgtgtttggcacatcattggacctttcggcataggaatagccaaattaatttgacacatgtttggaataaccatcgtcagtaacatcaccataatcattgtgaatttggagaatttagaaattttgggagcaattccttcccaacttcgaattctgatgggaactaagctatcactgcttgtcccaggtacagggtttggatctgattttggttcctctgtctttttcggggtttctaccacagccagggttttgagagtacccgctccttcgttcttgacagtaacgcccgagggccgtgattcattcacactcaaattagctatggctcgaataagtgcatcagaatccaaaacagtaacatttctcagctgctcctgcgatgaattcgttctccgttggtcatcaaatcgagctccattatttctgaaattatgattgggacggctgaaacggtgcgccatttcttcttgtctggtgcggcaaaatgaagcaatatgaccagttcggccgcaatagtgacaaacgggtctgttgctccatcttctttggctctgcatctgttgatgatagcttgaccatcggttacggcttggtgtcctatttctgtaaccgccacggcctctgccgttcgaataccctcttgacgagtgtcgatttcccaatggggttgtgtttgcacgagaaaatcgatgtgggggagactgatcaggcctctgatcagtatggacttgcctttgattatttaatgccattaccgtacccctcaatgtgtcagaaattgttcccttttccgctgccaaaagtgcttctaattcttcagcctgcgccttgacctggtctaaatcctttgcagaatttagccctactaagcggattaagaaaccaatgtcagacctaattctgtccaaaaattcttcgcaaattttctccttcctctgggaatcatttaaggacgaattgactatttcaactaacggtgtcaaacgcttaatgaattctgaaatggtctcattttcgcgttgtttacattgtgccagcgtccttttggttaattcacgtctttggggtgaatccattttacgtcgaagggcagttatcgcggtgtccaactttgcagtctcattttggcttaattgtttgaagagttggcgaggtgtgccaacgagtgacattttgaggcgagcgactttttcatcctcagtccaattccttcccaaagccccaacataatcactgaatctttccgaccattgatcaaacgcgacaactgattcatcaccaaatacctctaactgtccacttacaccagtcaacgtgttcaatgcccctaactctggctcatctccgtcttcacttgaattgcttgagttgttacttgtcccgtgctgtggattccgactcgtactgcgctcgcgtggggttgtgaaagccaatgaattccttgccgtagggttgatatcggttaatgagttaagctgcgtttgcaatactgacaggtttgaattgacttggttggccatgtcatttaaggctttggtgttggcacatgcccgtcggttaatatttcgtaggcacctgttaacagcctcttcaaagtttttcaattcgacttgagcacgttccatatcaggaactctgactgaagttttcccagcccaaaaatttttatcaataaccgagatattcattccatcatccatatcttgacagaaggcccaagagccgacgcaattcaaacccgaatattcagtaatgtaaaggagcgaaagcgtgaaatatgtcaaggaatattgaaatttggttcaggtttttatgagctaaataaaatttaattgaatagtgaccgttaagttagttggcaattaaaataatttggattaggcaataagtgagctatttcgtagaaagaaatgtttggataaatgttttccgagaatgagtgctcttatcgaaaaggggagaatgaatggttatgtttattgatgatcatctccttataaattacagtacttctacaatatttaattcccgatcagtcggagcgattgtgaaaattgttgacagcggcgcagtgtctcatgactcgtattaatcacaattctcggccgatggtctcttattctcaagcggccagcagtaatgcgcttccggtgaatcggcgagagcgctgagaaagtggagagagagagaaaaaaaaaattctttcgccggggcaaatttcgccaaaaacaaaaataatttgtgtaattagggctaagacttttatacagaaagagtttaaaaatcttggccctcaaatatctgccaaacaaaactaataggtctgcgaaaatcaacaatggccttcagttgatggctcgaatggcccgcccttaaatgttcgtcattaatttggcaatatgagcgagtggcggcatttgataaaaaaaaaaataataatttgggctgcaatttggcttttcaaaaatgttttggccattcaaatatggaccggtccttgacaagactcccgaaggagcggtgcgcacctcattccattctctttttctccacgcgtatctccatctcattctccgggagggatggactgccagcggcgtgccagcaaaccatccggtgctaccagtgaaggtgctgatgtccatgcccagttgacgaacggaatgagaggaaaggaggggacatcgtattcgggggaaagggatgaacgagccaatgatccgggccctggattaatggcctccccgaattgggatccccgggtcgcgcgactgattagatgcgtatggagaaatgccaagaaggagtaaaacagatatcatttattagccgataaataagttgaaaatcccatcgcaaaaagcccatctcgctctatcgctcttgactctttagcccccccccttgactgactgccgcgagaacggggagaacgggaaaaggaagcgaaaggggcggggaaaaagacaacaaagtgatcgatgatcgcttataatcatattccgtctctgtgcctcacaattttttaattgttgatagaatttaacaatcttgatatcattcgaaagctcttcacaggttctattagcctataaataattacagagaatatcgaactgtaaaaaaagacggagataaaaaacttcgaaaattctgcctttttatggatttcaagcgacaactttttggtgagctgcttaatcacttggaatagattagatatatcttccaaatatttaaagctttcgaatgataccatatttgataaagttggtgaacaaaggaaaaagttatagctttttgaacatttctgaaacggagttgtccagacggagttgacccctaccgtgccattggggtgttgctgattgtgagtctgtctctttgaaggcaattgtccttcaaaaacaaatgcgaaatgaaactgttgttatccaaatggctcgaacaacacactgacaacgagaaggtcatccagcaaacggtgagacaaaacacaaaatgggaaaaagggggaagaaaaatcgcaaaatgcgaggaggtaaggggggggggggggaaatgtgtgcaaagcaattggggacaaaaaggtgataatgtacttatttaataactattttggttttttatttcgcaatttttcgtacataaatttcccagcctcagtgatgatgttgcaaatggaataataattttaagtaattattttttaattctaaagccgagacaattagacggaatttaaatgcgtagaattatgcagaggagtcgaaattgggcctggaatttattggcttaattttaatttgaagacgcaacaacaaaatttttcggccgatcaattggacaaattggaacgcaaatttgccataacgaaagtcgcaaatgcttctgagtgtgcacaattggccgtggaaactgggcttacggagaaacaagttgaagtagggtttaataaggaaaaatctataatttaaaataataataataattattaaattaattttaggaatggtttgacagtcggcgcctttcactgtggcaagcattcataacgaaattcgtatgtgtaaattgcagaattttggaaataaaaatatattttatagttttcaaattgaagacaaattcttttaatttaaaaacagacaaattttgtgagtcgtttcggcgccagcccaagtttttggactatcacttctcattgccaaaatcaaatgcaacaaattggtcccaacgccccccccgcccttcagagcacgacaaatatttcaacaaaaatttttaaaaattgactagagcaatcgaacgctaacggacgacctaatggaaaaaaatccccgaaggagagaatttaattaaatccattccttcgggggaccgtgccgggtgccgcggggtaagcagtgctggttcgtttcatcacggcaccgaactttttggctagtcagcaatcgttgcttaacttgccagatcggacgggtgcgcaaagtccactgttccaagcaccccaccaaaagcaaccctggaagaccaaaatataaggaaaaattttttaaaaaattttttct

SEQ ID NO: 527 - DNA, 9008 bp, Heterodera glycines
aaccagccgatgaaggagtctgtcagcgctgctcttttgacccacaccgtcgatgagccttgctacatccagcccattgacgacggctcagttcgacaacgtgcatcgattgctgtggacaacgacgactctgacgacgacgaggacgatgatgatttgccgcttcgtctctgcttcttcgatgccgagacgtcccaggacacgccattgcagctgaacaaccgcaccgtccagaagcacgtgccgctgcttatcgtagccgaagtcatctgcgaacgttgtctgcaggctggcatcagcgtcaacgatggtcttggaagacgggctcctggctgcgtctgcatgacaggaatggtgaggggtcaactgtttcgccagtggtcttcgccaccctttgccaatgcaccgggagacaacagcgcttcgccagttggagcacccgccttcaatcagcgccgcttcttcttccattcgttcgacaacgacggcaacgacccagtggaccaatttttggattttttgctgcaccatggtccaaagaaggcacacaccgtgtgcatcgctcacaacggtggaaagtacgatttccatctcgtacttgaggcactacaccgccgaaatcgtccacccaagcatctgtgcaccacgggattgaagatctactcaatgcgtctgtccgggcgtcaccaacggcgagtcacattcaaagactcaatcaattacttcttttgtgccttggacgcgttggtgaagagcttcgatgtgcctgaccatctggccacattgaagccattcttcccttatctctacattcgacgacaacatctgtcgcagcgcctcatcaatcttccggctcaagagttttacgcaccggatacgatgaaggccgagaaacgggcccaatttctccgttggcacgccgaaaacaacggcaatggattccaactacgcgagcagctcatcatgtactgcgtcaacgacgtggccattttgagggagtcggtcatccgattccgccaactcattgccgacaacacgcaaggcctcgacccattcctccatgcgtcgacagcagctggccttgcgcttgccacttttcgccgctgtttcctgcccgccaatcgtctagtccactcacccgagggcggctacttgcgcgggcgacgtgcttcggcagaatcgcagcgctacatccgcttcttcgagctggagcacccggaggcgcaagtgcagtgcgccagctggtccgttggtgaagcgcacatcgaagacagtggctaccgagtggacgggctttggcgacgggatgcgcctctccgtcccctggccattgaatggctcgggtgctattatcacggtaattaattttttcgtttccaaaatatcttaaaattgaggctgtcgtgtgtgctttcccgaccggcagcaacaattggcggcggggcgaacagcggaagatttgtacgaacggacggagcggcgcctctttgagctggagcacgaccacggctgcgatttgcacgtggtgtgggcctgtcagtgggcggagcggctccgccacgatccgaacctgaagcgccgttacgatgctgtgttcgtcccttgcccgctggacccgcgcaacgacgcgttgaggggagggcgcactgaaccgttcaagctgcaccacgtgtgcagtgacgacgaggagataatgtgcatcgacattgtcagcctctacccatacgtcatggtaggtttttcttttaaacattcgcatattcatgatgaataccagaaagccaatcgcttccctgtgggcaacccacgggtcctgacgcgcgaggtgctgctgcgtccgccaacggtaccgctcccgtggaatgcaccggaaaacaacatcttccgggggctgctgctcgcccgggtgctcgctccacgcaacatccgggtgccgttgctcggctaccgcacaaaggacgggcgattcaccttccctttgtgcgcgtggtgtgccgaccgtcggcagcagcggccgtgccgacatgacgacgacaagcgctcgtgggtgaccgcctacacgcacgtcgagctcaacaaagcgctccagcttggctatgtggtcaccgatctgtttgaggtaaagtcactcattaaaaaattttgtgtacgaaaacacaaattaggtctgggactacgaagagtgggacggtacgctgttcagcagctacgtcaacaccttcgtcgggctcaaagtgcaggcgacgggctggccagaaggatgtgtgacggatgagcagcaaaaagcatttgtagacgattttgagcggacggaaggcatccgcctggactcgaccaaaatggagttcaaccccggcctgcgcctcatcgccaaaacattggccaactcgttgtggtaaatattttagggggtgaaaatttaaaaaaaaatgacatccacagggggaagctagcgcagcgcgtgggccagacggagattcgctacacacggactccggctgaattccacgcgctcctcgacgacccaacactggacaagttggactttgtccacgtgtcagaacacatggaccgctgcgtcgtgcggtagcgaccggaattcgccaaagccccgctgaccaactgccttccggtcgctgcgtttgtcacctcatacggccggcttcatctttacgactacatggagcaggtgtcagccatcgtcggtgcggagctgctctactgtggtatgtttattttgtcacgaatggtttttttggacagcccttttgtttttagacaccgactccatctactacgtcagcaagatgggtggtccgtgtgtagcagagggcgaggctctggggcagatgaagcgcgaacacaccgaccgacggatcgtcgagttcgttgcgggtggccccaagaactacggcatccgccacactgcgcgggacggcaccgacgagcgcgccaacctcaaaatccgcagcttccgcctgtcctatactgcgcagcagctgctcacttttgaggcaatgaagaacctgacgctggccacgtacaacattgacggaccaatgtgagttttgcaattaagcattaattttgtaaataaattttaaaaaaatttagcgatgatgccttggacaatgacgacctttacgtgtacgggggcggcgaacatcgtgccatccgcgtcaacttcccgcaaattgaccgcaatgtgtacgccgacctctacacgcaggaagcccacaaagactacaggcccttctacgccaaggggcgcgttcggcctgggatgcagacgcgcccctttggctatctggaggatgatggacagccgaacgaaggacaacggacgcatcgaagaaagagaaatttagtagagcaagatcccacacagcccggccactctgggtggttctgatgttgtgatttttttgttagtttactattttgtttatttaaatttgtacaaatgaaaataaattatttacgaaaatactttggtataatattagacaaattggtaaatgactggtgcaaaatatcaagagacttggccccagtgacaatgaccttccccgaaatataaactaggcacgtgactccattcaacaatttacaacgaagggctgggaaaatggtagggtcataaataccacccagggtgttttggagtcgctctacactgattcgctgggcaaaggtttgaacaccgacaatgttgaccacgcgcagctggtggatgcacagtgtgatgctctgtgtgtgttggatgcgccgaaaaacgcgtgccgccattttatttgcactgcttgggtggggcactccggtgaggaccacacgcgccgattggaagaccagcgcagccacagttttgcccattgttgtacggatgcgcatgatgatagcgtgaaagcgcctggggttatactccgtgtttgagccacgctgcgcaattgccaagaattgctctcgagttaagggatgaacatttattttaaaaacaacagtacaattggaaattgaatacatctacaaaacaatggacaaaatttcaagagggaaaaaagttttgtgatctccgcctccaaattcaacaacgcacggcaaattagggtggcgcaagcggatgccgtgttttatgtagtagtgcatcctgacctttaaattgcttggtaccgacaaacaaaacaaattttaaacaaccgttatgccgaggtagcctcggtaagctggggcggagtgggtgtccaggatggacaggtcattacaacgcactggaaaattgcgcacggacgggcgcaggtgggcagtgcgcagttggacggagcgcaaatgctccacaatgtcccggcgtttctctaggcttttgaaaagcacatgcagctcgtgggcactgcatttgaaccgcttgcagagatggtccacgagcgggacggggcgacggcgttcagcgcaagcacatttttttggagtgcctaatttaaaatttaaatatacgtttaaaacaaaagtaacttgttgctggcgtctcctcaccaattggagcgagcggctcgcgcttcatctcctcgtcaatcaggctgatccaactgggatcatccgcctcctcctcttgctttttcgttggctctttgttctctttgttggcgtcctctaaatccatttcgggataagcgttgtttatccaatcggtagcaagaattaaatccattaaaatctataaaataaaaaaaaaaactataaataaaaagaaaattacataaaaaaagtaaaatggacgccttccaacaatttaaaagggaggatgtgcaatttcgtcatccattcacaatgattgtgtctgggagcacaggaagtgggaagtcagagtggataatgcgtctgttgcgaaatgtggacaaaatgatctctacccctgttgaacgcgttatttatagctatggtgagttgaacacaaatgtgatgaatctgcagcgcgccggcaaagttggcaatgtgccagtcactgtacacagcggcgtcccacgcgcggaacaagtgcgggagtgtgccaaaaaagaaaaaaccttgctggtgctggatgatttggtggtgggtatgagtcaacaatatttggacgcactcttcacccgtggctcacacaattggggcgtcagtgtcattttggtaactcagcacctgttcaacaaagagctgcgtgtggcgcgcactaattcacactatttagtattaatgcgtaatcctgcgggggcgttgcagatacgcaccatcgccacccacctcttcccgtcaaggactgcccattttattgaggcctaccgggacgcatgcgcaaaaaattttggataccttctcgtggacatgcacccagagagtccggaagagatccgccttagaacaaatatatatgaacaaaaacaaattgtttacctaccaaaatgaaagggtcacaaataataacaataaataaatactttttggagacattgtgtaatgccaaaaaggcgaatgcccttattcgagatgcatccgatgagcaacttttgtgccttgtcgaaatctgcctaaacattctaaagggccgagtccctttgcgtccccggcatttgaataagctgaaagctcatgcacaggtgcttcgtcgtctcgcccgcacacgctgctcgcgctctgccaaaaaggttttgctacaacacggagatggcctcccagctattgtggggctcattgcgtcaattgctctcccgcttattgctgatgtcatagaaaaatataaatagtttccaaaaaaattaaaaacaagaaaaaatgcagcatacaaagcgctatttgctcgtccccgaagagatttatcagagtttggcagcaccgccaccgtcagacggtacaccaattgggctggtccgtacccgaattaaacaaataaaaaatgatgacgccataaatgaggcggaaagggcagtcaaatatgagcaggaagttaagcgtctcaacaagctcacaaaggacgaagatgaacgtcccgtgggtgttaaattagaaaatttgagtgatgtggttgacgccatgccaaaaccagtcaacgttacaaggccaattgttgtttctacgcgacgccatctcaaggttggacgtgcgcgaaaagaaaatgttgaacaattagaagatactgatgatgatgatgattatcaaaacccacggtcgtcaagttcaaataaacgacaacccacacaaacggaaatcttaaaattaatttataaaaacgcccaatctctaggggtgtcggaggaagggcaagttttgagagccggtgggcgtccatttataaccagcagtgttgatgacattgttagtcacctgtttaacaaggacaagcgtggccaaaataaagagccaacggcattcaaagaatttgttgaaagggcaaggcagaatccgctcttgagtaggcatttatttcccgaaggccaatccggtaaaggaaattataaaaacaccccaattaagtttaagccatcattatggatttgaaaaagcttcgtttgctcgagtttttgtacaaggacctaagttcacctgtcgcattcacgagcgttgaaccgctgctgagagaggcgcggaaaagccaaccaaaaattaatcggactgatgtccaaaattatttaaccagccaacgtacatacacactgcatcgtcaggccaagcggcgctaccgccgattgccaacattggcacccggcttgcatactgaatggcaggccgatttggctatatttgaccgatttgctaaacaaaatcatggcttcaagtacttgttagtctgtattgatacccttagtcgacaggtgtttgccgagcccgtaaagaccaagacgagcgctaacatgatcattgcctttgatcgtatattcaaaagatcaaaatatatcccgtggaaggtgttaacagatcagggaaaggaattcactgcccgcgcagtacagcagttcttccgcacaaaagacgttgaacacttttgtatgctcacttctccccaatttcatgccggaatggcagaacgtgcgaatcgtagcatcaaagagcgcctttaccgctactttacggagcgtaacacgtacaagtggattgatgttgtgcaagacattgttcgtgcaattaaccactcgccaaattcgagcattggaatgcgcccagcagacgtgaactttaaaaacgcagaagcgttgagacaaaaattacataatgcagctgaaaatgttgtacgacgccagccaagataccgtgtgggagatcgcgtgcgcattgaaaagtacaagcacgtgttccaaaagggctacctcccacgcttcaccaatgaactattcacggtggtagaagtacacacagagcgttcgccagttgtttatcggttgcgtgatgaccataatgaaataattagtggttggttttacgcaaatgatttatgcaaatcactagaagacaagcagcaaaatatgtatgaaattgaaaagattttgaagaaaaagaaacagaacggggtggattatgcatttgtgaaatggaaagggtacagcgctcgctccaatagttggattcccgcaaattcaattagcgagaaaaatatataaaaagcattatttaataaaatttataaaaaaaaatgccttcaaattctttttatgttgttcttccgtcaaacaccaatattgaaggaaataggacaaattctttccgagtgcgtttaccgcgcaaattgcaattcaattcggaatgggaggtgggtcttgccgttattgtatacccccactcttggccttccataggcaccgtggagcaacaatttgttcagattgagtggcagacggggaatacggtacgtatcgaagttccaccatcaaatgtcacaaacccccatgagcttagcaaaaatttatataggctcctgggtgagggaagtgatccgttggcaaaaaaggtgcgatcaacacagaattctttcatgcttttgataaacaaggctcgacgatgggccagagaagaatacattaagcgaaagactaaagaaaaacggagcgtccgtgacgaagagctgctcctacaggccatgttgacagatactggaacattggttgatctcaacagcgtagcccaaggctttctgacacgcgaaaagagtgctgcaacgagtaatgtaccgttgagaatgccagctgatgataccaattcgtaccaagaaaaattggatgagtacttttcgaaattaagtgacaaaaatttgaacattcttgatgaattgggcatgacaaaattgaacgccgaaatcaaaaatttaacagaagaggaacgcgtgatccttgaagccacaaaggaaatgggaacggaagcatggattcaggcgtaccgtgagatacgtcttgtttgccaatttaactatgacgtccatagaaatcgttttgtcctgaacaccgacccacggtacgttaaaaaggtcaaagtctcgcctcaactcgcttacattctcggtttcaacaacacggagtttattcaatctgaaaacgaggcaagattcatgccggacatgagcggtggtgtgtcatcattccacgtttacacgccggatcttattgaaccaatgatgattggagatgtcacggccccagtgttgcgcatagtgaccatacgcggaaaccccgaccaagtagttgaagaacaattttttgccatacagtatcataaacttttattaaaggagttttctgaaattctgattgagatacgtaccaatagcggcatcttgatgccattccaatacggaacatgtacattaacattacactttagaaaaatgtcctatttttaaatgatgaacacgttggaaattaacaaaacattgacaagaaacaacgtgactcgccactactatattggctgttttgcagcagatcaaatacccgccggtgcaattgtcaaattacccgcactgtatggtggttaatcttgaccccagcacatca

SEQ ID NO: 528 - DNA, 2010 bp, Heterodera glycines
aggcgaaaacaatgttttttacaaattgaaggcacacaaaaataatctgatagtgaaagtgaattttgtaaaaataaacagttgtgttcgatggaaatttttcaaggcttgaaccgcaaaaatcgagattttactcgagtcggtcgagagatcaatactatcgaacctaaatgggaaaaccgaaaataaatgcaaaataaaaaaaattaagaaaattaaatgttacaatttttttgtcttttatgaaataatttttttaaagcatccaatacataatgccgataagcaagttgtattcttaaagtacgtactttgaaaaaaagtacgaatccgagccttccttttcattgatctcatttttttggagttagtgcgtttcgtaaaaaccgccataaaatataatacagtttaaaatgcgagtaaaattttaattataaaattattttgttatttattatgatttgttctagatatgtatatattaatcctgcatcttttcacttaaaaggtgaggggaatgtccggcgtgccgaaaagcggtgccggggaaaattttgtaatttttaataccactttttttaatcgatagaaagcaatagcaacaaataattggcaaacagagaatatttacatattttttcttgtgagaaaaatgtaatgagacatttgcggacagacatattttttcatgaatttttaataaaaaattgtgtttacaatttactaatttatcgctagtttaattaatttttttataatgtaagaaagtataaaggaaaatatttttagaaaaaaatggggatcattggaattgtataattaatttcacttataaaattacaacatatttatttattcaacataatgaaacttttttctttttttatctcggcttggattatgccccaaaatttgcctggcgaccttttgtccagcgcccaattgtctcccatgagcatgaccaactgctgaccattgtccattattttgcttgttgcatttctccccatttcgcggcttcgctcgtcgccacttttccaatcaataggtccattcatatgttctctctgccgatgtgtgttaccttttaatggcttttttcggtgccaacggggatttttatttttatttgtgttttattgaaaatgttgatttggagatttttataggtctttggaatttttcaggcttttggaaacaaatgagatttcctttttctgtttccaaaatttgttaacaatcgcagaaaatttgaaaaatttaacccgagggcacttaacggcaccgccgaaccaaaaattcctttgtttttcaaaatttgagttaaaaagctcaaaaattcgtcattacatttgtaaattatctgtgggatgaggaatttagcaccaaaagccataacgcagttttccaaagaattaattttaaaaattcccaaatttcaattaaagaggtcattttgctttatagattccctcccatcaatccacttcattttttggagtcaaaattttgctggacacatttcatttttggtgatcccacaaattctttatggccactcatttttcaaatctatccaatttctttactttgcttattttatttgtaaaattatttttaggtataatttataaaatttaaatttagtttaaaacaaaaaaaaactgatcactgatttgtgtgtcctgccaaaaattgtgacgcaaaagacccaattccgaccagcagcagaggcatttttaccatctttttgaaaggttttttaaagaatattttttaattaagggagtttaaaaagaaaactataaacttttttgtcatttttaatgataaaaggataatatcacatgtaaaataatttcaatttctcattatgtgcccctttaaatgagttcacaattatttaattgagcataatatttattttggttattgcgcatgtttaaaaattttaaagttttttgttttttaaaataaaaacaaatcggcaaaacaaaataaacttatttt

SEQ ID NO: 529 - DNA, 874 bp, Heterodera glycines
attttcaaaaaaaagaattttaaaaaaccggaataaaattttttaatttattttttcatttaataataaattttaaaatgctgatttttgtcggccaaatgctgatttggaaattttcagttgggagccccataatgagctcagtctgttcaagacttaagatttataagtctaaatagaattagacgggtctcttgatattttcgggcacaaataagccgggtattcaggtctaagtccaaacagaaaactagtacacgtctaaccttacgtttaaacagctgtaagaattgactaaatagactaaataataagatcatcaggtttcaattcttctatttttttaattttcaagaaaatataaatttttaagcacaaacttgttaaaagttattaaatttaattagtcttatgacttttaatgtcaagctcgccataatggtcttttctcagtttttgggtcattttaaatagtatccaccattggtgtgacgtgataagaatgaagcagcccactaagattttttttgtctttattttaaattaacacactgtatatcgagaaaaaaacattattattctttaaggtacttttttttggaaataaaatggctgatccaatcgactcgaaatattttgggtttgtgccagccactgaagagcagcagggtaatggggaaaatcacaataaaaagtaaatgcaattaaaataaatgattgaattcaagaacatacattaaaaaggggtaatatgccaaagggtacaaaatgagttttatgcaaaaaattctaaaagaaaggcagtttattgctattttcaaaatttacgggttaaagatctgtaataaaatgaatagtttttcaaaaaattcca

SEQ ID NO: 530 - DNA, 4387 bp, Heterodera glycines
agaaatctaaatttaagcaaacattaaaaactgagtctcatttaaatgggaatttgccaaacaggcaattctgctgatgtgttctgtttgggccaatttgtgcccagtgccgccgtgctgtcatcatcatcaatcggtgctgctgctggtgatcgtcagcagaaaggacggcagcagcagcagaacacggcgatggtgggccaatttataaaagaaacaaaaaatggttgccaagaaaattgaaatatttaaaaaaatgaaaaatatatttttgcataagaaatatttcttaaaataaaaaaaaataaaaaattttaatcattgaaattattatgtttaaaatgaatattttatttttagagcccggaattttgaaggtttcaggctcgtccgtgggcttagacaattgaccaggctcgggctgccctgtcaaaaaagccaatttaaacgggcgtcccgggtccggtcccaattttagccgggcccccgccggacttgggattttttcaagttaacatgcggggaccaaagaccaacaaaaaaaacttcattaatccgaattttcttttaatagtaatttttcaaattttttctgataggtggaaggttcgacaccgcaaagtttttcaatttttgcaggccaatgttgtcaagacggaacagcagcagcagcataatgaagaggatgggcaagtcgaatatggtaagagaaaaaaagtacattcatttattgtcatttcaaatatacgaattatgttggttttttaaatttttaattttgaaaaaacttaaatgcgcttaaatctaaagtttttgaatttttcataaaatttctccgactctattcatcttgtaaaatttaggaaaaaatattagattctaaaataaaataaattaatttgattttttttgattataagcaaaaattataatggtttttttggaagaaaaagtgttcaatatgacgggtttaaaaccttccaaaatactgaatgaaaacctacaataaaaatttaaataaattaaaaaaatatatattttttagaccaattgactccaacaattccatcactttttggagaagatactaaccgattggatgtgcgacaacagcagcaaatgtgccatgttgatcagctgatgaaaacatgcgaatccattggtgggcacagatttatgcacaactaattaatgatgctaaaaagacaacaaacaattattctgtttttaactccgatgtaataggattttcgagatttctgtcccagggatgtacttttttttgaatttagtttaaattcaaaaagaggaatttatgatttttagaatttcttcaaatcattgaagacaggcacaaaaatgccgaaaggcaataatttaatgctttgcccggttcagttggccaattaactcagtttcaaaatgatcagaatgctattttgggacgaatttcccaattggagacgcagcaacagcaaatgcgtgaagcatttatttttatattcgaaaattttaaatgaatctttctgagaaattttaaatgttccttaaaaattcctcgattatttaatgattgtcttttttaaatttgacagttggcacagcaaacaacgaaagagcccaccaaagtaggcaatgccaaacaacagaaaaaagcgcaggtattaaattttgaaaatttatttgaataaatgtttttatcataatattatggcatttatgtgtaccaatataatttattttgaaaaattttatcatataattacaaatattcaacaaacaatttctaatttaataaaagcagacaaatatacgtattagagttagttcaaacatttttttacacaaaagatagtattgttaatttaaaaattttaaaaatattttcgaaaatttctcattccactttttctcgtgttcatatgtttttaggcatcacattttctcttaccactgccgataatgaaacattttaactgctgggattacgaggcccgttcttttgattatccctactacggtagttatgacctcgaacttattgacgctaaaaatctgacgatctgttataccagaagaaaatataacaatggtatatcgaatgattatatcattaaactgattaattaaaaatattttttcctataaaagattggcgaactgtctttgcggaacattccattcaaagctccgctaattccaatggccttttctacttcgaaattgctttcgaaaaattacaatcgtagggaaaatttatatgtaaaaacaatttagttattgaatcaatttattttatattgtttattaacagggctgggatttatatttttataagtatatgcttttttgcaaaatttacgagtgaatcacgaaaacatattccatagttcaagttgccaaatttttttgtgttaagaacaatgaattaaaacataaaaaaagaaggattctctcaaagcagaattttttcatttttttataaagttatgaaatccaagaaaattaacttttttacaaaataattatttgacgaagcttttcggaaatttattataaaattttttgtatgaataataaatggcagaaaggttgatgctcaattgaaacccttgattaaaattttcatatcatttgtcttaagtggtgccgtcgtcggatttgccgtcaaactaaagccatttttatcggttgtgaaccgctggggcacattggcgtgccaaagcaatggcactttttttgtgaatggtttccagcaacaacatataaatgcgacacattcattttcccgtggcgatataatcggtctcggcgtttatttagaaactcgtgaagtttttctcacaaaaaatggacaccgtttgggtatatttaaatttaaataaataataataaaattgaaaaatgtacaactgtttttgaaatgattaatcaaaattactatacatttaaaaagagatgaagcgttcggaccattgattgaatttttgaattatttctgattttctcaattttttgaccaattgatcaaatcacttttcggctctctaataaaaaactaaataaataaaacataattgtttaatttacagttaccgccaatatgttcatttcatttccaactgatcaccggcagcagttgttcccattcgtttctttgctttcgcctggtgatcaaattgatgcaaattttggaccaaactttctctttgcgaacacataaataaggaagagacgaagaacgattggacaaatttattatactttttttatgattttcaaatattatttcatttttctgctttttttgtttcatggatacaaaggaattccgcccttcgatacaaaaattacaaatttatattcgcgataaaatgacgccgaattcctcattgtttgatcagttgggcgctcacatttgggcgctcaggtttgggcgcatgcatgtttttccactataaattttttctttgtgaccaaatccatcaatcttggtattacccgaatgcttaacctgttgaaaaagttatttctaagctattgattcgcagtatgaaaacccgaaattgtagaaagaaatgctggtgcccaaacgtgagtgagaaaaataaaaataaaagtttggcacaatgccttaaaagcaacaaaaaatctttaataaacaaaagtgctagcaaaaagaatgaaagaaatttgagaaaagtttaaaattgcttgattttgaaatttgtaacggaccttctctgatataaatgagattaatttagcttctcatttttaattttaactctaaaatattttatttctaaaatttatttattttttccgcagtgctcgaaattactaggatgtcccaaaagttccttcaggttttttatagcaatgtcggccacccctgtaaacaactaaatgttgagtataaaaaaatagcgaaaggaaaaattgtatttctgattattttgtatttcgggtcgattttaattatctttttaattgtatttcttttttttttgtctttgctgttgtatttctgattattttatggttttcatgtatttttaatttctgataataattctttgcttttctggtcgtgtttctgatcgtttttatttgtatttgttgttgaatttcttatcattttttttgtctttgcagttgtatttctgattattttgtatttcgggtcgattttatttatctttttaattgtatttcctatttttttgtcgttgctgttgtatttctgattattttattgtattaatgtatttttaatttctgataataattctttgcttttctggtcgtgtttctgatcgtttttatttgtatttgttgttaaatttcttatcattttttttgactttccagtcgtatttctgat

SEQ ID NO: 531 - DNA, 714 bp, Heterodera glycines
aaataatcagaaatacaactgcaaagacaaagaaaatgataagaaattcaacaacaaatacaaataaaacgatcagaaacacgaccagaaaagcaaagaattattatcagaaattaaaaatacatgaaaaccataaaataatcagaaatacaacagcaacgacaaaaaagataagaaatacaattacaaagataaataaaatcgacccgaaatacaaaataatcagaaatagaactgcaaagacaaaagaaaatgataagaaattcaacaacaaatacaaataaaacgatcagaaacacgaccagaaaagcaaagaattattatcagaaattaaaaatacatgaaaaccataaaataatcagaaatacaacagcaacgacaaaaaagataagaaatacaattacaaagataaataaaatcgacccgaaatacaaaataatcagaaatacaactgcaaagacaaagaaaatgataagaaattcaacaacaaatacaaataaaacgatcagaaacacgaccagaaaagcaaagaattattatcagaaattaaaaatacatgaaaaccataaaataatcagaaatacaacagcaaagacaaaaaaaaagaaatacaattaaaaagataaataaaatcgacccgaaatacaaaataatcagaaatacaaccacaaagacaaagaaaatgataagaaattcaacaacaaatacaaataa

SEQ ID NO: 532 - DNA, 4964 bp, Heterodera glycines
  unsure (1)..(4964): unsure at all n locations
ataatcagaaatacaacagcaacgacaaaaaagataagaaatacaattacaaagataaataaaacgatcagaaacacgaccagaaaagcaaagaattattatcagaaattaaaaatacatgaaaaccataaaataatcagaaatacaacagcaacgacaaaaaagataagaaatacaattacaaagataaataaaatcgacccgaaatacaaaataatcagaaatacaactgcaaagacaaagaaaatgataagaaattcaacaacaaatacaaataaaatgatcagaaacacgaccagaaaagcaaagaattattatcagaaattaaaaatacatgaaaaccataaaataatcagaaatacaacagcaaagacaaaaaaaaaaagaaatataattaaaaagataaataaaatcgacccgaaatacaaaataatcagaaatacaacagcaaagacaaaaaaaaagaaatacaattaaaaagataaataaaatcgacccgaaatacaaaataatcagaaatacaactgcaaagacaaagaaaatgataagaaattcaacaacaaatacaaataaanaatgcctattaatgcctattttggcggcaacgtatgaatgagtaaaccgagttttctaggtggccgaaatggtggcacgcaaaaattttgaaaacaaaacgatgaacagatcattaaactcggggcttaaccctaataaaaactggccagttcttttgacctcttttaaattattaatcaactgaaaaattttaaaaaattattaaatcggtatgggttctgggcctcaataactttctgtcatgagttcgatgccggttgacggtttcttttttaatttatttttctaaccaaaaattcgtaaatattatttaaaaaaatctctcaaattcgcaaaaatctatcatttttttggcaaaatctattaacagatccatccaaattttcaaaaattttcccggcggcgcctttcggcaccaccggaccctttctccctaaaagtctttagaaaaagagcgccgcgaaaaaagatgttttgtgatcactacccgatcggggtccccgacccatctgatttcgttagccagtaagagtgagtcaaagttggcctttaaaccagggctttcatttgttttataagacgaaaattgctctgatttcttaaatatacagtcagtcaaaaaaatattggagcaaatttttttttgaaaaatccagttttcttttctcaaaaccccctctttgttgacgtgaaaatcggtcatgacccaaacgaccccctccctatttagtagaacaaaaagtaatggagcaaaaaatatttatgcactaaaaactcaatttttttattgagataaaattctgaaaaaaattcctgctaggctaacttttgatgctgatcagaaaagcttttgaccaagatgatcggaggaggagcaaaatgaggaccaagaaatcaaattgctgagagaattgggggagaaagtgggccaaggccgggcaaaatttggggaccgggaaaggcacgccgaactcggcaagaagttcagtctgttgaagaagtcgactagcaacgacggagcagcccatgggatggtcaacttttgtgttatctatcgagcatttctcgtgttcggctcacaatcagtggtcattcttttgttcatcagggtaattaattaattattaattgagcaattaatttttgattgttggcactttttcactctccagggccttttggaaggtcatttcaatgcaaaaacaatggaagaatatttggaaaatggcaagcaaattgagaccaattcgtacttgttgaccactcatttgtcacttcgaaagatgaccattcaattgctgacagtgggagaacattttggatacaaattttaatgtgaagaatcaagaaaatgatgaaaactcataattgttggctgttaaatttaatatgagttatctccggattttttttactgtaacttttttatttgtcaaccaaatcagcattttgttggtatcattaaatcgggacttctagcttttcatttttaaaaaagcctaattgattgatgcacaaatatcgcattaagcaacgctttacttcatttataatacaaaatatgcacacgaaatctgtgacaaaaatcagtcatttgatgggaaatttacattttatgaaaagataatgatcagataattccatccgagtggccattgattgtgtttagggctcatctgctgttgatccactgtttgcgcattgcttctgttctcagcccggtctgtttctcgacatggacgcagcacaatccgaaggcaacggtctgaaaacaaagggacagaaattgtaagagtacccccgaatataaaaattggttgacaactcgtccatacccaatttcgtcatctgcaaagccaatggtcaccaaattcggatgaggttcgttgttcaagcgcgtcatacgaaaccaggacaccacgtcagcttcactgaactccgctggacagcgcacaatcttcacgaaggacaccacgccaccacctcgtttcgggtgcacattggtcaacatcgtcagcctctcctccgtcagcatgttcaccatttgttcccttctggtgtagatgaattcgaacgaagtgaacaccatgtagttgaccgggactgacgccgtattgaaagactgaaaagcggaaatgaatgtgatcagcagaacaatgattaaaagggcacagagaaaaaacgaaatccgtccgtccgtcgatcaatcgatcgatcatcccacacacccaccatcatcaattcgttgacgaattggtcccatcggttgttccatttgagcaatttgtacaccaacggacgacggtcgacgcgcgtcgtgtgcagccacatgtacaagtcacggctcgatgtttcaggagcagcagaattgtcaacggtaggacgttcaggcaaaactgggctgacgatttcgacaaggtttgggcagtcgaagaggaaggtcggcgaaatgtgtttgcgcatcaaggccagttgcttccgcttcacgttgaccaacgtgccgagcccgttcttcagcaagggccaaatgtgacgtgccacggcttgccaagcgcgaaattctgttatcggaatggtgaacttcagcgagatgtacgtgttgaagaggcgccgaaatcgttgcaggaaattgatcacttctgcgtccaaatacctgcaaaatggggaagaacaaaatgcaattggaaattcaaaaattgaatggcgaccaaatgttgaatgtgccgttgaatccgatgacactgtccggcaacggtgaggtggccaatggcaacgagaagtaggagccgttgtttgccaagctcaacacttcggcgccagtccgtttcggcttccgctcactgatgtgaaactcctccaaacaccaccgcctctgctgcagctgcatgttcaccagggcggcgaagcgggcgttgaccagcgccaagtgccatccgacctcgccacgtccaatccacgccaatgtgtcgagccaaatttggtcgctgaaagtgccgccgctaaaacaaaacaaaataaattttcaaaaacaaaaaaaaattcccgcttttctcacatttggtccatgcgtttccttctgcaccacttttactgctgatgatgattttgttgatttgtggtgcccagtttcgtttggtagtcgatttgtgcacacttccgatggctcagctttcgttgagttgatttgatgatggcacggacagagaacagcagccgcaataatacgcaggaattaattaatgcctatttggaataaaatggccggaaaggatgaaccaacttccttttatactactcatcatttcaacatttgtaccaaatccatttttaccaaatcagagcacctcccctttatttgttgttatagaattgcctataaatagtggggaaattctcacacacgatgcttttacagagtgacaaataagtcttgcaccactttaaaatattcaaatatctcataaatatggatgcaacttttagtgacgaaaaattccaaaatagttactaaaatagtgacgaaaagtgccaaaaaagtgacaaaatagtgacataattttcagccaaaaataagttaaaaaaaaatttttttccttgcagttgcaactgaagtaaatttactttctaataattcttggcaaatattgacattttaaacagggctcggatctgttctgatttatcagaaatgttctgattttgggctattgttcttattttgttctgatttcctaaatcctcataatttagaaattttatgccataatgtcactattttacaagaaaatataaaatttgtggcaaaatttggtcatttttggacaaaaatctgttaaaaatcgcattaaaaataacaatattttcccggcggcgcctatcggctccgccggtccccctcccctcgcccattcaacaaaagttttttgggaaaatgcgccgcaaaaaattgttaaaatctgattttttgatcctaaatatactgaatttaaaatatgcttatttcctctcaaaattgttaaatttgataataggaggtgaaaaatataataagtgaaacaaaaatgtaaaaataacagatttgaagcaatttgcaaaatgttctgattttcgaccccaaaatctgattttttaggcccgatgttctgattttgaaaatttttagcaaatattgacattttttaaaccaaaaaattttaccaagaaaaaaatttggttgatgaatttttgagaattttctaaaaaatttttaatccgattcttaggggtgtatttttgaaaattttttaggtcgattcttaggggtgtattttttggttttattgcatttttgttaaggaattttccaaaaaaaaaggaaatagtgaaaaaataatgccaaaacgccaaaa

SEQ ID NO: 533 - DNA, 2274 bp, Heterodera glycines
cccccccccctccccccacattccccatttttttggaaaaagcacaccgcgaaaaaaactatttttgggattttcacctcaaaaaaacaagcagatattctgatcataaattaatcttaacaatttttagattggattttttaaatttaaaaattttttaaattaaaaaaaatttttgaaaattacggattacgtattacggattacgccaaattacggactttttggacctccgtaatgacggattacggatggccgtaactgaaaaaattgccgtaattacggatttgaaaatcagttacgtccagctctggtgccaacaaatggagaatgcaaagcagagaaaaaaaatacaaaatttttggcattttttgagggttaaaagccatttttggcagttttttaaggaatattatttcgcgatttttgggaaatttattaacaaaaatgcaataaaaacgaaaaatacaccccctatttgcggaatttttcaaaggattagcgacaaattttaaggaatttgtctctttttaaaaaggattttataaatcttgttccaattttcatgttttagtctatattttcatgaactcccagaccctttcttaagcaaatgcaaattttcaaagactcgcaacttttttttctggtgcttcaagatgcttaacatttacattgaaaaggtttctcctcaccaagagactttgaatgataccaagaatgttcaattgcttcaaataaaattttaagaatgttcattgccgtggtgcgggctcgaacctgcacagttttcgctttattatcttacaaaatccacttatccatacgcaaattttcttggtactgatgttaattttcctgacgctgtatagaaataaaaacaaaaaattaaaatgtaaatgatatgatcggattaataaatgaatcatattgacaaacatccctatccaactgcgttttagcaatgctaaacggaaaaaatcgggtgagtaattaattcacttcaaacgcacaaattggacggactaaattggttagggtttcattgctttcatttttcatatcattattatcatccacttttgaattttccccaatttaccaaaaatgtccagcctttccataaaatttgtcaactttttcctttttccattgaccattctgttggcacagtgttcgaattcgcctgacggtaaaaatttaagccctctcgagagggaacgggttggaattgtctttttttctaaacgaaattttaatttcaagtcttcaaaaaacagtcaaattttattccatgtgagatttctgaataaacattttacccctaaccagctataagctgctggaaggctttggtgccaagcttgaggctaaaattcataagcttccttcatctgctgatgttccaatgaatgcttctttgctggagctgcttgatcaattcgaaaccatcgaatttgatgggacagtgaaaggaaaagttcgctgtggttttgggctgaaccaatgcatgaagatggaatgcactctggatgcatacagtatcaacaacatggagtttaatgaaggttttgtggttggagactttttgacgcttacacaaaatccgcaaggttgtcgtttcacactggctttatttggtgccaagtcccatcacatatattaattatacagttaactcatgtttttaaaatagaaaatatatttacggaaactttaccagttgtcattaccatactaaaaaatgcaccaaagcaaattttgtgcaactaataattagttagttatcagtcaagccttttcaattagtttaattgctgctggcccataattaatttaacactaaaattctctattaaaatttatatatcacatattgttttttcatggaaaaccctaaattagccaccaaaattttgttgaaataagtatttctaattttttgaagttacaaatatggcatgcgcgtcaggaaggcttccacggtcattgtaaaagtttttgctgcaacggtgacttgtgcaacggtgcgatggttgggtggacggttggcaatcactttggcacctttgccctgattttggctgttggcattttgcatggtaaaagacaacattttaaattaaaaattaaaactactttcaatgttttccctttatttgcactttccgagagcaattccgactccagacttaaattttaggaccgtcgaaattacatccataaaattttaaaaatataattgattttaaatcagttttttacattttaaat

SEQ ID NO: 534 - DNA, 4808 bp, Heterodera glycines
ttgataggaaatatatatttctcataataaaagtacaatttttatttgtcccacgccattttctgggaaaactttttcgcgaaaagccgaaaaattttccatcggcctcttccaacggcaacagatgcgtttcaaacaattgacaatataattatgattgaagtcaaaaagcctctttagaaaatgcttaaaaaatttttgttataaatgttcacaaaatatttttttgttactgacaattcatttccattcaatttaaaagcgataaataatgtattgagatatgaacaaacatctagaaaaattatctcaacaatctgtcagaaacagtccaggaaaaactttgcgcgagaagccgaaaaattttacaactgcatcactgttcatttgatagggtcaatcaattcaaaaacataacttaatataaaatattgataaaaaaattattttccttcatctttagaaattgcccaaaaattgttgttgtaaatatactcaaatattcctaaaacaagctttatttttactgactatctttttccagaaggctataaaatgcaataaacaattcgcatgcttggatagaaaagaaatgggctaaaaatatttcatcacttagtcgtgaaccattacaagatttctatagcagggccatattggcaaaagaagcacacgtagagcaggctcgaaataagggcaaatgccgaaaattttaaaaattcttgttttattagacccactctgctttgactggccatatctcgccagggagtggcggtagaccctttgttgatacatttgaaagggtagagcgcgcctagctcattcgaatagcatcaaattggttgcatttgtcccgaaacaacccgcttatgacacgtctaaagaaaatccgttaaaatttgcattcacaaactccattttttcattggcaaacgtgtaaagcaaacccgaaattgataggaaatatatattgctcataataaaagtacaatttttatttgtcccacgccattttctgggaaaactttttcgcgaaaagccgaaaaatttccatcggcctcttccaacggcaacagatgcgtttcaaacaattgacaatataattatgattgaagtcaaaaagcctctttagaaaatgcttaaaaaaattttgttataaatgttcacaaaatattttttttgttactgacaattcatttccattcaatttaaaagcgataaataatgtattgagatatgaacaaacatctagaaaaattatctcaacaatctgtcagaaacagtccaggaaaaactttgcgcgagaagccgaaaaattttacaactgcatcactgttcatttgatagggtcaatcaattcaaaaacataacttaatataaaatattgataaaaaaattattttccttcatctttagaaattgcccaaaaattgttgttgtaaatatactcaaatattcctaaaacaagctttatttttactgactatctttttccagaaggctataaaatgcaataaacaattcgcatgcttggatagaaaagaaatgggctaaaaatatttcatcacttagtcgtgaaccattacaagatttctatagcagggccatattggcaaaagaagcacacgtagagcaggctcgaaataagggcaaatgccgaaaattttaaaaattcttgttttattagacccactctgctttgactggccatatctcgccagggagtggcggtagaccctttgttgatacatttgaaagggtagagcgcgcctagctcattcgaatagcatcaaattggtttgcatttgtcccgaaacaacccgcttatgacacgtcgaaagaaaatccgttaaaatttgcattcacaaaactccattttttcattggcaaacgtgtaaagcaaacccgaaattgataggaaatatatattgctcataataaaagtacaatttttatttgtcccacgccattttctgggaaaactttttcgcgaaaagccgaaaaattttccatcggcctcttccaacggcaacagatgcgtttcaaacaattgacaatataattatgattgaagtcaaaaagcctctttagaaaatgcttaaaaaatttttgttataaatgttcacaaaatattttttttgttactgacaattcatttccattcaatttaaaagcgataaataatgtattgagatatgaacaaacatctagaaaaattatctcaacaatctgtcagaaacagtccaggaaaaactttgcgcgagaagccgaaaaattttacaactgcatcactgttcatttgatagggtcaatcaattcaaaaacataacttaatataaaatattgataaaaaaattattttccttcatctttagaaattgcccaaaaattgttgttgtaaatatactcaaatattcctaaaacaagctttatttttactgactatctttttccagaaggctataaaatgcaataaacaattcgcatgcttggatagaaaagaaatgggctaaaaatatttcatcacttagtcgtgaaccattacaagatttctatagcagggccatattggcaaaagaagcacacgtagagcaggctcgaaataagggcaaatgccgaaaattttaaaaattcttgttttattagacccactctgctttgactggccatatctcgccagggagtggcggtagaccctttgttgatacatttgaaagggtagagcgcgcctagctcattcgaatagcatcaaattggtttgcatttgtcccgaaacaacccgcttatgacacgtcgaaagaaaatccgttaaaatttgcattcacaaaactccattttttcattggcaaacgtgtaaagcaaacccgaaattgataggaaatatatattgctcataataaaagtacaatttttatttgtcccacgccattttctgggaaaactttttcgcgaaaagccgaaaaattttccatcggcctcttccaacggcaacagatgcgtttcaaacaattgacaatataattatgattgaagtcaaaaagcctctttagaaaatgcttaaaaaatttttgttataaatgttcacaaaatattttttttgttactgacaattcatttccattcaatttaaaagcgataaataatgtattgagatatgaacaaacatctagaaaaattatctcaacaatctgtcagaaacagtccaggaaaaactttgcgcgagaagccgaaaaattttacaactgcatcactgttcatttgatagggtcaatcaattcaaaaacataacttaatataaaatattgataaaaaaattattttccttcatctttagaaattgctcaaaaattgttgttgtaaatatactcaaatattcctaaaacaagctttatttttactgactatctttttccagaaggctataaaatgcaataaacaattcgcatgcttggatagaaaagaaatgggctaaaaatatttcatcaattagtcgtgaaccattacaagatttctatagcagggccatattggcaaaagaagcacacgtagagcaggctcgaaataagggcaaatgccgaaaattttaaaaattcttgttttattagacccactctgctttgactggccatatctcgccagggagtggcggtagaccctttgttgatacatttgaaagggtagagcgcgcctagctcattcgaatagcatcaaattggtttgcatttgtcccgaaacaacccgcttatgacacgtcgaaagaaaatccgttaaaatttgcattcacaaaactccattttttcattggcaaacgtgtaaagcaaacccgaaattgataggaaatatatattgctcataataaaagtacaatttttatttgtcccacgccattttctgggaaaactttttcgcgaaaagccgaaaaattttccatcggcctcttccaacggcaacagatgcgtttcaaacaattgacaatataattatgattgaagtcaaaaagcctctttagaaaatgcttaaaaaatttttgttataaatgttcacaaaatatttttttgttactgacaattcatttccattcaatttaaaagcgataaataatgtattgagatatgaacaaacatctagaaaaattatctcaacaatctgtcagaaacagtccaggaaaaactttgcgcgagaagccgaaaaattttacaactgcatcactgttcatttgatagggtcaatcaattcaaaaacataacttaatataaaatattgataaaaaaattattttccttcatctttagaaattgcccaaaaattgttgttgtaaatatactcaaatattcctaaaacaagctttatttttattgactatctttttccagaaggctataaaatgcaataaacaattcgcatgcttggatagaaaagaaatgggctaaaaatatttcatcacttagtcgtgaaccattacaagatttctatagcagggccatattggcaaaagaagcacacgtagagcaggctcgaaataagagcaaatgccgaaaattttaaaaattcttgttttattagacccactctgctttgactggccatatctcgccagggagtggcggtagaccctttgttgatacatttgaaagggtagagcgcgcctagctcattcgaatagcatcaaattggtttgcatttgtcccgaaacaacccgcttatgacacgtctaaagaaaatccgttaaaatttgcattcacaaactccattttgtcattggcaaacgtgtaaagcaaacccgaaatgataggaaatatatattg

SEQ ID NO: 535 - DNA, 8233 bp, Heterodera glycines
tttcaaaataatgttttcccttccctttcagcttgccgctttgcaatgagggatgtactcgcctggatcgagcaacacatcgatgagctgatcgacgataccacagcatcgcggcacgacacgactacagctacgactcgaaaccgcggatcccgtcaaggctctcgaactggctcatagaagatggtgatcaatgtgtcgctgatgcgttcatatgttctttatgtgtgttgtatatatgtatatgagtgtatattacgtcgctgttgtatcaatatttactgcatttgtcccgtatttcgatcaaatgactgtcatatttgtatttgtcatgaataaatgaacatcaatcatttcatatccaatttcattttaaaagtgtataaaaattaaaaagataaccatcatttttacgaacttttggagatggaaaaattttcttaggccatttttgagatattctgatcaccagggcttcttttttatgtaaaaaaatctcaaaatatgtaaataaaattaaaaaaaaaggctctagtcggttttacgcgtgccatcactagggatgggatttaagtcacgaaaaatctcaaaaaagtcacgaaaaagtcacataacaatgccaaaaagtcacgaaaaagtcacaaaaaatgcaaaaaagtcacataaaaatgccaaaaaagcactaaataagcccaaaaaaagtcctggaaaaatagccaaatgtaattaaacccaaaagccgttttaaacattcttcgaagaaagcaatttttcagtcccgtcatttgagtccttatgctataagaaatttaagttccgtcccgaagattgatttatttttcggaattttcatcacaaaaagtcaaattttgccttaaaaagtgtaaaaagtcatgaaaaaagtcaaaaaaacgcaaaaaagtcataaaaatcccaaaaagtgtaaaaaagtcaaaaaaagtcacaaaaaaatgtatgttagaagcttcaaacaaagtgtagaacacttttgaagtcattttaaggtcatttagagtcagcaaaaaaagtcatttgacttaaattcccatccctactgatttcaagacagagatgataaaattcttctattttactaggaacattaattctgctgtttgattttttcaaaaacttactatctatcaaattatcaaacctaatcactttttatcatttatataatgttttttaggctatcagggattgaaaaaataagtttgaacccaattttggacataggataggtgcgaatgcccggggcgcaaatgtggggtaaccttggcaaagatctctaaaataattatagaaatctctataattggatgttttgatgaaaaatattcaaaattaaaaactcatgggacgcgtaaaaatccatgggacgcgtattctgcactagaaccattttttgtggtgtaccaactgcactagtatcccggcttgtttcggcggctgtgttttgtcctattccggttttttacgttgcaaaatattgattaagcactcgttttatgaatttatgagcaaaaatcaaatacaacaatatttaaatagcagtctaacatttgggttacataatcgcatcaattaacaaatcaatcaattcatttctgctgtttctgatcaccactcggcccgggcgaaccgtcgagaagactgaaaataaaaataagaatttggattttaaaattgttaatcacccatcgccgactccgtcgtctctaataatgaaaatgtcaattcgattccatcgtttgtccaattccttaatcatctgctgctgtctcttatcatctggcacaattgggcaacgaatgatggaaaagccactaaaatcttcttctccatcttctttggacagtgccaattgctccccggtgaattcgttggtcagtttaaatggcataacggcagaaagtgaagaggacggcggaaagtaaacagtaatgacgaaattgacaggagaagaagcggaggaaaaagccttaaaaagacaaaaaatagaaaaagacgaattaaatcggacaaatcaccgctttgatttgttgaacggttgccaaccattgctgctccaccgctgaatcctcaatgcagattgtcagctccttcggcaacttgtcaggacgaggcaaaaacagccatttggtcaccgcttggccattcgatgcattggcactttcatcaggtggaaattcgatggaaatggggccatagaaagtgataacgcgaagggatggacaatcgttgagcattgacggagccaattggcggattggacgaagattgacggtgtccaaagccatcccacgaatggtgtccttgagcattggccaaatgttgagcacaatcaacttcgaaatgcgaacattcaccgtgaaaatattcaatgttgttgtacatgaagcgaaaaagcggtgaaaatggcgaaggaaaatgagcacattttggtcgatgaagctgaaaatcaaactgttatgggcacaaatcatttccaaattcaatttttactcgatcgaaatgcttttgaatccgatgactttgttcggcaacggattttgcgggattggcaatgctttttgatcagaattgacaatttccattccctttgcgcctttctctccagttttgcgttgaattttcatttcgcccaatttccatttgcgcgttttgaaatgttcgttgatgaaatagtcaaaacggtggctgatcagcgcaatgccaaggccaagctgaaagggcggcagcaaatcgaacaccgaaagccaacagtcggcagagatgaagctgaaaacggaaaagcaaaattattagcatagaaaatcaaatttagaatattacatcgctttttccatttctttctctgcttctttcggattgtccgacattttttggctggtaatcaaacagaatttaggaagtgaactgaaaaaaaaaattatcaaaaaaaaaaatgcggatggaatgaatgggctgaagaatatgactggaaggggatttggtcggctttatatactcgggtacaccaaggggtggggcgcccacagaaaaaaaccgcggccgcgcatcgcgcattcaaattgccgcggccgcggatcgcgcaaaaaaaaaccgcggccgcgcaccgcgcattcaaattgccgcggatcgcgaatttattaaaaatttttccaatttttaaaccatttaaatttttttttttggggggggggggaagaaataagcaattcgtaactttcagcgcatttgggatcagaaaatcagatttttaacaattttttacggcgcatgtttccaaaaagttttgagaacatgggggagggggagaggcccggcggtgccgataggcacggccgggaaatatttttcatttttaatgcgatttgttaacagattttgtccaaaaatgaccaaattttgcctcaatcttatattttcttcgtaagatagtgagtgatattctgactagagttgagcggtaatcggtaattgtaaaaaaaccggtaccggtactgaccggtaatgcaaaaatctgtacggtaccggtaccaactttttccacctgtaccggtaccggtaaaaaccggtaattttccgacgtaaaagatttttggacaaaatttttcaaatacgaaatttttactcaattttcacgcgagtgcttgttttgtaaacagaaatgtagaaattgacaggagaagaagcagaggaaaaagcctaaaagacaaaaattttaaaaaacgaattaaatctgtctagctatcgcttcgcgattgttggattccaacacatttttttgctgtgcacaaaatagtttaatagtttatacgtaaatttcaccgtattatttgggtagtggttactattttggatactgtgccattaatattgggcgaagggcaatcaattttttttttcaaattttcttatttttagtgataacttattattaaaatttttttcttttcacacttttggcagcaaatggagctcaatcgagcgtagacatttcaggcatcatttttcattaaattttataaaaaaagttgtctaaaataatttgcaatgtcctaaaatgtctgatgctcacaaagaaggtgtgttaagctcatttccaacacattctattatagcacacaaataaatgttaagcgcaactggagaattgtatcaatggtgtactgtatttttaaattactataatttcttcacaataatttaaagcgtgaaatggcacaggtgcagcttactgtaagggattacggtatctgattcttgattttttcaaagtacattgtgaatcctattgatgatgacagctttcaaacaatttaccgcttaagttaaaagtcattttttacggggagccccatttttcaaaaagtacagtaccatcacaaaatcgcaatttttccgggagccaaaatttttaataaatgaaaatgaggtagggggaggagaaggaggcggacaaaatgtaaataaatttcaaaaaagagtgacgaattcaaaaattgtgtttctttttgtccacaatgtgtttgttgctctctctgctgtcacattgatcaatgtcatctccctatgtacacatatcacaacattttgtcaatcgctttgcttgtccgtcgtctcttttcgtcggttgcgctgattttatcgccgccggcgattggatgacgacaagcgcaccgacgacgggcggcggcaacttgttgtttgttgttgctgctgtttgtgcccccaggggcgcgaccggccgccggcgacgacgacagacactaatttgttggcgaccgacggacgaccttcattagcaggcatgaaagggtcgccacagaccgccgccgccgcccccgtcgactgtcgtagtcgtcgtcccactgtcgccgccgctgtcgcgtggcgacggcggtggcgataattttgtggcggttgccgccgcttgactttgtaaagtgccgccgccagcttcactgccactggtgccaccatcaaaacttgagccttaaaagttgggcttatttaaaaaaaaattgaaatgagaaaaatatatgacagagaaaaggtcagaggcaaaattccggccgtcaaatttcggggaaattttatttttatttttttgcaatttttcatcgagatccaatggcgggatctctcatgaccatttgcaaatcccgcgggattggagtcactataatttttcgcgcaaatttccatttccgtataagattttggcactattcatcaatacgaaaaaataaaaataaaatattttcatttgctaatttcttagtaaattccttcagcaattgtgaaagcagaaattactttctgtttttgatgggagcgctttttcatcatcagctgcgtcagtcgtaatggttttttgttttttgtcgctttttggtcgcttttttggtggctcttcaccgctttcatcaatagacgacgccgaagaggacgacgaactttcgctggttgcgtaattcggaccggacagctgttggccaattagtgaaatgccagtggaactttaaaggaaattcaaattacggtcaagacacagattcggagttcgcgaaatacagtatcaaatacagtagtattgaagggctcaacagtgtcggtcgttaaatacgttaaatgctttttcatatgaccaagttcataattagcccaaaatgaattgttctcggctgctctacgttccgggctcccgaccgcccaccctttcgccgttaccgtccgaccccctggatcagaaaaacttggattttttgaacttttccttcgattaataaatgttagaaaactaaaaaaaatgttattttttgcgggggtgggagggaaacgaactgcttccaccacggcccagtcgtgcgccaaatataaaattacattatgttgccgctgatgtcgatcgcctttttgctcactgtaattggtttggcgattgttgccgccgccgctgcctccgcccattgccgctgctggtggtggtggtgttgttggcgagcgaacgccgccgcattcatcgcggcgacaagcagtgaagcggccgcgggagttgccacagtcgccgcgctgctcctcggcggcaccattgttgttgcaggcgtcgtggcattgttgccggcaatggcatccgttggcggcgcaaacattgccgccgctgcggctgccgctgctgtggccgcaacggctgccagcagtccaccactgccattgtcggcggcggcagaagcgcacgcagccaccgcggcgggcggcagccgtgaaatagggccaactgccgatgccatcatttttgggtccggaaaaatggacagtgcgcggaacgcggacggagttgcgcagtgccgtaatggtgggctggcggcgatgaagccctgctggggcggtggtgccgacgataccgccggagttacggtagttgccggaggcgtcatgccagcgtcggcgagttttgcgtcaagcaagctgttgttgccaaatgcacaggtcggctgtcgaaaggctgctatttgggatgcttttgtccgtgaactttggcccatttttgaaacaagcatacaccaacatttgaactttgccggtcataagcatttcgacattttgcgtcgtctgatttcaccgacaattctcactgatctcaacaaattgaattcaatcaattcggatgatttgttccccgatggaattgctgctgatgatgaatgatgggccaaatgcaactgctggcatggcgttgtccaagtgttgcacacaccgagaaaagaaggtcaaccgaaggaattgcatttttatctaaaagaaagaaaattatggttcgacaattacaaacaggtcgctaacatagaatttttttttcaaaatttctgttttccgttgaccaggattcccgagacaaaagttccgggaccgcgtcgttcctggtttccctcccgttcaaacacaacagttcagttttttctccgtgccaccacttctgtcagttacaattcggttgctccaatgcaaattgttgagccattcgaattggtgaacgaacggactaatgagaagctgattttgatattgatgccatatgaagatgaccgtgatgaattccttggtgattggctgttgaagcgatgcccaattgggaaggcggtggtggttcagcagcagaaagacgaccattttgaaaacaacatgaacaatgtcataattactttgtggcgtcctaattgcattgggtgagcaacaacagtgcaatttttgtatcgaaaaataattcatccaattcaaattgttgtactcaattgtaggccgttgtcgccaccaacggtggatgaagaagggggcaaaagcaatgtgcggaagtgaattaaaaatggcttttgtttgatggttctacactgaatctcctcaaaatgcgagaccttgggatttcacccgactaataattaattgtttccatttttgaggtgcccacaaatttggtcctacatccattccgaaccttgggcctaatacgaaaaattaaacttataaaatttcgcatttttggttccaaaaccggcttagagttgaatttgaagtgtaattaatccatgcattatttgactatccgttttttcttgtccgaaacaattggcacgcccctaaggggcgtattgactaagaaaagttatgtgccaaaaaatccctcaacaggcacatttatggcatttattagcacaaggagcacacacaaatatatacaatactatgcaatggcatatatatatacacaataaatacattatttacacaatctgttgaatatcgttgttgtatgcataatatcgtccatccgatcggtctgacttccttctccggtcgtcttagcgggggcgcgccggtgtccacaattccatgttttccctcagcgtttgtaggttgatcgatgcgtcatcatccaatggcaccgtcatacttgcaatctccgcctcagccaagtcaatagcctgaaaattggcggagaattaagcaagattatatgtacaatgatgaaaataaaagcattcgaattggtcccaccttttttgccaagttgcgcgcctcgttcacagatttcaggagatccgcgaggaacacggagtagttgagtacaaggccaagacgagtcggattgatcgctgcaattttggaggtggcgatatccatggcttttttgtaagcgcgcttt

SEQ ID NO: 536 - DNA, 2283 bp, Heterodera glycines
atgcataatatcgtccatccgatcggtcagttcggcacttccttctcaggtcgtcttggtgtggctgccgccctccggtgtccacaattccatgttttccctcatcatgcgcaagttgatcgaagcgtcatcagccaatggcaccgtcagtgtggcaatctgcgcctcggccaagtcaatcgcctgaaaacggggtgagatttggccacatttcacaataaaaggaaaagcatggtgaaaagcatcgaactggtcccaccttttgggccactttgcgcgcctcgtccaccgattttaagatttcgaagttgaacacggagaagttgagtgcaaggccaagacgagtcggattgatcgctgcaattttggaggtggcgatatccatggcttcttggtaagcgccctttgcgagttcgacgacacctgcggaacaaaaaaaaattatgatacgatcgaaaatatttaattttttgcattttatgagaatcaactttgaacatgctcactttattgggtcataacttttttttcatgctctaaatacaacagattttggtatccattcgaaaaacgctgaaaatgcatgatttgctgaaacatagaaagttatggtccaaaaaactgggggtgcttcaaagataattggactcataaaattctgaaaaaatggcggatcaaaaatgctgttaaaaattgggatcggacaaattctgtctcacccgatcggtccccatccgtcgccacctcggccatgtaacggtagtagtcggctttcattttcaggtagaacaccttcggctccgggtcggtcgctttcgggagcagcatttcgttgatgcacgtctgttgaacggaagagaaattcgggatgtacaaaaaaaatttttttaaacggaaaacccaccaaaagttcttggcaaatggtcaccaattcgttctgcacatgcttacgatagctctccatcacctgtgtttggggaaaaaaggggtcagtgacatttttaacggaaaatgtgccgccggggcctccaaatatcgacggtggcaccacctgatgttgtcgctcgttcatttccgggccggtccgcttctcgatggacaccaacgtgcgccatgacgaacggcgtgaagacatcgcacctctgtaggccagtgccagcgaaacacggtcctccaggccaagattggggtccaatttgatcaactgaaatgggggagaggggataaagcatttaattgatcatcaacatttgtgaaatcctgcaaccacaaccgatcggatgggatggatggccacacctttttcatcgcctccaccatgtcgtcgaagcgtcgcgccttctcgcacacgatgatcaggtagattagttggtcctttgtttcgggctcgtccgtcatggtgatgatgatgatggatggatggagctgataaggcttttccagattgtacaatatgtggtgggtgtactgaggcctttgaaaaatggggttgggatgtcagaggaatgatgacaaatagccgacttttactgtttttagagaaaaattgttaggttttttttgactttacaacattttgaaagaccatgaaatgataccaaaatgttcgctttggtatttggtcagttttgttgaaaggtttttgtggccgaaaaaatagtacaaaaggggaaatttaccaaaataaaaaatatagtgatgaatgaagaatggttggattatgcactgttcccttccttttatataaattttttttgaagcatttcatttttatgagtcaaataagaacataatgccaatattttacaattttcaaaaaattctttcgcgtaggattttttccgaaaatcggacacccacaagaaagccgggattgaatgaaaatagaatttcccatgggtctgaataaatcacgtacgacccaaacaaaaatgatgcacaaatatttcggatggcgtcgaatattcggccttttttcttccatttcattgactttgatgaggaatcgcattgtttttttgcatcaaattttgaaccctttggcatcaaaaagtgccaattttgctcctggcataaatttttggtcgccgtttatttgctttttccaatttgttactcaaaaatttaatatgaataaactaatctaaataaaatttttagttaacgtcatttttcgcaatcacaaacttacgaaaaaggtgctgctgctattgccgcaaaatgaggcgacgtttaaggaaaatgtaaggaattttttaaatgaatgaatttttttggcgcttt

SEQ ID NO: 537 - DNA, 3662 bp, Heterodera glycines
ctcattaatatttttcgcacacacattcttcagctgggtgtgcaacgacgtttggatggacatttttcctttttttcgtcctttccaactcggcctcaaaatggcattgctttcgccacgtttcgatgtgctgtggttgacacgaatttcaatgtcacggtcacggcattggcactttgaaaatggatgataatttgcaatggttttggaccaaagtcgaaggcgtctgtaagaactgatcactattttgtggactttccattgcccgatcaccatccgctgcccaacaaaattcgctttgatgaccttcatatatagtagctttttaaaatcttgtgtgtattaaagctagggttgccaactgaaatttttcaaaatcagctttgggggtcaaaaatcggcaatctttccggtggtttattggtgccgtcgatataatggtacataacttaagacgtgaataataaattaaatcattttgaaaacttcggaaaaaaacacatttggggcatcgtttgataaaatttggatcattattacagaatatattattaccttatcaatgcttaggtgtatttgatgaaattgaaatttttgaatttttttttaatgttcgggttcgggactcgaaactggttgaaaagttggtcagattcgtactcagcggctgaattagccttataaatgtatttttttttagaattttatttaaaaatcgggaccaatggaccggaagaggcgccgcaggaaaattttttttgaaaattttagtgcaatttaacagattttcaccaaaaaatgacctattttatgacaaaacaaaataaattttttgggacactgcggatcatttttttaacagattttcagtgaaaattggcaacaaaatgatgatgataaatcagcagagttggggcagcacccctcggcggattaaagcacttaattacccccctttcacttacattgaccattccgtgctcgaatttctccgttctaaaaagcaaatttttgacagaaggggcaccattttggagctgagtgtgccgttagagcagcacatttgggatgcttttgtccgtgaactttggcccatttttgaaacaagcatacaccaacatttgaactttgccggtcataagcatttggacattttgcgtcgtctgatttcaccgacaattctcactgatctcaccaaattgaattcaatcaattcggatgatttgttccccgatggaattgctgctgatgatgggccaaatgcaactgctggcatggcgttgtccaagtggttgcacacaccgagaaaagaaggtcaaccgaaggaattgcatttttatctaaaagaaagaaaattatggttcgacaattacagacaggcgctaacatagaattttttttcaaaatttctgttttccgttgaccaggattcccgagacaaaagttccgggaccgcgtcgttcctggtttccctcccgttcaaacacaacagttcagttttttctccgtgccaccacttctgtcagttacaattcggttgctccaatgcaaattgttgagccattcgaattggtgaacgaacggactaatgagaagctgattttgatattgatgccatatgaagatgcccgtgatgaattccttggtgattggctgttgaagcgatgcccaattgggaagacggaggtggttcagcagcagaaagacgaccattttgaaaacaacatgaacaatgtcataattactttgtggcgtcctaattgcattgggtgagcaacaacagtgcaatttttgtatcgaaaaataattcatccaattcaaattgttgcactcaattgtaggccgttgtcgccaccaacggtggatgaagaagggggcaaaagcaatgtgcggaagtgaattaattattattgtttgagaaatggccgattttatgctctcattttctttccaaaatactttgttgttggtttttctttagaatataaaatgcatacatttatttgcttgcctttttatgtgcggcatatatccgaacctcggacccgatttagaacaaaaagtcgaaaaccctaattttaaagggcaggtggcttgaaaataccgatgttttcaaaaatggagactggtgtgagaaaattggcagtaacagatgaaagccctaacgaaatcagtcatttttgagttgtgtattttagtacccttgctctgcgtgtataagtcgtagacaccatcattcaaaagtcaattcagtagagtgattcattatatacagttatccacgaaatacaaatattacacagtatgtagctatacaataaaattggtgcatttggcctgcgtcggctgctgctgagagagatgtcaactgaaaccgggacattttattgtacaaaattgggcggatatggtaaaaattgcagtaccgaagcactcataaattctgtgcacatctttgccacacgtcgaacatttgtacaacacttccagcgaactgtgaccatcttcgactgtaacgaagaaaattttcaaacggaaatcttccaagaaaaaatatttgaaaaatttttaagcgattttttttttgtaaaaaagccaaaaaatacgaattgcttttaactgatgacggagacggaggatcaccatttctggattaaaaactctttaaattcgaattcaaatggttcgggtttcatacatatacaaggggtgtctcagaccgagggtcacacgacggacgattgggacagggggggggggtgtctcgggtccgatttttcatacgaagtagagtgccacgggaccgggaatttttgcaaaaaccgggaccgggactttgccgggacctgagaagccgggaccgggactcgatttttttttgggaccgggaatttttaaaaattcaaaaaaattcaaattttaattttttcaactgaaaataatacaaaattaaatttttattttgtttttttatttaataaaatccaaaaattaaagctaaattaaattaatgaaaattttcaaacaaatttctttaattatttcaaacaattaatcattttttggactaaatgattgaatattattataaattaatatttgcttttcacatcacattttttcggcgcgctttttcaaaaaatttttaggaaagaaagggtccggcggtgccgataggcgccgccgggggaaaaccgggaccgggacctgagctgttcaaaatccgggatcttggatgaccgggaattcccggtcggcgacgaccttttttttttgctattcagaccacttttttctggcgaacttttttttttttttgctattcagaccaccttttttgcggcgcgttttttccaaaaaacttagggaatgaggtggcgggcggtccggcggtgccgataggtgccgccgggaaaattttgtgaattttgtattgttccgctaaggaaattgtgcaaattttaaaatttttcccccttcgttaatgtaaggaagaagctggctgggcggttaaaacgcggaaagcgggggttgataagatccataaaaagaaagggcggatgtgcctcggtagcttaatggtagagctgcccacggaaagggtgcatgagtgggttcgattcccacccgaggtttaacattttgcccatttcttattttaa

SEQ ID NO: 538 - DNA, 1432 bp, Heterodera glycines
  unsure (1)..(1432): unsure at all n locations
ccccccccccccccctttactaccgcccccttacggcgaacgatggggggaggggtgtccgaggcctcatacgacgaggggacggaggggtgtctcgagactagagagcgggtacggaccggatccgtatacggatttttacggatccgtagtccgtaatccgtatttttttaggctgatgcggatttttacggagtacgggttttccggatttttagtccgtaatccgtatgtgtgcctagtccggatcctgatccgtacaatttttgatacggattacggatttttttaaactgaacttttgttgaatattatttttgaattttcattatatttcgtcaagctttgatataagtttgaattgataactctttttctaaattcttaacttattttcaacaattaatgaattttttgtttgatctttaaaaaactgaatttagcaaagatgagttcaattatttggcaaattgggttgtttaacaaattgcctgacgggaaagctgagtgatgaaactgctttggctccgtcgcccaaaaaacagaagctttctctttttgatgacctcaatgatattgcttcaacaagcaacaaggagaatgcaggcagttaaaaatttgagttttttaataaaaaatcatttaagatccttcccagaattcatctgacattgatgatgagctcaacaaatatttggagtggttgtgtaaattcgcgcgaggatccgctgacagcttggcgacaaatggcacccaaattcccaattttgtcaaaaattgcgcgcaagtttctcactgcacctgcctgccacgagtgtcccaagtgaagccacttttaaagtggcgagagacgtttacgattacagaaggtcgcagttgaagccagaaacagaggaaatgttaatcttattgaataaggcacttccaaatatcaattacagatattaaatttttcattatctcgcaattttatttttctactggtcaaaaaatgttatttaatatttgtaataaaattttgaacaaatctgtgttggtattacatttacaagtattttttattgattaaaaaaatttttcaaaaaatcctttgtccgtatacggatccgtattttttctggatacggatttttacggagtacggattttcaggatttttagtccgtatgtccgtaatccgtatggatgcctagtccgtagtgctgatccttatccgtattttcccaaaataccgctctctactgccaacgatttatcattagggatgggatttctaagtttttacttattttttctccggctttaactcaacgagaaatacacgaaaaacacattttttgtctgaaaattttgcgttttcacgcccttattcgaccttagaaatccttaattgtgatgttcgccctntaaaaatccttattttggatgttcg

SEQ ID NO: 539 - DNA, 5450 bp, Heterodera glycines
ttttaagccgtgggagatcacaatccttgagtaggcctcccaagcagtgtcagtctgtttagttgttattcttcttcttttttcatatctttgatgaacctatcaatgttaagataataattaatttttataattatttcattaatataatttaaattaaagataatttactttttatatcattaaatattcatttgttattcatataaaaattaatctctcagtttactctccattagtccccatccgttaatgtatgcttctccacttttgaacttttctgtgtattagagggttaagcttatatatatatatatatgcttggggataaagatatgggcggatttttatagttttcccatgtctcagttgtttcgagtatatccacggttttgaaaaaacaataaaaattagagggttaagctatatataatattttactatagtcaaagaaaatttttaaactttttaattcgttacattttgatttgtttcatgtttttatggtaatgccacgccaattgatcacataacattggcattatgtattattttgatcaatgctcactgtgtttttgtaactgatcagaaactgtgccattcgcttaagcagaaagtgatcaaatacaacacatacacgaattgttgaccattttttgtggaatgggacgaagcaaattgcttcgaaaagcaattcatttgggagcacaatttttggcttcatttttaatgggaaaatgcaaaattattattatttggtcagcatttttagtaattaggaaactgatgattcattatgttgataaggtaattaggctgggaaattttaattagggctttgcgcgatggacgtgccattcttatctatctatgcctatgccatctcttcggcctctctgcccagccccttcaaaaatgtgacaaaattccccaggaaaacgaataaacatttttttggtcaacaaaaacaaacaaaattattggcattttttagaaaaaataattatttaattaataggcaattaggggagaatttatttagcaaaatgtgagaaaataaatgtgtgacaatgagtttgtttaaagcgtataattaagataaagaaagcgcatagataagaagactttgattaagaatatgatggaagaaatattttggagaaatataataaaaaaaattactataaatgtgtaaatccgtgcaacatcagacgaagttgtttagcattgacaattataaaattaatgatttgtggtgacaacgaattaaattagtgcttttttgttcatctcaaaattgcataatttttaattaaatcatttcgaattttgaacaattaatttggttgatttaataaataaattaacttatttaaattaatcataatttttgcgatatttttgcgataaaatcggcggccaacaaaatatttgaatttcatagaaacaaaattcattcaagtgattttttaggacgagaatggataaattggcacataaaatgccaaaataggcaaattaaaaaaatgttcaacaagatatcttaataaaaattttatttgaatgaaaatttcatcatgcattttattttgggggattctttgcacatattttatgacaatttttaattagtaattaatttgtggcattaaaagcaattaaaaaagatcgatcaattaggtgccacattcaacaccagcgattcgctcaatccaacaaccgtcctgcggagaataaatgctcaccaaaccttatgatggaacaatttgaattaattttcaaaattctttaatttagaataatttgaattttataaatattaaaattgcttttgccaaataaggggtcacataagtgacacttgcaacgccaatttgcacaaaatttgtgccgttgttgcccaataacgcaccgccactgtcaccctaagaaaataagagaatttgagcattcaaggacaacccagcacatgtcctttatgtccttgattatttttttttgcgaaaatttcaatgtttttaaaattattataaaaattaataaattttaaaaaataataatttttaatcgaataaaactgattaactgtctgctgaatagtgttcttctcaatgcaaatccgttgatagccatcatttggcaaataagcgcattcacttaatttggcacttcggcccatcagatttaatgggcttttttggcgaattctggcacaaccatctcaaaaacaaaatcatttgattaattattgaagaattaattcattcattgtgttttaaatgttaaaaaatgatttatttttatttatttaataataatattattttttataattatataattgatacaatattaattaaaaaaaaattttcttttttattacccaaaaatattccttttgctattcatatattaaactttcttattgagacccataaaaatttaatggacttttttcgttactaataagtttttacttgaaaataaaataattttatatttttatttatcataactcattaattaattaattaatttttactctccattagtccccatcggcaatgtatgcttctcctcttttgaacttttctgtgctcttctctcaatgaatacagacgggaaaaactgttgacggaagagtcacccattctttcaactattattaattaattaattggttatttattatttaattatttgagtgcctttatcaatgccaaatcgttaaagccaagaccatttttcgtatattttggatggatgaacacattcaaattgatcacacgcgtcatttttaacaacaaaaccatcataatttgggctcttgaagactcgcgaatttgagccaaatcctttaaaaatgccaaattttattatttcaaaacatttaattaattattaattttgtttacccaataaaaatggctgaaattctttcattttgtcaaaacaattggcggctaacagaacgaattttggtgaaattaatgaagcagtgcatcttctgccgtattcagaatattcggtcaaacttgccataaaataaactgtccatggcatttgctttatgtcaatttgggcaccaccggaaatctgagcaaagttttaattgatttaataattgtaattttaactaattgttttaatacaaaattgattcattattattactactaattgaaaagtataaattaagcataatttgaattaaaaaaataataaattttattttatttttaatgtttatagatttaaaagagaccataatttaggataatttttcgttaaaaaataaacaaacaattcaattaattcctacgagtggcttaatgatttgttggcgaatggcacgtggcttttcaaatgccaaatgatcaaaagttgcgcatttttgaggtgggccatcgacacgaattaattggcatccattcgccaccataaacacaaattttgttggcatttggccaaactttggccaaatgtctgctggcaaaagccaaaggccggcaaattcttccaaaaatgggcaagctttgattcggcgaaaaattctgagcgcaatttcatttgttttggcgacactaaatttaatgtgaaattatttttggcatttaatgagggcaataaataaaatacctgtgttaattatgaatgttttgttcgaatttgtaaattttaattccaaaattggcaatgcgcgaaaaatatcttcagctgatgaattcctaaagaataaaagaatttttgtcataaatatgtcgagaaataaaaaatgaatgaatatcattttaaaccatttgtaatttttcggtttttttaaaaatttttaaaaatttttcctttgttgaaaataagaaaaatattttaaaaatatttttgtttaaacattttttaatctttaattatttttttctgttgttttttcaatgaaaaatcgttcataaaattttgaaatttaatttattttattattcgaaaaattacaaaagttattgaattttttggtgatttttttgtaaactaatattagtttttatatataatttagattgttaaataatttcacttacgccgataataaattgccattttcaattatttcttttccgttggaaagtgaaaattgaattttcctggcacattcttctgcatttgtcttttcagtgaatgttttgtcaaatttaaatcttttcgccaatttccatggaaacttttgttgccaaataataattcacttttgtaacacaatgaaaaacttaattagattaattaaagcaagttaattaataaatgcctttaattagtttcaattaattaccttgcataattttcatgaatttcatatttaacttttaatgtgcaaaatggcttaaattccaacggcactttgcttaattgcttacagattagtaaaagataatttaatatttgataataatatattttattttgattacattgtgccattggcattggaaatagcgaaaagatggacagaaaagcaaaaaataacaaaattggcaccccaaaccattattaattaattaattaatatggcaccaaatcatttttattgcttttttatttatttaattaaaaaataatttgcacatttaattaacataaatcatttttatttgtccattttcccagtaaataattatcataaaaatatttttttttgatcattttcaattagtcatcagcacattagcagcagaaagaagcatttgtgggatggaaagtgaatgattcactaaaaaaaggaaaaaggaaagtgaacaaaaaagtgaaaagcattcattcatttaccatttattagtcaaaacaataataaaataaaataaaacaattaattttcccaaatatttaagataattcaattaattaccaaaaataaatggcaatcatcggcccctttaatcatttggtgtcaattgccttgctgttgctgatcgccatattcaatccatgctcgtgtatcaatgattaattagtccaattaatcaaataatcaaattaaatattatgagattgatgagttcggttgggtaattagtgattaatcaattcattaattaagcattgatgtgcaaaaggggctacaccaatcaccgcatcggtgaaaaagccagcaatttggaatgcgagagcggtgctactcactgcttttctgtgatttgcatggagcgtaagaaaaaaataattaattaaaaatttcaaaatgatagggttagagctcgacaatttgaaaaaaaaactggagagatttatttaaaaacgtattttcttaggaaatttttaaaaataccaaaaaaaatttttcctggcaccacatatcggcatcgcctgacccaaaattccgcttaattttttcaaaatcgaacatcggccaaaaattccgaaataattttcatgaatctctgacgaggaacaaaaattaaaat

SEQ ID NO: 540 - DNA, 3777 bp, Heterodera glycines
ttaattttttcaaaatcgtacatcgtcacaaaaattcgaaaaataattttcatgaatctctgacgaggaacaaacattaaaactggtccctcatagagggggaggggggggggggggggttaagcctccccgaagccaagggtttggccatgcctttcctctgtctggtccatcataatatagaataataatgattactaattatgtaaatatttatggaataggatcccccccccccctcccccggaaccctcattagcaagctctgttttttggaactaatagatttgaatttaattttagaaaattttacctccacggcactgctcacctggggctgtagtgatgaagcggataaaaatgtctgcgaagaattcttcatgaacgcgtccaacaccgcgctgcgctcgacgaagcagcgctgcgagtgccaatttggggaccagggaaaagacatggccaatgagcacgtgaaactgcccgaggcggagaagcccggcccaattccgaccattccgccatcggcactgaacaaaagtgggcgcaaatgccaaaaaatgttgcataaaaattacagggaattgtggcacaaaaataatgagaaaaataatgtcaacggaaaatggatggggggatggcacgtgaattgtgccatggaaaatgagggaaacagtgtcaagaattgcataaatgtcacgaatattctgccataaatgagcaaaatgtatttgagcaatgccaaaaaaaatttgttatgaaaattacagggaattatggcacaaatagtcagggaaagaatgccaacggaagatggatggggggacgtgggtgccatgaaaattgaggaaataaaatggcacgagtattatgccataaaagatttgaccaaaataagcttttctgacataaaagaatcacaaatttcataaagccaagcttgagaaatatgagaatattttaaaatttgttcatttgaaaggcatactctgcaaaattggcacttatcatgggaatggatacggtgggactgcggcgcgggaatgtcaaggcggcgagcactgttacgcggtcagctgcgtatccggtaaatatgtgataagtgataaaacactaattgttatccatttttaatcaatttatttttgaatattttttatattcttaataataattaacatttgtataatcgagcaatttttctatcgatcaatcaatcaatatatttagttggctattcaaaaattttactaattaacacggtaattgaggcaattattactgatattgaccgattgattgattgatcggttgatcatttattgattaattttatccattctctccgctttcacaggctctgacaaaatcagcttttttggctgtcacgataacacggaatgtgagccgctccgcaaattcattgcttatggccaggattgccagtgccgatttggccccaagggcgagaatatgtccaatgttaattatgacctgccaaactatgttccaaaaattggcataggttagaaggggaaatagaatttaatagaccagaattattgggggaaaatggccaaaatttcgccgcccaaatcttttttttttaaatttgcaaacagaaattttacaagaaaaaaatcaaatttttttctataagactacaagaaaaaatattgttagtttttagcgatttttgtaaaattttatgataagttactaatttcgtgaaaatttttcaaatttttttcttataaaatttctaaaaaaaaattttcttgaaaaaatttctaagtttgaaatttttaggcggcgagatttcgagaggcaattttttttgggtgcacccaaattattaattaattatgaaatttatcataaaaatctcaaaattggacaaacagtaaatttcatagtacagaatttaaaattagagagcaaaaaattaaatcaatggcaattctttgattaatcaaaaataaggtcagataatctgtgatctcgagattataacttcttttttgtgcaaaaaatgccctttctcgggacacggatattgaaaagaataaatcattaaaaaataaattaaaattttaaatttggacagacattgtcttcagtgaacttccgatcccgaccgggtacagtacccgtgcaaatgcctaccttttggttgccttctcttcaattccaattggtgcctaatgaacatttgattaattaataatggaaaatatcaaaaatgctattatttctcaataaacaatcgataacttttattttatttataaattaattattatttatttatttgttttaaggttttttgaccaaattccttctccgcgcaatggtgcgtgttcatgaatgaacggcagaagcttaggaaggaagaagaaaggagaagaaatgataaagcggccaagaatttataattaattttggattaaattaattttcattttttaatttgataatttaaatttttaattatttttatttaatttaatatttttaatatttgaatcacccattttcctaatgattattttagcctatcaaaacattgcacagaaaatgaaatctgtcctcccattgtcactcttcttcttcttctactgcctcgcctttccatgcatttgttacggtaatttagaaaatttaaaaataattaaaaataaattttcaaattaatttcgcagggatccattgcaagactggaatgtacgacacgtcgggaaatgctgctattgtcatctctgaatgcgcagcggatcaccacttctgttctgcaattggttgcgcaatcggtgggccactaattacctaattaaccaaaatttgattatttaattgtcacgctttaggcactgaacagatcactgttttgtggtcttgtgagaagcaaaatgataccaaagtgctcgtcaagagagtatctttcgagaaccacacttgcatggctcagattggccagaaggatgccaacatgtccaatgaagagttcggttttcccgaattggtccaattggtcttgaagggtaattagcaaaaaaaaattttttgaaattaaatgaaaaattgaaaaaatttcagatttatcgacctaatgtgagtagtgtctgccctacggatgtttcgtcattgtctaaccgttcttaaaattatgaaccagaaaattgtgatcctaaatcttctaatgtttatttatttgatgaaataaataaagtgatcactgatcgttcgttccattttaattttatttttttgcttaatatgccatgctaaaaaatataatgtcagagatcgaacggaatgccaatttcaattgccagtttctgacacttttcgaaagcagaaattttcggcaatctgctttcgaattggagaatttattaggatgttcgagagtcttgactcgagaaaagtctcgggttttttgggtctcggagtcgagagtctcggggtcgagtctcgagaaatttttggtctcgagcatcactagaatttatattcagtcaaattaatattctatgatatatataattcaaatatgtctttatcagttcgtcaccgtcgggccccgaattcttgagtttttttgaactaacaaacacttaaaatggtaattgcctgataattccctcggcttctccctcaagaaattctaaaaattagcataatagcgagtcaagactcaagaaaagtctcggggtaatggggactaaagtgtcggtcaagactctttagaaatttcggtctcgagatgaactgacgcat

SEQ ID NO: 541 - DNA, 1839 bp, Heterodera glycines
acagtaagtttcatagtacaaaagtgaaaattatcgagcaaaaacttaaatgaatggctaatctgtaattagtgtgatcaaagataaggtcagagaatctgtgatcatgagattataatcttgtcttttttgtgcaaaaaatgccctttctcgggacacggatattgaattgaataaaagcatttaaaaattaaccaaaaatttaattttaaaatttggacagatatcatattcagtgaacttccgatcccgaccggctacagtacccgtgcaaatgcctaccttttggttgccttctcttcaattgcaattggtgcctaatgaacatttgattaattaaaaattcaaaatattaaaaatgcgatttatttctcaataaacaatcgataatttttattttaattataaattaattatttttaagttaaattgcgactttttagacttttttttgctaatatttgaaagaaatgctgtatttttttttaataaaactgcaactcttttgaacatttgttttgggttcaaatagtgctaggtcgtttattcattccgccaaggggggcggtaggggtcaactccgtctggccaactccgtctcagcaatgttcaaaaagctataacttttttctttgttggccaaacttcacaatcatggtatggctaatagagcctgtgaagagctttcgaatgatatcaagattgtttgattcggtcaataacttcaagagttatattgactcaaagttggctcagacggagttggcccgttccgcaaggggggggggtaggaaatcaaaaaatatatcccataaaaattcataacttggcttaaatttagccaaattaatattttatggtataattagtagctctatgtgttctctatcagaatattttttaattacttttgcgcatttggacttttcctagcacctaattgtcaagtacataacgggcattaaaattttataaaaacgtaatgaaaaaagtgaattttcttcaaaattttcttttacctattttgtttatttcaatatttaaatagaaaataaacatggtaaaagtttccatatttttttccattttttatgcctttcttcatgtgattttgattactaatttgaagtgagttatgaattttttaatttttcactaaaaacaccactagaaaaaatcataaaatttttcaaattaatggtaaaatttataagaaaataattaaatatattttcttaacttccatatcattgactgaaaaaaaaatttgaaaatttttagaaattttgggttttttttggggggaggggcttttattcgaagggggcttttactggagggggaggaggccgagaacgaagtttttttttacatcccacatgatttactttttctgataaatttgttaaagtaagccgaaaattgcaattttccctcggcgtttcccttatttaattttaaaggcggacttgataataatgattcaaaaattagaataatatcgagtcaagactcaagaaaagtctcgggctaatgggaacgtggacttgaatctatagtcaagtgtcggtcacgattctttggaaatttcgatttcgagcagaactgacgcatagcttcggagatgaagaacgtcgtacccaacaactgtttaattaactaatttttgcaatatgataattttcatactcaatcactcgtttaattgattaataattaattaattaattgaattaattatttaaaaaaatatattttatttaattttttatttttgcaatataataattttcgtactcaatcattcgtttaactaattaattaattaaagtaaaatat

SEQ ID NO: 542 - DNA, 1039 bp, Heterodera glycines
tttcattttgtccattcgctttatttttgttcattaataaatttatttttcacaattcgtacatttttgttccgttcaattttaataataaaataataaaaaaaaatttttttagcaaaaaacacaaaaaccccccaaaaaaatacccaaaaaaaaacaatgtctcgacaattgcccctaatcatgttcgtaattgccctccaaattgggtttgccgagggcggctttttctcagccgtcaccgacttcttcgacaatgtaagttcggcacttttttaaatgttttcattcggaaatattcattaattttgtaaaagaatttttgggttcaatttttggacaaatttaggtcgcttcatcatgcatctgacatatttttcctataattcgaaccctgccccaaggccgaaactcaatcaaattcaaatttcacttttacattaaagtgtggcacataaaataaacagggacacactgattcgtgatcagcagcgagactcgcttgattaatttttgtttattttttgcggaaaacacaaattttgcgtgaaatacaacaattaaaaaatgccgtaaatgtttgatgtttcctaaatttgagaccggcattttgaaaaaggcatgggcctggacctggattccgtgttcgatctgggcctgagcttccttgataaaaacccatgtccagaggccgatctctaatttaaatcattcaagcgatcgcttcttccgctttgcgttaaaaacggggacataacggcaccacccccctcactttcaggttggccagtcacttgaaaaggcctggaacgatatcaaagaacccatgctggatgccggggctctttatctggcaccactcagctccttactgccggtgacaagttttggtgcattagttgcacttgtgatcgagaaaggggtggataacccacacggaacgggcacagaattcgcatgcggcccgaacaccaacgccattttcaaagttgggaaaaaagcattatacataattcaaaagtacaggattccattttta

SEQ ID NO: 543 - DNA, 5527 bp, Heterodera glycines
  unsure (1)..(5527): unsure at all n locations
cccaccaactttcaatgacattccaatcgctgggactcaatccaccagcatttcaatctttagggactcaaatctccggcattccaaacactgggactcaacccaactttcaatgacattccaatcgctgggactcaacccaccagcatttcaatctctgggactcaaatctccggcattccaaacactgggactcaacccaccaactttcaatgacattccaatcgctgggactcaacccaccagcatttcaatctctgggactcaattctcaggctttccaatcactgggactcaattcttatgctttccaatcactgggactcaaatctccggcactccaatctctgggactcaattctcaggctttccaatcactgggactcaattcttatgctttccaatcactgggactcaaatctccggcactccaatctctgggactcaattctcaggctttccaatcactgggactcaattctccggcattccaatcactgggactcaattcttatgctttccaatcactgggactcaattcttatgctttccaatcactgggactcaaatctccggcactctaatctctgggactcaattctcaggctttccaatcactgggactcaattcttcttatgcataccaatcactgggactcaattcttatgctttccaatcactgggactcaaatctccggcactccaatctctgggactcaattctcaggctttccaatcactgggactcaattcttatgctttccaatcactgggactcaattctcaggctttccaatcactgggactcaattcttatgctttccaatcactgggactcaaatctccggcactccaatctctgggactcaattctcaggctttccaatcactgggactcaaatctccggcactccaatctctgggactcaattctcaggctttccaatcactgggactcaaatctccggcactccaatctctgggatcaattctcaggctttccaatcactgggactcaaatctgcggcattctaaacattgggactcaacccaccaactttcaattcatatggtcagacatttcttcttaatatttaatgacaaaacaattttaaaacttacttggcaaacgttaatacaaaaataagtgtaaacaaatagtcatttattaataaaatcacaaatcaaattaaaagtcgaatttttcagattaaaaaatgaaaacaaattcaaaatcctatgcttcttcaatgcaaacaaatcaaaaacacgccgctctttaactatcaaattattttctcaaataacaaattcatttataccattaacaaattcaaatgaaaaacgcgaacaaaaaaatcattaaataatgtagaaaagtaaaagtaatttttctcataaaatcatgaacagccattttcattttttgtttattaattattttaaaataaggaagagatgcgagacaaatttcccattatctctccctttcctttcttttactctcttttcttttccattgcaatttactctctttttttcccactccctccttctcccacacacacgcacgcgtccaacagactgctgctgcacagcagcacgcgtctgttcactgtatgcccctctgatccgccgctgcccgcgtagacagacaatcagacagtgcactattttcccacctttccctcgctctacttttttcaaatcattttttaacgcaaaacaattacaaaacgccacacaaattcaaacactggacacacacaacagacaccaaactttttatataaggattttgttcatgctaaaacaaaccctatctttttgtatcattcggaagcaacaagtaattgatgattatgattaattaatattgttgatcactttcgtttgtaacttcctttaaatgttagcattctgttgttttcccgtattattacattgtttcagaatttgtgattcgaatttcgaatgataaaaaagataagtttagttcgaaacatgaacaaagttattgtataaaaaccaggaatggttaattgattggacacataaaatgcaatagaattaaaattgataaatatgtattatgaacaagattttttttaatatggataaaaattgtatctgttgggttggttagtgattttcgtgttgaattgtatgtctttaaataaaatttgagaacatttatatacagtcatggtttcatatgcttatggacaaatgccaaatcgagaaaagaatgggtgctatgccgtaactcaaaaaaccacatcaaaatgaaaatttttgacccaaaattattcataacttcgtccaaaatgaatcaaaatttataaatcttgatattattcgatagccctaagtgtttttttattatatttcaaaatttcaaaaacttttgctaagttgaaagaaagttatgaccaaaatattgaaaaaactttgcatttgagcatctcaggtcataacttttttaaagcttaaagaattttctgaaattttgcaggataatagaaaacatttggggctacagaataatatcaataaaattttaattgacttaagcaaagttatgggaagttttttgttgaaaattttctatttgatgattttttgagtaacattttgattttcgttatattcggatcattcaaaagtccttgatgctctattagccttacaaaaaagcctaaaaattttctagtatatagaaaagttcttaagaaaatattttaaaaatttcgagtttttagttcaaaacttgggctggcgccgaaacaaccccacaacccgttgccttaatttctgnaacaataattaattttaaaaaatgacaacaactgagtgaatagacatagtgcccatattttatatggtcatctatttatgtataaaatttttattnnttatgaccaaaaattatgaaaaattcctgctaagctaacttttgatgctaaccgaaaaaagccttttgcagaaacttgctcacatatcactccttcatagtgacggatacactgaaaattgggaaattttgcgaaaaaaattctatgatgaccacctaaaatggcctatgcactcacatgttattttgttaatgattattatttcaaaaattgatttatatgataaaatgaccataaaaatgcaacaaaaatatataccaaaacattattatattagttcgtttcaaattcattgaagtcaaaaagcaacaatttttctaaatttagtatttgtccatgacctatgaagatgtctgtagaataaagcataaattcaaaaaaaaatcacttaaatattcgaaagatttttaagttttttgtccgtcgtattcatcaattttttaaccaaattttaatttaaattaattagatgttctgcaccaatgctgtgtaacgcacgatgcgtgagtttgtcaattaattgatgacataattattataataataataattgtctatgtatacaacgcatgaagtatacggcaattattggtgtaattaactaatgagttgtaattattatttataaattgatttttctgattttttaattagtttttctgttccatttagctgctacggtatctgcggtgaatcgcagcaaaactgcgacgaagtcttctgcaagtgcctcattgtatgttcatattttttaattgttcaaaaattaaaaaatgattaaaaaaactgtaggaaagcacaagttttttccaatgcggccccacggcacggtcattttgtgttttggtgagagaactcgggaaaaaagcattcgacgcggggcaggtagtaatttggaaaaattaataattatattattattattattaatattcaatcaattaacatttacaaataaaataattgggaaaaaaataatattaaaaaacaagcccggcatctttagccattttttgggattcttcccggcaccatacgcttcaaagttcgagagtctcgttctcgagtatcgactcgagaaaggtctcggatattttggtcacagtctcgggtgttcagtctcggtcatcgagacttccgagaacgagacattttttacaccccctaatgattggcttttggtatatttaaaattaataatttttggttattttttgtttcttttcctttttccaacattcctggtccggtgggctgtgatgttggttttattcattatttttgcgttgatttatggtgtaatgtaaatcttttaataaataaggccaaaaaattacacacattttcactcatcggcgcctctccctgaatttttcttaaaaattggtctaaatcgcaaaatgttgtcattttttgattaaatctgttgactaagaacgctgaaattttcaaaattttcactatcatcagtagggctgggatttttaggcacaaaaatcgcaaaataggcacctaaaaaggcataaaaatcgcaaaataggcattaagtaggcacaaaaataggcaaaaaaattttttttaacgctttttaggtagcaaaacacgtaaaaacttaagcaaaacatttgcttatatttcatttgttttaaagttttcggataagaacaatttttaaaccaaaaattttaactaaattctggggattaatgaaaatctttttcaattcttagtggtgtattttctgaaaattttccatgtcgattcttaggggtgtatttttcattttgattgcatttttattaaggattttcccgaaaatgctgaaaaggcgccaaaaatggcgaaataggcacaaaaataggcaaagttaggcattataaaaggcatcgtagacatcccaaaccaagcggaaaatgcttttttcgtgcttatctgttcgtattaagtgcgcaaaaattttaagcatttgcctaaaaatcacagccctaatcatcagtgccagatctccaaaattctatctattttttaactgactcaaaaaccccttaagtattttgaattaaaagttttatcgaattaaaaaattgcttaagaaaagactcaaaaaagaagttttaaattttatgcgtataagaaaatttttgaaaaaagtcttggggtttcggattttttggtgtcggcctcagtctcggtctcgagtctcaggaaattcagtcttgagcatcactacccaaccatcaaccccggcattttggccattttcggagtcattcacgacaccggacgcttccaccagcacaaatctcgaccctaaccttcaatccatacattttgccattttcggggttattcccgacaccaaatgcttcctgtcccggcggatcccgcccgttcctctgnnctccggctcggagtcggtgttctctctctctcctttggtgggcttttttgtgtgggtgatgtcgtttggtcttgttcggtggnctttgtttggcctcgttgggctgttggtcctgagtcgttcctttaaagtgcgctgcggtttgccctcctttcgcttttccctattaaaggtactttgttttatatatttttacataaaatatggatg

SEQ ID NO: 544 - DNA, 1821 bp, Heterodera glycines
attttaataaaaatatttccaaataaaatttaattctaaaaatgtcccccaacaaattcgcgcttcttcttttgttgatttgcttcaacatttctgcggccaatggatttaaaagcccattctccgagctcaaaaaattctttgagactgtgagaaagaaaatttgtgagagcttagccaagaaaatgaattagcaaatgtcaaatccaagaaaatcgggcatttaattagaaaaattcacagaattatccaaattttaattgggcacgaaaacaacgaaattagtatagaattttcgaaaatcttgctatagtcaattttttcaaatcattagtgccaaataatttgaccgaaaaagctcaatgatcagagcaaagaaaatttcgggttttcattaaacaaaaagggttctctaaggtcccattttcctcacacttttccccctaatttatgcttggctaagctttcactgatcagaaaggatttcctgatcaaagtctcattctctgtaggcggtctctttggtggccgagaaggccaaagaagcggttgaatttgtgaaatgcactatttgggtaagaaatccacgaccataacaaatcagagatatcgtattaactcattaaaattacacagcattttaacaaaatctcgagaatttctcgagtcaagaatcggtcgagtcgatgataaatattttgaaaaatttttttttttaatttttcattttcatttacaattttattttattttatttaaggaggaagcgtgccagaaattgtgcgaaggttcgtgccttgacccgcaaaaggcgtaagttttgagttgtaatgccaacataaattcaaattttaatgactgaaaagatcataaatggaactttaattatttattcaaatgaattcatttagctgttactcgaaatgcggcaacacgaagcaacaatgtgatgatgagtgcaccaaatgcgcagtaatttttgaaatttaatacattagaacaattttatcaaatcccgggtccactcatcagactataattgtgctaaagaaatttccaaaaaataacatcgtattgtaaaaattactatttttaaaatattgttattttattgcttgaaaaatcaaaaatgttaataataatatgctaattaaggtaattaaggacttttattatttaaatatctattaaaatgaaaatattttatagaatggtccgctatccaaatgtaagggcaaatccgccgatttgtgcttcccgagtgggcatgagaaggcattcaaagatgcacaggtagtaaattatgaatttagaaaaagaatactacgaaaatatttataaaattaactggtttcttgttttgatatatctcttgttaatatggatgaatcggaacgcgtcagatcggccccggcacgtttgggccccaatggcctctcggccatgatgcttatgctcgagccgcgcacagacgatgattttggtacaggggggggggggctcgttgtcaaattgtttgggctcaaatttcggatgttgcattcaaaattcaaaaattctcgagcctcgactcgagaaaaagtctcgggttttttagggttcgagtctcgggaaattttcagtctcaaaatacatagtagtcttcagttgaccgccttcactatttgtacacgcctattgtgttgctgatgttcgctttgttggcatccgccaaaaattatgctggccatccaattgaatgttttgtgcctgcatattttacgcgtgccatggagcagtacagcgagtatgaggaagaggacgggacgggggggggggggt

SEQ ID NO: 545 - DNA, 2751 bp, Heterodera glycines
gaccgtaccggtgcatgtgtgattctaatacatataaagctacaaaatcccccttccagtctattcttcaaaattgaataaaaaaccagggatgtacgaaaagagagagaggggaaagggatgagaatgagcgacagggagtgagagagtgtgagagagagagagagagagatgagaaagagtgacagagagtgacagagcgagagagggatgagaaagagcgagaagaaaaagcaacagagagtgagagagataaagggaaagggtggagaggagctcagaattgcaaaaatgacttttgttcttttttctgggacttaatttttataccgtttgatcaaaatcttttgaaatgaacggagcggttgcgctcctataggctaaaattccaaaaaaacccaaaacttacgagccttaattattataagtttctacaaatttagaaccagagctgtggtgtactgaattgtgaaggtttacaaattatttttctaatttttcaataattttggcaaaaaactagggatatacgggatcgggaccggggcgggaattcccagtcctccgaggtcccggtcccggatttacaaaatctatttcccggccccggtagggcaaacgggaaccgggaaaaataagcactggtaagaatggtgggtctgagtgaaaaattagttacgaaaattggagttaaaggaaataaagttaaaaaaataattaatatattgtaacgctgcaaattgtgcgaatggcctagtggctaatcgtcttgactttcccttcttctttcccctggttcaatccctctacagaaattaaattattttgaattttctttttatatactcatggggttcctatcgacaaaatatgattgctcatttgtcagcgttgttttttataaaataaaatttgaattttttaaatttttttgaatttttaaaaattcccggttggtcccggtcccgaacaaaaaccgaggtcccagtccgggttctcaggtcgcggcaggtcccggtccctgttttggcaaaatttcccggtcccgtacaaccctacaaaaacctttaaaaaattttaaatttctggcagagaattcaatttgattaataaaaagaaattgaaattgttttatagaatataaaagcaagtgccttgctgagctaaaaacgtaagttatcatttattaaatgacttacaacaaaaaaggggattaatcaaattttaattaattttttctatttagctgctactctgtgtgtcgcggcattgacataaaggattgttacgaactgaagagaaactgctcggcaaattttaaatttatattaaaaagataacaaagctaaaacaaagaaggccaaaatttcggtgatttcgctcatttctttcaaacttttgagtggttatataatttataaaataaattaatttataagtgcgaaacaaatctttgcagaaacatttgtggaaaatgggctggcgcgtgtgtgggccagtagttgtcttttcaatgcatgcaaatcaaatgcacgccgaatacgaggtgcaattctctaagaagttttccattgtgatgattttttcctgctgttttgtaattctttaaaactttattttttcaatgtagaaaagatgcgagcagcagaagaagaccttcaaacaaattccagccgatgaattattggttggtttcaattagattcaattagagttgtacggcacatgggtctcggtctggattgtgcccggaaccccggctttttcgggtcgatattctgggcccgctctttccaaaaaattcttaaaaagattaatcattttgtgcaaattttcttagcatttcaataaaatattttttaagcctgccaagaaaccacataaattggcaattttggtgcaaaattgaacatattttttaatgttaaaatgatgcttaaaaattaatattttttattaatcacggaaatacccgatcccggcttttctggtttcggtttcgatcccagtcccgggttttccccggaattccgatccaatgttagggatggtcttggatagcagagtttaatttttcaaaaattttcattaactgtatcgaaatttttaaatattttctttttaaaagcaattgtaatattgcaataatgaaaaaccttttctttcattcaaaccatttacttttcacctttaggagaagcccgaaaatggtcagatggagaagaacgcgggaatgaactcctctgatggtgaaattagatttttaaataatcaatcctttaaaattttatattagtcactttaaaaattagaaattagctttgcatataaaattacgaaacatggccgtaaaaaatagccaaaatccatggatatccaaaaacttggacttaaattttgtataatgccaaaatatggtaataaatcttgaaaaatttaagtctataagcttctaaccaagctaagaactttttatcataccttcgacagtttaaaaaaaagtgggaggattacaaataattttcggttttatattaattagccatttaaaataaataataaacatttatgtgtaaattatatttcagtgccgccaaataccaccactaattcttgatgccattccgttcccctcaagcggaggagaatgaagaaaaggaacaacaaatccaagtcaccaaagccataatcaaatcctgaattcgccataatcatctccaaatccgcctccgccataatcaaatcccgaat

SEQ ID NO: 546 - DNA, 1576 bp, Heterodera glycines
  unsure (1)..(1576): unsure at all n locations
ttcctttttacttttgtactttttctgaagcatatttttggtccaaattgctaaagctaatgtaaatttggccaaatatcggagaacgaagagaaaagtgagtgccgaaagtgcggccaaaacggccaagtcgaagttgtgcagctgaacccagcccatgtgccgagactcgctcaacagctcgggaaactgacccccgttcatctccaaaaagcgaatgttcttcaacagacgctctttggcggtgaaaggctttaaaacggatggcacaaactcaatcgatagaaaatgaattacaaaatgccaacctttgttgccaacagtcgatgggttctttttgcgttggcagcgtaactgtaaagggaatactgtaatcccatatggtatttgataatatagcgtaaattgcctttggtcttccaacaccttctgaatggctgcacggaagttttcgctgccttccaataattgccgcttttccacaacctttccccacccattgcgctcggccacccgtccgtttcggtgctgatcagcgaaaaagcccatcagaaggacgggcacacccgcattagccgcctccagcagactgttgaagccgccgtgggtgatgaacagacggagacggggatggcctgggaaggaacaatcgaatgggaaatgaacggacaaaatgccgaaaaccaggctaattaaatagtcgttttaggtttatttaaaaattttagcatgatcaggactgagccaaaaaattgagaaccaagaaaaaaacaacatgtaaaaacttaccaagaatgtccaactgaggagcccaagaagtgaagaaaacattgtccaaatttttggccaaattttccgaatacttaaaaagacgagttttctgttcacttcacttcatttttacattgtcatctttctccactttgacaatgaaatggtagtttttaagttgggaaaaagcctcgaaaatatgccgtcgaaagctctcgggcatgtcactgctgcgcataatggaacccatggagaaaaagaccactccgtcggtgcctttgcccatttcggcgagaaagggttccttttgggagtatttgccaatttaaaaaaagcaatcggtacttttagtgcgatttgtttcgtttttccgtcatggcttttctccattccaagaccaccgatataaatgacattggaaaaaaggggacgaggaaagtccacaaattcatcagaagcaacgaaaatgagcggcgatttgctgacaattgaacgaaggtcgggaaaagcatttcttaagcgtaattaatttattaatccttctaattaattactttttttaattaatcatttcttttaaagaaatgaaaatatttaaagaaatccacccaaaatgttttcggaaaatttgtgtcaatgggtcgatgccaaaactgagataattgtagccggcgaatttgtgtagcaaattttggaaccgttgtnaaagcgacattttgtcggaccaatttgaatccccatcatgaggcacgaaactggaggnaaaacgaaaggtcatcagcgaagcaaggtgctcttggaggga

SEQ ID NO: 547 - DNA, 3383 bp, Heterodera glycines
  unsure (1)..(3383): unsure at all n locations
cgttaactttttgcttttaagcggtgaattgaaattttggtcatttcgaatctgttgaaatgctaaaataaatgaaaaatttaaaagaaagaatattaatgttaatcatgcatttaaccaaacattcaccaattctcagttcgttcaaaatgactttggccgttgccccgttcaaattggcgccaacgttttgttccgggaatgttggcgtaattattggcattgtgagttgttggcaaattgtcgtgcgcaaatgtgcgtgcgtcgtctgccgttttatgaaccattcccgaaagggcgaccaactcaaaaatccgccgtccctttcataatttatctcggctaattggacgggcaaaggccaattccttgaaagtaataaacgctaatgatgccaattaacaataattgctcaccaggtggaataagtcaagaagaatttctcgaccaaaaaaggcattgacccatttgggtacaaaaggaatattttggttagcattgtcaaaagcattttcgtgttcaaaaatcccatcaaatcgtccaaaatttggttgtctaaatatgtatttaaataataccttttctctaatactcaattaattattaatgaattcattactttttgcccacaattccaaataagcgagaatttgccggaatttgtccaccttttttggcccttccttttccacttttttaaattaatcatttcttttaaagaaatgaaaatatttaaagaaatccacccaaaatgttttcggaaaatttgtgtcaatgggtcgatgccaaaactgagataattgtagccggcgaatttgtgtagcaaattttggaaccgttgtaaaagcgacattttgtcggaccaatttgaatccatcaatgaaggcacgaaactggagggaaacggaaggccaatcagcgaagcaaggtgctcttggagggaacagctaaagtatgactatttacaataaaaataataataattaattaattaatgggctgaacctgctgagcacaatgttcacgggaatgtccagcaaatggccaatgcccgcgccgcaaaagttgagctgctcggaaatgatcacgtcgaagttgcgcttcttaagcagctcaaattgttgcgattgcgttctgatcaatgcttagaacaaaaggacatttattattattatcctattttggcaaagaccttcacatgcgtcattcagagaagcttggaatattttagacgagaaaaagatgtcgaccaacgaaggcttctcaaaggcactgtcggcgagcactttgaaaaggctttttccgccaaaattcacattgaaaaatttgccaggaatttgccaaagattggccaattttgtcgcatttagcgccccaattggcacagcgtactcaatttcaataaaggtctaaaattggaattaattaatcgttccatcaaacacacaactgaccacgtcgtgcccgtcgcttgccaatgcgtcggccacgcgtccgttcgaaatcatatgacttcgacttaatgtcggactgaacaccaaaatattatatgccgtagaataaaaattcattgttgaaacgaagaggagaagcaaaagacccaaattggaagagaacatttcgtaacttcgagattagttctactgaaaatttctttgtcaatttcaaaagaaatatttgctgattgacactgacatttcttggcaatgaacggacgaccacaattatcacattttatcaattcgacgaatgttccgtttttcgctgatgtttccatttttgtattttgtattttgtgatttgatttttttccttttctaaacattgttattttattttttaaatttattttattttattttttgctgatttggtattatgcgatgttttgtgacagtcaaatgttttatcatgttaaaaagattatgtaatccttagagaaaatatcatgtgaattacatcatttaatagtttcatcataatcatcattttattttatcattttttgaaaaaatatttcgttgaaatggaaaaaaatattattacgccccaaagtccgaagaggaataaaataatatttattcaaaagaaaaggacaagggcgaacagggtcaaatattgacggtgggggtcgattgggccccgccggttgggccccggtacgattggtccccatggggcagtcacttttttagtcgacttttggtttactttcactaaagaaaaattattacctatgtatatttttaaataaaaaatggtttttttaatcgttaactttgttgcacattaattaaaatgtatttttttcatgttgggttcgaacctggacctccgaaaaataggaatttaacccactgatccaccgtttttttaaattttccccacttcaccaccttccctgaaggggaaaacacagtcaaaattttgatttttgaggtccaataacttttctatttggcttcaacacaccgctaacattaaaaattcagagtagccggccctgcactatcaaatagttatgatacatgcattttctgacacagttctgacggttcccttgttagatttggcccaagctataagcttaattttgtaaaaaaatgtattgtacgaactgctattgtacgagttattgcctttgtaagaatggatagaatttcatacttaataaatttatgaataatttaatttttttaaaacatgtgaaacgaaaaaagtggctgccccatggggcccaatcggcggggcccaatcgtactggggcccaatcgacccggtccgcatcaacctgtggaatatcctgcgcaactcgtcgacatcgcgcgcttgacgatgctcaaattctcgagcaaaaattgcggcgggacttttgtcatccattcgacacaaagattctgcactgatttttctatgccatatttccttaaaagcccacccaaaatacaaacagaagaaaaagatggcacagagtcaatcacaatctcattctttgtacaatgaaaaagtaagaattacgaataattaaacggtcaattaaaagaaaaacggaccagcgcagtaaaataaacatttttctcaaaaaaaatggaaaatgatggcagattcaatgtcagtcgaacaacgctttgtacttccctttgagcgcgtcattgaaataaccggcgtaccactccaaatgctcgtgttttttctaaacgcatttttacagttaataggtgaacaaaatgagtgatttcttaggataccttgacggacatgtacggatttctggacagtccgttgaccaccaattccatgaagtgngccaccgggcccgaacgtggcaatttgtacttggccaactcagtctccagaaacacgtgatccgcgaaactgtactg

SEQ ID NO: 548 - DNA, 2882 bp, Heterodera glycines
aaatataatataatttaacaaattaatggtcctatcccgaacacctccccctttaaaagtgtttctttcatccgcgcgaataacgatcaggtggacgacggtttcgcttgggtcgttcgttttgaacattctgttgaacggcacgttcttcattgacctcgtttggctgctgtggctgatcgggatgcggagatggtggcgctatctcaatcactcctccagctggttgtgccacaacatcgccaagttgttgattggcctgtgccaatggaagtccaaaggcatcattcaagatgtcgagggaatcttcctcatcaacatcagaatgtcgaaccataagttggttcgcatggaatcgtccaactgatccgtcctgaaaagtgacgtcgtacatcacaccttttttctgagtgatgtgcccgggtcgccaatcctgcgacagtcgatgccgggcgtagaccatatcgtctaagtcgaacgatctcggcctcgcgccatggcgtcgattgaacttacgctccattgcttcatcgcggatgacgattggacgtttttttggtttcaaaaggtccaatttcgatcggattttcctctgcaggaacagttccgctgggcttttgcattcaggcaaagactcattcggcgtgacacggtatgtggctaaaaatgtgtccaacatttcggtaattccttccttctttaatttgcgacacgtccgtttgaatgtgtcaacgaaccgttctgcttgtccgtttgacatcggacaataaggtgccgaaaacaaatggtttatgccgttgagtcgggtgaattccttgaattccttcgacgaaaattgggtaccgttatcggtgaccaacgtttccggaagtccatgccgtgcgcaaagatagcgcaatttaccaatcgtggcggctgaaccggtggaattcatttcgaagatttctggccacttggagtatgcgtctacaatgacgaggaacatcttcccaaagaatggtcccgcatagtccatgtgaacacgcttccatgggccatcggattttgtccatgaatgaagggtagtctttactggtgcttttgcctccgaagcacatgtttggcaggaacggactatttcttcaatttgatcgtcaattccgggccagtagacatactgacgagcgagatttttcatgcgtttgcagaatctgaatgacctgatcaaaggccttctgacaatcggtggaccaactccagaccacatcttgcttaagcagattgtccaaaggttggcagatgaaacgcatgttcttcacgaactgctgataatggtttatcatccccaaaaacgaacgaagtgtggacaaattggttggcacaggcatctcagcgatcgcctgtattttggctgggtccggccttcttccattcttattaatgatgaagccaaggtacttaatttcccttttgaagaaggagcacttctctggcttaattcggaacccaaacttggcaattcgcttgcagacctcttgaaggtgcttcttatgttcttctggtgatcggcttaccacgatcacatcatccagatatgcaactgcgaatgcacaaccagccaacatcgaatccataattgactggaaaatgccgggggcagacttcaccccaaatggcaaacgttggtactgaaaatttcctcgatgagtggcaattgtgcacaactctttataattttcgtccagctcgacttgtagataagcatcccgaaagtcgatttgcgaaaaaattcggcctccattcaaagtggtgaagatgtcttcaggaagcggcaggggatgagaaaacctcaaaactattaaatttgtgtccattaattaattaaatgtccgctttcgctttgcgcttcgcttcgttcctctccctcacggcactgctcgtcgtccgatgctccgccgatgagtcatcgtcgtctgaggaagagcaaaagcgtcccattagcgatgccgccgtgccatcgtcaagcaatgaaatgccgcaagttgtacctgctgcggttgctcgtcgaaagcgaagcattttcggtaatttctttgcggggcttttccatcgcaacaatgagacttcgacggaaggtcgtcgcccgtcgaacggcacagagtcagcggaagaagcggaaaaggtaaaggaaaaggaggaggagaaggaggaggaggaaaaggaggaggagaagaaggagaaggaggaggaagaaaaggaggagaagaaggaggaggaggaaaaggaggaggagaaggaggaggaggaaaaggaggagaagaagaaggagaaggaggaggaagaaaaggaggagaagaaggaggaggaagaaaaggaggaggagaaggaggaggatgaggaaaaggaggaggaaaaggagaagcacaatgcgactgatcagtccgccgttgggcgcgagaagcgcagcccatttggcattttcatgaaatacaaaaagaacggaaagcaattgagcattggtcaacacgcaacaaattaaaaggaataaattttaattgacttgtctaatttgataattagttttttaatgattgattattattttaaaaaaattaaacacacgaaaatatttccacaaataattcttctatttaattgtatataaatattacgaaaattgccattttaaaataaattatttgtgaatattttttttcgtaccacttgacggatttaagctaatttaaaaatgcgctagcattctctttaagttaaatattaatttttataattttcacatgtagcaaatttcgacattaagcaattttaaaatgccaccttaaatctaatcattggcgcttcaaaaagcctcaacttttcaaacccgatacaaaactttaacc

SEQ ID NO: 549 - DNA, 6573 bp, Heterodera glycines
  unsure (1)..(6573): unsure at all n locations
atttctttgcggggcttttccatcgcaacaatgagatgtcgacggaaggtcgtcgcccgtcgaacggcacagagtcagcggaagaagcggaaaaggcaaaggaaaaggaggaggagaaggaggaggaagaaaaggaggagaagaatgagtaggagaaggaggagaagaaggaggaggaggaaaggaggaggaggaaaggaggaggaggaaaaggagaaggacaatgcgactgatcagtccgccgttgggcgcgagaagcgcagcccatttggcattttcatgaaatacaaaaagaacggaaagcaattgagcattggtcaacacgcaacaaattaaaaggaataaattttaattgacttgtctaatttgataattagttttttaatgattgattcttatttaaaaaaaaacttaaacacacggaaatatttccacaaataatccttctatttaattgtatataaatattacgaaaattgtccattttaaaataaattatttgtgaatattttttttcgtaccacttgacggatttaagctaatttaaaaatgcgctagcattctctttaagttaaatattaatttttataattttcacatgcagcaaatttcgacattaagcaattttaaaacgccaccttaaatctaatcattggcgcttcgaaaagcctcaactttcaaaacccgatacaaaacttaaaccttagacgcgagaatctcgagcacattttatttaatcaaagtattattccatctatggtttttgacatttcatttatttatttgccgaatttagtcaaccaaaaccgaacgtgggcatattttgtacagctcataaaaaggccaatttctcctttctccaacaaatcaacatgttttttcttctccttcgatgttattttatttgccattttcagcaaatcatccaaagattgcgcaattaccaaaattgcccattcggaaataaaaaattcaatcccaaaaactggtcgagagcgcgcggccaccaaagaccgaccggcaacgagcaaacaatgaaaacaattaaacgccttttaagggtccaattccgaaaataatttcttgaaaaaatgccaaaaacatcacacatccttctgatttgcttgcttttcttcaccacttttctagtaaaaacagaagcaaaaattgaagagacaattgaattggaacgaaatccatcggcggaaaggacagaagggtaaaatggcaaataatatcaaaaaaacaaaacgagtgggctttcttattagctgaatagatcgttaccttctgattgccattttttggcattccgtgcatatttcatcaaaaaaaaaagtttttttaaagaaagcccatttaataacctatttcagcaaaccctcgacgagaagaaagcgccatggctggggatacggcgggtacattatttgttttttattaaacttttatttacatataaatccctcctcagctgttgttgctgcggcggttggggatacggtggctatggcggatacggtggatatagcggatacggcggttatggtgggtacggtggctacggcccatttggagtcggattggtaggccttaccggaggactgcttttcggaggatggggcaaatagagaagctcatgatcgctaacacttttaaaaatataatcgttgaaaagaaaaccttctgctttatgtgacaatggaggatgattggttatttgttagtctctacgacttttataatttaccgtatttcttgagttagaattccccctgaattagaacccctccctccttgaaataaagccccctttcgaggggagttgaaaaagtccctcccacccccccccccggggttttaattcagtaaatacggtaaaaaattttgagtttcgtcctaaatttatttttcaattttacttaaagcttaaaaaaggtttaaaaagctgctcaagtcaactaaaacttagacaagacgcacacatataactaaaaatgtatgtgacatatgtaattactataagattaagttataaacaggattgacagatgaaatttttcaaaatcagcatttcgctaaaaaaatcagccttaaaaaacatattccaaatgtaaaaccaataaaaaatgatcaatattttatttttcattggccaagattgctttcatcttttttttgttcgaaatcaaattttgtaaaattctatcagcaaatacagtagctttagccaacgacttcactaaatttgtaaataataaaaaattaaaccttataaaatctgccaaaattaccaaatttccaaaaaaaaatatagctaacatcagcaaatatcagcatttaaaaaaatcagcttcgaccccttcaaaggcagcaaagtgctaaaaatcagaacatctgctggcaaccccagggttataagctgctcaatgaaattaaattgtgaagcgatgatttattttcatagaaaaaatgaatcaaaatgctcgttttaaccttttgcaagctcattaattaaacaaacagattgaattacattaaaaaaaagaaataaaatatcacattgaattggatttgggcaatagccggacgaacaccccttttttgtgaaaagaaattcagaaaatatttcttagtcaaatcgcctgaaaaagtgtcacttcaattaaattctaaataaaaatgatttttaccgtaatttgagttcatttttctcaacatattctgagaaaaggtccacagcatggaaaaggaaataattaaaagcatttttaacttttgcatcgaaattgcccaacatttgactcaattcgcttctgagctcggaatccacaattttcccgggaagaagctcaattccgacaagccattggctaattaccctaacaaaaacggttaattagttcattagttggtcattaattatttgtttatttaattatttgtgtttttacctgttgctgtgctcgccagaagaagaaccattcactgagaatgcttttgggtaaacgtggaaaaagtccactcgctttgacaacagagaagaattttgtagaaaattatgcaattcatagcgaatgcttttcccaacaaatggcgtgaatttggcaagattaatttgatgcccggaacaaacgaccaaaatgaaatgggcatactgaaaccaaaagaattaaaattttttaagacaattagcgctttttatattaggccatataatttattagttagcagattaaggtatttatttcattaattaatatttatattaaatactccttccatttcataaaatactttttcgttaaactttttgcttttaagcggtgaattgaaattttggtcatttcgaatctgttgaaatgctaaaataaatgaaaaatttaaaagaaagaatattaatgttaatcatgcatttaaccaaacattcaccaattctcagttcgttcaaaatgactttggccgttgccccgttcaaattggcgccaacgttttgttccgggaatgttggcgtaattattggcattgtgagttgttggcaaattgtcgtgcgcaaatgtgcgtgcgtcgtctgccgttttatgaaccattcccgaaagggcgaccaactcaaaaatccgccgtccctttcataatttatctcggctaattggacgggcaaaggccaattccttgaaagtaataaacgctaatgatgccaattaacaataattgctcaccaggtggaataagtcaagaagaatttctcgaccaaaaaaggcattgacccatttgggtacaaaaggaatattttggttagcattgtcaaaagcattttcgtgttcaaaaatcccatcaaatcgtccaaaatttggttgtctaaatatgtatttaaataataccttttctctaatactcaattaattattaatgaattcattactttttgcccacaattccaaataggcgagaatttgccggaatttgtccaccttttttggcccttccttttccttttccttttccttttcgtccgtccaattcccatttaaatattccccctcaatttttgcataaaatgaataatctaaattgcaatttcctttctttttgtttgttttgtgttaaatttaaattgcctgctaatgtttggagcatcactttcaattcttgtaccaaatttctgtcttttagtgtctttcttttcttttttaccagaaaattacaaatttcatccattttttcgattgtttttgaataaaatgaactcatttcatgatttgacacttaattgtttaggtgccacttttagactttgtaaaaaataagtcataatttcacaaaaacaaaaaaatttaaattacctattttttttaaatgttttttttatttcttattgttaaataggtacatactaatgttttttaaaaatattttgttaatttttttcattattttttcccacttgaaatttccatttgcattttcttctccatttctgcccttctcttcgccctgtctttcaagtcatatctgcacattcccatatcgaattggtcattttttatcagatgttctattttgtttccaatttctttttgtaatttttcaaattctcgccaattatattttcctggcggtaattggccaatgtttggcattctgaaaaattttaattcgaacaaaatgtccataaatttgagtgtcattcgtggaatagacattttttgcatcgtggaaaatttatacaaagaattgacattcgaatgctgaaattgaattttgaattaattgttggcaaagtgtttgttttttgttcccatggcattctctgctcaccctgcaaagtgtgcagtggagggattggtccgcgcattggtcgccccttttggcgtcgctttggtcgcattggaatttgccgaggacatttcgctggtcaaagccatgcggcaaaatgccaatggcgtcgatttggtccaattgcatttgcaaatgcattaaacttgagaattgaattcgcacctccgccgactaaattggcaaattaattactaactgtttttccaaatttggcccttccctttctctctcacccaattttgaatgattttctccaatttttccgtcaaatttttaagcgtttcttttgaatgatttattttttgcgtctcttttaaaatcttaaatttggctaatgctttactcaatattatgcaataaaacagcaaaacctgctttgttttttcctcatttatttttgaattttctccgtattttatttcttgccatccttccggaaattgtgccaatttcgtcaatcggaatttctcacgttctttttcctcaaccatttcaatcaaattcgcttctttggtcaattcgttaaacaatgtttggtctaaaaattatttttaattcaaaaatcattgaatttggccaaaaagtaaattaaataaaatccaattagtaatttaattgcctaattttctctgcccatcaaagtgtttgacggcctttaattgctcttcgaattccgctcggtgctttggcattccgtcctcgcgcccattgttttccgtttgaattagtgccaaaatcactttgtccattttgcgctttaattggcgttccgtttcgctcttggccattgtcttggccaattttctcgagtgcagctgacttttcgtctccctaatctctgcccataaatttgtgccgttttccgcacaaaatccgtccattgaggccacaattttcttcagcaacaaatgcaatttggccatcaatttgttcctctcgcatctgctaattatcttgcttaattcaaccattttaagcttttcccattgcttttcaatttccaatttttcgtttttgccaattattttcaattcctccaaagtgccaaaaagtccaatccgattcgaaatttcgttggcataaactccaagatggagcgtccaacacaaagttttgactgttaaagcatcgttttcctcgtcattttcccaactttctttgcttactgcccaaaacagttcgccatatttcaaactcagcaaattatcgtctgaaaaatgcccgattttcagatgaagcaattcattttggtccaatttgtcctcttcttccgaattttcttcactttttgtttcccaatttgccatttcctgttcatttctgttcggcactttgccatcaaattttggcattttgccattgcaattttcttcttcttcttcttcttctgattcgtagttcgcttttctctcactttttaattcgtttaaatttctcttcaaattgtcttttacttttgagctcagttcttcttcttttgttttccttttttcttccgctttttctcctcgatttccaattattttgttaccatttgtcgnccctttcgtcactccctaatgtttgatcatttgtcctactttcatattgatcagctgcatgaatctgttctatcatttttccacctcttactgattgaatgtcttctaaattttgaccatcaccaatttcttttgtcgtcactttgccctcatcttttggcgttactttgtcctcctcttttgtcgttaattt

SEQ ID NO: 550 - DNA, 12232 bp, Heterodera glycines
aaaaatggacattgggccccggatttttggaaatggtattatttttttttacaattatttgtttgtttgtttgtttttgatcaattcccccttattgggatcgtttttatagggcagaaaattcgttttgcgagtgatccttcgcgaaaagatgggcgatgggatttggaagaatcatgccaattgttttgctcttaaattgaattaattattaattcgttttgttttttactaaattatttaaaaagataattaaaagtctgttattataggcataaataaataaacgataaaaaaaggttcaaaaaccctcaaataggcgtaaaaaaaagctaaattaaaaacagattaaaaagctaaataatttgaaatcaaaaatatacaaaaaataaaaatcttttgaaggatttttctgaaatttttggtcaattaacttcttagggggaggcattttgttttttttcttatgcaattttgcgaaatccctaaaataaacattaaaaatggcaaaaaacatagacagaaaatcggcgcgtctgggcatttgcatctagaaatgccaaaaaaaagaaaaagaaaaacttaataaatcaccaattgggccgaaacttctttgtcatcacgaagcgcagcacttggctgcttatccttgccaaatttgatgaaaaaaagttccgttattttcattgcctcttccatggcattcactgtgtatgcgaagcttttgttggattcgtagcttaaaatgtaattcaattcaattttatatttatttaattatataatgccaagcggcaaatgcctaatttgtcatttaatttaattagtctaatttcattagccctgtccttaattgatttggtttgatcacttttaaaaattaaaatatttgcaaaaaatagaaaaaaaatcgatatattaaaaaataataattaatattagcctaatgattccattgtagcggcgaattttccaatcagtttttgtgattgattctatttgttagttaagtacttttgatcagtgaatgaaaagtccagcttggattccaaaatgatccgttgcttttccgcttcgcgatgtgtacacaaacggatgcgaaatccgtacgccttttggcgcgcgttttggagatgttcttggcaaaaatatttaaaaaacaattggagtggcaaaaataggaaattataatatatgattaaaagcacaaaattccatttttttcaatgccttaaaattttttgagcactttgaaagttttttgcaccaaaaagaacagtttttttaaatattcaagataatgggaaaaataaggacggaatttctgaaaatttaaaatcatagaattaaagaccaatgacagtcctcgaatttgtacattggttatggtttttttaaaataattttatcacagataatgtgccaacttctcgcagttcggtgttgttggcaccttttgacatgcatcaaacaaatcactgctggtccgagactgattgaacatagtcgagggatcaaatggcgccttaaattgttcgcacgcaataaaatagggagaaacggacacattcagccaaaactgtggcatacggtcggcaaacacaatttgtgtacagtttgtgcccaaatggtcaatgtttgacgctttcggcacaggctaaagaaaataaaaaactttattaagagaaattttcagggcggccacctgcatatcgaaaaggctgacattagcagggacggagaaaagctaacttattacaggaaatcaagcaaccatttggattacagtacccattcatcaactaattcgattgtcgtaagtatactatcattacagtacccaccattgttttgcacattttcgttccgtgcatttgtccaatgcccttggtaagttccagtgccacaattcgcaacgccattccgtcaaaatctttcataaatgagccaagcggaagtgcctcttcaaattcagctgcagaaagtgacccattttgctgtatcagagctgaaaagggaatagaaaaagcttcagaaataatgtattttcaaaaacggggatactgtgacggtataagggtactgtattcttcttctccgtccttattattttgatagatttataaaaagtcaaacatttaactttttattcataatggtaactttagttgtaaaaatgtaggaatgaatttgataaatctatagtatcacatgtaccttttactgtagccaattaaaaatattcttgataagattggacctttggtgaaattgagctctcagaaaaccggcatcgctgaagaaatctttgtccaaattgccggacaaattggcgctaaatctaaataaaatatgtaattagcccaaaaacactcgcctgagggatgaatggaatgccaactgcccgtcactcttcttgactatcattaagctgtgccatccgccgttgcaatgatttggcccaccattttcggcacatttcttactcaattcctgcaagtccatctttgcaactctctcatacgtccattggctttccaatttccgaaatttttggccaatttgctcgggtaacagatcagataactaatatgaaattaattttttttaaattaaaatgccaaaattaaaaattggtacacactttttgccgcctttttccagtctaattgcagtgccattttcaatcggttcacatttgtcccaattttcataatgaattctaaattttaataaaaaaaatgccgccgttaattaatttttttatataattagtagaagttaaacgaaattaccctccataaactgcgacagcaatcaaaaaatgatcagcggacggaagaacattccaaagtttaaggcagctaacaataagcaaaaagtaaaaacagacacaacaaattaattgatagttcggtttcaaattacacagttaatttaaaatggcatttttaattgattcagagagagcgactgggacgtacctttgtcggatgaggccaagaagcaaaagatcagctgaccaacgaaaatggcaccgatcagtgaaaaattttcttctgtaaaaataaattgaataaaattgaaatactgtaatcagtgatagctgtgcaacagaagcttaaatttgtaggggaaaatgcctacagtatgatcaaatttttcattttttgtatggtttgccttggttcgtttgcctttgttcgaatccataccgataccgtagtccatgtacgggttgccagacccagtgccggttccgtgtcgtgcggttgcggggtgtgacagctcgaccactttgactgatgaagcggcgcccgttcgcggtccgtttggcatgccgagttcggggggcagggcgaatttgaacgaaagagcggacaatgaaacaagtaggaagagcagtggtcggcacattatgatgcagagaatactgtggttgggatatggaaaaaacagacaattcaaacaagagcatttaaaaataaaaccacaaatcccatttgatttttgtccgtttacaacaaaaagaatgaactgaaataaatgatggactaattgatggaataaattttcatcaactgctgtggtggtggataatggtgatgattcggcgtcaattggaagcagaaaacagaaattgtgatcgaataataaattaatgaaaacggatgactcatctttcattttttggtggcttttttaaatttttagctttaattaatattccataatttactgagaacgaaactgcaaaatttagctgatagattctaaaaacgaataaccttttcggtactcttgggggtttagactaaatcagaacaaattttagaatgtgtaattaattttttaaattcattaggtgatggtgctgaaaatcttcaaacatcctaaaaatcttctataacaaaacccggaatcattctggagaaaaatattaattatatttttaatattttccagccttttcttgaataaaagcgaatttttgaaagttttcgaacaataaatttgtctccttagatttaatagaagaattagaatatcaatgagaaaagggctttaatactgtcaaccttttttttgcctgtagtatttattctcggatgatatgaatcatagaaatgtgaattgtagttttaaagtttggttgcttttgagcaaattcataatagacgcaatgaaaatttttattttcgaaaattttcaaaaattcggttttatttaattttggacaggagaatattaaaaatacttttatatttttctccatttgttttaagttgccttcaagagtttgtgcaccaacacctactgaatttaaaattaaagacgcaacgaaaatatgcttcttaatttagctaaactcccacgattactcaaaacaatttattcatttttggatatacaattcacatttgcatgtttcctattatcagaggaaaattattattctaaaacgcaaggggaaatttggcaccggaaagtttgggcattataaaattgggcaccaaaaaatttggccatcaaattaaggaaataaaaatattttaatatgtaaataatatagccgtctaatttaaaagcatagttgtaaattataatcaaattcgagctgtaaagtctttaaaaaattgcccagtcaattaaccatgtttatatggttgggattcattacaattctttgtatattaattcatatatatgtattatttgtagaaggctcaatctgttgaagactaccggccttgatattttcgttcccatataatctaagtagtctaaacccaaatataaactggtatgcatcgaaccctaagtatttaatgatcaaatcatagcgtaatttattttttaaatttttcaattttcaaattaataacattggtgcccaattttcccggtgctcaaatttctggtgccaaaatttcaatttcaggtttggattttttttgggcacataaaatccgaaaaaaaaatagtttatgtattaaatccaacaggtgacacgcaaacctttttcgaatggtaatttttcttttcaatataaattaaggaaactcttttcatgcttttcttaaaataaaattcttccgtgcgatttaatgccattttaaaaaatgccattcggatcttttggctcaattcaaccgtgccacatttttacttttttagaatttctgttaatacaaaaaaagatataattaattcactgaaatgtgcatcttaatttcacacacgcacaaaattttttgccgtgcccattgagataaaaaaatttcacattaaatggcaattagtcaaaggcatacaattaatggagaacacaatttgggtacaacggcacatcagagacggaaactctctctttaaaggcgagttgagaagttataatttgcttcttatgccggccctccatttaaaactccgcacaaaatgccattataattaaaagttttagaatattccaatttttattacattttttctattattgcatactgtaaccgtaaaaaaatgctttttagagaaagaaaataatgatggcttcttcctcagccattccgtcgcccatcgacaattcctttccgaatttttccacaaatgtctcagctgcttaccaatattttgtccaattttgtgacgacccaacgcggcgtgacctgacgctgacctcgtccgccatcactttgttcatcatttacgcgcttggcattgtgtcccaattggttgtgctgcccgccaattggcgcctctccaaacatcgctccgcctttctgctgctcctttacattgtgcgcatattttgagtttcaaaaattgaatttacaattaaacaagagcagtgacgggaccagtacctgtttttagtaaaaaataaactacccggctcgaatcttgcagtaccggcggtaccgcaactaaccgtcctgttgatatcgataccggtcgtaaacttgcatacggtatcggcataggtgatcgcagtaccggcatctgctttagtgaagaataccggtgccgctctattcaatttacaaaattagttgaaatcttttcaatattctatattaaaatttgttaattattatagaatttaatacacatggcatataaaatacaaaatcatttccatatgtcggttttatttcaagattaaaaataaaatattttggctttagaatctcttcgaccttatttggctgctcgaatatgtttggctttccttggagtttctcgttggcactcgcgtacatgcaaaatacccatttggtgcctatctgttccgtttcgtcaatttttgcattgacactttttacatcgaattggcattcaatcggtgcaccgctttccttttcccacgtctttacagcaaaatttgcacagaaaagtttgtccatttaactaatgagaaaaattgtatttggtgttgccaagtggacattttttgccttcgagggaaacctttggggtttttagagaaatttgaatttaattaatctataaatatttaattaacgtcatttttagcgtatatctgatgaaattcataattcgagaaaggatttataaaatgccaaaacatttaaataaatattttcgaaaaatggtttaaatatttacaaaaataatgactaaaaatgaaaatttcgagaaaataatgaacaatgcattgaatattatgaaaataaaaacgaaaaaaatcggttttcactttgcattttccaaattttaaataatttaattttaaatttatgccgccatttgttaaggaacatgaaaacttgcgttgtgtgcacatgtatcgtgtcaattgtttattcaatttacatgaattggtttccggagaggcgccctttccattgtctgattcagttgggctatttcgaaccgatgacatccatcacgaaagtgtgacgaatgctcgcttttagcttaatcattttaattatatttaaattttaattaataactatttatttcttccagtatatcaccgcaacattgccggacgcggggctttatgacgcggttcaaatcgctgaattggcttccatttgcactccctttttcctctatggcataacagtaatcaaaatggtgcacgatcacaagaagaatccctccacaagcataagtatttctttttttattgtgtggttttttggttgcgaaattattcattaattaactaattaatgaccttcggtaaatcccggtgatatcccattaacggggggggggggatgctaaagagagccagcgaaggaagaatcgtcttgtgtgggtcttttgaaaagggtcacttctcgttctcgacccaagaaatctgagaagatttattgtattgtattattcattttaattaattttatttagtccaagttgcgactgtgatgccgcgcgggagccaatcgaacggagaggagcgtgccaaatttgtcaatttgatgcaggaacgcactcggctcttctccatgtgcttgctcagccaagtgccctactatttgtcccacgcgctttaccaatcgtcccgaatatttgagctcagcgaagacaccgttcaggtggaaaaaaattggcagaccaataaaattttgaaattttcagattttggccatcctttggcaacttctcggcacaatttttcatgtccaacagcccattctgatgctgttgctcagcaaggatttgcgctcatcagtgcgcaacgatttgacaaaaatattcggcacaattttgtgacccttaagagcaattttgattataatcatatgtagatgtccatttttaatgataaaatgtgtgaaatagacaataatgaactgcaaaattgatacaaaaggctcattacagtaactttaaaatggcttgtgtaaagtgcataaattaattttcagctttttccgtcaaaatgtgatattttttttttttttttttattcagaagaaataaaaatatccaacgaaggggtgaccacttacacgttagattttagtaaagtaatatcaagtccaaggagctcttttacagactaaatttttgtttaactcaatccatttatttattcgttttttgaaactgtcaacagatggagcatctgttatatctttgttgagtttagaccatattaaggccgttctgttgataaaagaatttgaagttttactggattgtggttttaacacaactttacgtctaagattgtaagggatgtgaccagaaaattgggggaatatgtcttttttaagatgagtgagaccattgatgattttgaatgcctgaactaaatcaattgtttttctcctttcttctaaagtttgaataaatcaagtctttgttcgtaaggtatatacggaagcctacatttaaataaagcaatttttgtaaaatatttttggcatctttccaatttatttatatcttttttgtatgtcggattccaaatttcgggcgcatattctaaaagaggacgaatgtatgtcttgaatactttggtccaaatacgtatagagcgggtttttaaaattttggcaatattgcgaatccttaaataagcagctttaataattttagtataatgatttgaaaatcttaatttattatcaattaaaatgcctaaatcactaatagattcaacctcattaataatattgttgaaaaatttatattgttgttttgaattatttttgccgagaaataatataaatgttttattttgggagatgtttaaaccaaatgaattagcccattttccaatattgtctaaagcaacatttaatttgcttctttcattttagggggggggggggttcgcagcgaaggtttgacgcgaattactggtacaatcgttgaaatattcttggtgaactcgaaaagtaccattaataatgcctaagtgcattcgactaaaagtttacagccaaaggacagcagaaattgttgtaccatgtatttattgtgttgagccactgcttaaccaaaatccgttttatcattagccatttttatcaacgatcactcataatgaattaattacatacacataaaatacaatggaaatggtcgcatttgcgagcaagcaaaggtcaaatacaaacaaacaattggcaatatttaaatggcaaattgccaacatcatttcggtcacataatcgcaccaattaattaattcatttgttctgctgttattgatcagttttcactcggcccgggagaagcggcgtcgaggagaagactgaaaaaaacattgttcaattgttgattggatcataaaatcattaagcatttttaattattcacccgtcgtcgaatccgccatctctgatccgaatgtaaattgggttctgtcgaacatacatttcttcccacacattgtcccattttcttctatcccacgcaattggacaacggaagaggcaacaatcatgtgcatatatttccagtgccaattgctccccagtcacttcgttgatccgatcaaatggcacaatgaagtcagctagagaagacatcggaaagtaaatacaaaaagtaaccggagaagaagcattggaaaatgcctaaaaagcggacaaaaaatcatagaaaaaaaacaattagggataatcaccgctttgaattgttccatcgttgacgaccattgatccggtgaattctcaaagcatctgagccacttgggcagaccatccggacgaggcgtgaacaaccattttgccaccgcttggccatccgatgcattggcactttcatcgggcggaaattcagggagaatgtcgccatagaaaatgacagcgcaaaggaatggacaatcgttgagaagtgacggggccaattggcgcaaacggcgaaaagcgatggagttcaagaacatcagatgcattgaatggcgaaacattggcaaaatgttgagcaaaacaaattccaaaatgcgaacattttcagtgcgaatgtacaaaaccgttgaacaaacggcgaaaaaacggtgaaaacggcggagaaatgcgatgacattttgatcgatgtagctgaaaagcagaaaattagatgaaaaattaaccaaattaattaattttttacaatatattaatgtgtctgaatccgatgactttgttgggcaacggattttgcgggattggcaatggatttccatcggaattgacaatttgcatttgcttagtgccattctctccaattttgtagcaaattcgaatttcgcccaatttccatttgcgtgtcttgaagtgttcgtcgacgatgcagttaaagcggcggttgatcagtgcaattccaaggccgagttgagaaggcgcaagaaaatcgaacaccaaaagccaacaatctccgcagataaagctgaaaaattggggagaattttttcgaaattttcaaattatgattatttattttacatttcttttgtgtgagggcgtcgtcgttttttggcattgtccaaaaagaaccaaaaaagaatggtggcacagccgaccaacagaagaagaaacacggcacaccatctgaaaaatgaatttgggaaatgaatgaattaataattgaagagaagggaaaagtaattaaaggatcaaagttagctagtaaatacaaatgtgaagttatagcatccaaaaaaagctaatctttcaaaattggttttgaaatttaaatgcgaaacgttagaaaaaaaaggaaataataaacgtacagaatttctgaagacatttgcagcaaaaaaatgaccgggaaatacaggaagaatacctaatgagagaatggaatgatgcggaggaggagaaaaaaacacatttttatactaaaaattttagcgtagcgccccgagttgtagcataattttcgtcaaaaagtcacaaatttttgccaatttggggtcacattttcagaaaaggaaaaaaattttggaaattttaatgatgtatgcccatcaaaattcgctttaaggagcttcggataaagcaattttatacttttgtatatattaaagcaatttttatatttcttcagttacatcgaccattccgtgatcacatttttgagttccaaccagcaaatttgggacagaagtggcaccaaattggaattgtctattgaatattgtgaccagtcaatttgggatgttttgtccgtgaaatttggcctatctttgcgccaaacattcgcaatttggtctttcctaatgccgatgatttggacaatttgcgtcgtcacatttcaccgacaattctcactgatcttgatcaattgaattcaatcaattcctattttctggtgcctgatggaattggtgatgatgggccaaacgcaactgctggccaagcgttgaccaaatgggtgcacactccgagcaaaaatgggcaaccgaagcgattgtgttgctttaatgctaatggtccacagaatctcgaatggatcaacaacttcaaagaggtgtgtctagccatattttcgtcaatttgtttttgttttaccaatttttgtgtttaggcattccgtcgtgccaccacttctgtcagttaccatattcaattttatttttgggtggaaccaatgccaattgaacaatttgaattgatgaacgaagtgacgaatgaaaagctgacattgaaacaggagatcgacgaattcgacgtaaatgtgtataattgtgagctgcggtatgacaataatttgggcgccaatttgaacaatatccgatttgatttgtggggtggaaatagttgttgcattgggtgagcagcaaaagcaatttttgattgttgaaaaaataaaaataattttaggccattgtcgctgccagcgaaagaagaagaagcggatgaaagcaatgaaaaataattatttcgagaaatgatcgatctcaccaataggaatcggatttgatactctctttttctccgaaatgtttttgctgattatttcgttcgaataaaacgtacatttaatacagtggtgtgatctgctgttcttatttctatgaaatctgttaaaaaatgatttcaatcgatgctagtattgtggtgcccgattggattgctgatgatggaccaaatgcaactgctcgccaggcgttgtctaaatggttgcataccagggctggacgtaattacggattacgtattacggattacggaaattacggcctttttggagttacggattacgggttacggatttttgggatttttccggaattttgatccggaactggcttttt

SEQ ID NO: 551 - DNA, 3921 bp, Heterodera glycines
acatagcacccatattagggttgcgacccggccccgaccccgaaccccgacttttttggccattttcggggtaaaccccgacccccgacgcttccaaccccgaacccgaattttccaaccccgacgtcggggtcgcaaccctaatacatatgatccaaaaaatgatgacaatttgttttttgttttaccaattttgtttatttgttagtcattttccgtgccaccacttccgtcagttacaatatgcgaatttctttttataagacaacaacgccaattgaaccatttgaattgctgaatgaacggaccaatgagaaactgacaatgatgaagaaggatttcggtggtagtgattggctgttcaaacggtgcccaattattgaagaaacggcggcggttcaaaaagacaacaatttggaccatttgaacggagttcacttcagtctttataatgattgctttgggtgagcagcaaagaattggccttacttttgtataaaatacggatatgacggtgtcatggcaattcgtacaattttaaattgatgtggccataatttttttagaattttggcagagctccaggagttcctgctaaaacagcagaggacttcattcagtccctgtcttgtcctgctggtccatctaggaaacgctgctggcccgggtttttaaaaataattccgggttctattttttcaataaaaatgtttcatcctttcaaactgcatttctttagaccactgtctccgccagcagatcaaaacgacaaagaaagcttctcgactcccgggcccagtgatcagcagaagaaggagcgatcatttaaggaaatgaccgatcatttgagttaagatgaattggattgaatttttggcatccctgattattataattcagtatttcttgaaagggaaaagtgtgctctaaaattgcattaaacaaatgaacagacggtaaggaattgtttaaaaattacaaatttccaagcttttttcccccattttttcagttggatttgtaacgacgtgtggatggacattctgccatcttttgaccatgcccaactcggcatcaaaatggcactgatttccgaccgtttcgatgttttggtggacgcgcatttcgatggaaaaacaacggaattggcaatttggagaaaaataacaattcgcaaggacattggaccaaaagcgaaagtcaacaacaggtgctgctgcttatgacaacaaacaaattaataatagagatacaacaggctccgtcggaccaattctaccaacggcaccagcacaaccaaacggcaaagcatttgaagaatgctcaacgactcaaggagaagcaaaatcggcaaaaacaacaatttattgcaacaacaagcacaaacattcccgataaattcatttcgacctttgcatggcaatgatctctgccaatatacctcaacaaatgttgaccgacttattgccaaaacaaaagccgtttttgtcaaatcgccttacagagtgaagacatttcgagacaaaatgccagatttacccttacccccaaaccagtgtttgggttacttggatgtgtgctgccgcttattactgggagtattttcaatcagtcaaagcggtcgtttttcaattagggttaacttttttaatttaaattaatttaggtagtggactcgtttgatccgaatgatgctgcctgtgttgaggactgtcaagaatgttttactgattctgtgtggcaggatttggcatacattcaatcaaattttggacgtttgagtcatgcaatcacaaagttggaaacacagggccttaccattcaagagtcgctggaaatttttgcgggtgtacaaaacgaaatggacaatgcaattggtgaaaaagcagaaagaatccgcgaaagatttgcttttattgtttcgaacaacgccggtcttgaaacgtaagaaacagagcaaaattttcaaaaatttacccggcggcgcctatcggcaccgccggccctcactattcttgaaactttttttgaacaaagccaactatcaatattgtgcgaaaacaaataaaaaagtcaagtttcaaggatgaccccatttaaataaaaaataattaaatttctttaaaaaacttgctcgaaataaagctatttgggcaagatcagttaacaaatcccaacaaattttcaaaaattttccacataaaacacaatttttcttaaaaattgggtaagtatttctcatatttccaaaactcaaaaccatttaaaaatgattggattcaatttagaacgtccacaattatgcgaaaaatgcaaattattagcgcgcttgctaatggacacttcagtacccgatttttttaacttgaaaaatgcaagcgcacctataatttgtacctttttgactttttagaccgattaaaattgcaaaatttgctggttttagggataaaatctgttagcaaggttaacaaattgcactcacattttcaattttacctccggcagcgcctatcggcaccgccgtgccccaaaaacttattatttcataaaattggctcaaattcgcaaaatggggggggggggccggcggcgccgatagacatcgccgggaaaaatttgtaatttttaatccgatttgtttacagtttttttttgtcaaaaaatgaccttttgggccaatcttttaagaaaaatggtgactttatgccataaaatttcaaattgattatttttccattttttaaatgctcatttccaagtacgtccttggcatccaaggacggttggcagccctgttctaatcatcaagcaatagccaagaaaaagcttttaacatgtgttaagctttcgaatggtatcaaattgttgaatttggtcaaatgtgaaaaaaaattatggctccttaaacctctttggcacggaactgagaccaactgctgtagtctaagtatactgtattacaagtttttatgatgttatactgtatagtacagaatattgcatatatatttcactgtatgagtgttttgattcaatgcagaaatttatcaaataatgaaaaatttgcattgttaatcaattgaaaaaaatattttagttttttactattaatttttgagaaatttattagaaaaaaatggcagaatttttgcttttttagataagaggagcaattaattgttcttaagaagacaaaattatttagaccaaaaaactcgttatttagctatttcttgaaataaaataaaaattacaattttttaaaataattttatttcgccttcctaaaaactcacagccttattaaataaaaattgtcatatgaaaaaggaattagcatttaaaataaagcacaaatttatgaaaaatatgtggatcacaacaaatgattaaaacatattaaggaaaatttgtaatataaaataaaattttccatttttgattaatccccatgatttggggtgtgccaaggacgtagcaacaaaaatttttttttgtgaatggtgccgtcaggaaaattttaaattcgtttttttgaatttttcagaatcactatgcccaaaagtggcaaatttagtttaaatttggctgaattaaatgcatcacattcatgaacatctgctgctcaacaaaacccaccgaaaacttttgttttagcgatttaaaatgtttttttttcgaaaatgggaaaagtcgaaagttcattactatgctcatttcttacagcccttgtccttttctggatcacatgccacacaatgaatttcttcaatgcgcatcggcacaatgtctttttgctgccagtaataccagaagctttccgcgctgccttcccgtttctgttgagaatataaaaaaacaaaaaatacacacaaaaaaaccgcaaaatgtgacaaaaaaatccaaaaatatgtgtaa

SEQ ID NO: 552 - DNA, 2026 bp, Heterodera glycines
  unsure (1)..(2026): unsure at all n locations
ctgcctttttcctttcgacccctcccccctccgctccgtccgcaaactcttggctttggttgttcctccatccgttgccacacacgacaagagagtgcgcatcattactgattatgaattgaagacgattatttaaattttgatttttgttaattttttgtgcactcccccccccctcacttccccttccccgcttcccactccttactttcccccttcccaccccactctttccaccaccctcgctgctctcttcccttcttccttccctgccccagagttttccttttttcgtttgttgtcctgacaactgaagcagtctttttaggcttttcctctctgatcaaaacagcctatcagcaaaagacagtgactgtccgcgtttcgtagccttcgccatttccttttttctccaattgtcccttcaattcaatcgattccgcggttcttttatttggtacgattttataaattaaaaaagacaaacaatcacccccccccccctccacagctgacgacaaatgcccagaaaaggttgtttgtttttcatttcccgtgtttatacatatttctgccgtttggcacttttatcgggcaaatataagccgtaaatgcacgtcaaacattttaccataaaatcttaatttccttctcatttggcagcagatgttcaccggtctctggagctgctggaggaatatcatgcggaattattcagaccatcggacgctgagttgaaaatggccattgaaagggtggcctaacaaatgtatttggacaatcacatttttgtatttaaggtgatcaatatcttcaaacattctcttttcaattctctttgtggtacttcgggagggccaatcgctgaattccctcctcccccccccctcacagatatccacgaattctatgaaaatgttctgctgaatgaaagagtccccctgggcgacaaagtgagcgttgccattcgccctttggcgtttgcctttgctcactcatttaattttcgatatttgaatcgcgtcagtttgtcaagcgttgggagcgttctcccgtcggcacttccttggccattcctcacattcctatggcggtgccttccatttcgcccctcgggcgtccccatcctccgccccctccccgctctccaagtcggccatcgtccaaacattcctttgcaggcgaccacggttcattattacaaacttctccggttggttttgtcactgtcgctgcttaagtatatgtccaattcccctcgtcagatcaaccgaattgtggacgaggagggccaagagtgggaggtggaggaagtgcagctggacgtgtccaagacgggactcggattctcaattagcgggggttgcgaccgcgagcctgacttgatgtataacgaccgatacattcgcgtgactgacatttcgaaaggggtgggtcggcacgtacactgtcacgcgttggggtggcactttagggcgccgtggagacggaccgacgcattcgcatcggtgacgtgattctgttcgtcaacgattgggagacggccaacagagagcacgacttcgcagtgcaagcactgaagaacgcgggcacttttgttcgactggtgagaattgtgccattggtaacaaatgggcagaaaggcaacactttcagttagtcaaacgcctcaaatatccgccgctgcaaaaatcgctgagtcaaagccatttgagtgagcccatcgccagcggcaccttccaacggtcgttgagcggagtcgcggccgacagccgaacattgcctctgcagccccccgtccgttcccgtaagagaatgaatgggatggctgtaccatggatacaacgattggactgatcattttagaatcattgcaccatttgccgatgaatgccgtcgcaacttcgcccaatgttgtcactgcgatgggcactttgcccaaggcgggcgaatgtacagcagcaatttgcaacgccactanatgacccgggcagacagccgagatggtggcgaatttggggggggg

SEQ ID NO: 553 - DNA, 1622 bp, Heterodera glycines
atttgcaacgccactaaatgacccgggcagacagccgttattgttgcgaaattggggggggggacggcatttgaaccgattgatttgagggttgccatccgaaaaggcgaaatgggcttcggttttaacattgtgggcggcgaagatggcgagcccgtgtacatcactcgcgttgcacccggtggagcggcggaccagaccggcaacattcggatggtaaaaacgaattgtgaccatcggaaaacaaatattgactttcccaagggagacgtattgctgcgtgtcaacgatgttgacctgtcaatggctacccacggagaagcagcggtcgccctgaaggcgattccgcagggggcccaagtgaaactgctattgcaattcaggcctaaggaatatagcgaattcgatgaacgattgcaacagcagaactacagatgatgttcaggaatatcagtggggggggggagtaaggaacctaaccaaaagtggcaataatgctgtataaatctggatgaaatagctgtgaaagtgacataaaataacaaattaaacatttttggcatttaaaactgagaattaagtgcttctttcttgttcaatgcgagaatgttttgtcagcagttctttgttcaacattctttgttgtgtttggtccgattcgggaggaagcacttttatcgcgtgaagcacatacccaccagaaatctgaattaattgcagaagtatagcttaatcgttgttttctaaccaattgctgcatgatgggatgcgttcggtcggggatcacttgttggaaacggaagaattgctgactcaactgaatgtccacggccgagccaaccgaccggagccatttccaagcattgagcaaatgctgaaagaaaagattagactagaaaaggattaataaagtataggaacctctttcactggcgaataaatgacgattgtcccagacaggcgcagtccggcgaaaacttgtttgagaatgtccaatgggtcaacggtcctattacaataaaaataaacgaaaacatgtttacagttaagtcaaataggtaggtgacccagaaaacaatcggaatttgtggaacgaaccaatggtccgcaccacatgaggcggttccacgccaattaccgagtggccatgcaaatcgagtcgatttgtccgctgtgctccgccgtgggtttaatcatttccatcgctcgccgttctctctcctccctctccactctcttctgtatttgctgttcccggcgttcctggagtcaattccaacattttaaacaaatcgcaatgcaattgcctctgccacatcctctcgcttgcccggatccctttcctccgtgtttttcagattgttcgttttctcctcgtcccgtccattgtttcgctggagcagtgttgtgattcgtaatgtcaaaaaccctctacttttctaaaatgtaaaaataaaatattaaatgatatgtagcttatgctttgcccctttgcttaaaatttaatttaaatagccataaatttagtaaggatgaaaatagcgggttaatcaccactttttattattgaatgttgtttatttattcataataaaggacaaaaatcggagatatcgtataac

SEQ ID NO: 554 - DNA, 2732 bp, Heterodera glycines
  unsure (1)..(2732): unsure at all n locations
ttttaaacaaatcgcaatgcaattgcctctgcctcataaaggcnngcccggancccnnnccnccgggnnnnncacatttaacgannncnccncgncccgnccanggnnncgcnggagcagggnngnganncgnaaggncaaaaacccnctactnnncnaaaangnaaaaanaaaanannaaanganangnagcnnangcnnngccccnnngcnnaaaannnaannnaaanagccanaaannnagnaaggangaaaanagcgggnnaancaccacnnnnaannanngaaggnngnnnannnanncanaancaaggacaaaaatcggagatatcgtataacaaaaaatccaattttggaaataggcgccagtctgctcatgaaataaattacaaatatttacagttattttgacctgagcgtcagtagtgaatgagtcaaggcatggaatggattggggccaatcgccgcggtgaagaaaaatgcagtggccaaaagggtttatccgttccaacacagcagcgccaagcaatccgagaaccgaaaggaagaaagtcatcaaatgggaatcaaatgcccaaaaataaggtgaccaacttggtcgaagacaaaagcattgcatttgccggagtgaagcccggaaagctgaagcatcagtccgagctggtcaattctaacggctcattgttaatttgattaccagtataattcagtaaattttaacctcaaatgtccgagtcgttcggggtcctttcggtagtaacagtcggccaaaaggcgaatattgggctgcaaaataacaacccggtcctaaaaaaacaaaaaagctttggaaagaaaagaacagtcgcaaaccgaatgcttttgaactttctttcgcatatatttttcttttgaaaattttgtacgagattggaaatggcaatttccgctgaccaatttggaaaccttaaaattgaattttgctgaatattaatgaagaggaaagttaaaaaaaaagatgtactaattcgtttgtagtgattccatcctcttttaagctcataatttgattgcttgtaagttgttgagtgctttctgaatattattaaaaattccaagaatgcatgttagatcggcgtttttttttaatttccattaccatttccgtggcccctatctcctgctgaattcccatttgaaaattcggttttaaatggctttgaggcgaattcaatggggcaaagcatgtcaccaccattgctgaccttaagcagaagtgtgttgtcagactgatattcaaacaattattgttatatgaaaaatacttcgaaaatcccataaaaatgtccaattgcgtctttcggattaaaactcagtcgttcaattagcacgcgttgcccacttatcaaacggcacaaacgaatatgttcaccaccaactttacgaacaatagcaaaaacaccttcgtgaattttagagggcttttggtgccaattcattaataagaataggaattttattctgaaatactaagaaaaactccgaccagcagacaggtaattactttattcactttcaatatttttccgttattcaattcattgcattgaactcgataaatctctcctttcctctctctttgacgttttcattgaaattgtttacttttgtttgatctttgagcagttgatgtgttcctttctcgttctcatttcacacccaacctccgtgctttttgagagaatgaacaaatcttaatttttaaaatttttttttgaaaaaaattttcatgaagaatttggctgatagaattcttgggtttccatcatttaggtaaatgtagtaatgatatatatataattaccaaatctaattaaggaaacaaaagacaaagtctaaaaatgaccatcaacacagacaaagcgaggaggtggtgggagagacaaaaggggcatttgttatgttgataagagaagttgagacgaaattgcaccaaacggaaagaaacaaagaattggaggagatgcgagaaaaggaacatgacgagcatcagcaaccccgaaaagaggaaaaagagaggggtaagtctaacgaagcagaagtagattacgcacctttataagggagacagaacagtgcaatttacaggagatgaagcagaaattgggctaaatgacgaggaagagagggcgacatggacaacggaagatggggaaaacgaagagatggatgaagcgaggaaaggaaggacggatgagagcgaattggaagaaagggtagacgaaacggaaaaaatgaaccaggagagagaatggcttcataggcaaagaaatggagaagtggaggtgggcacatcggagattagtccaaaaaatcaggatgtgaatggtggatgtgacctattcgcgtcacgaaagccataatttttcgcaaatggaattccggtacctcattggaaaacaaacgtaaagctgcaccttactgacgtacaaaaattcatttccaatatcccttttaatgccaaggtccctttaatcaaactttcttattcggagctgtttactattttatcgacttatctctcatattgttgattaatgattgcaatagagcgaaacagcccgttgttttcatcaaaaggtggatgagagagagagagggtggggagcgaaacaatttattttattgcatttgatatgtatgtaattgaaaaaatgtaaatgaactccctgattaggtacataattaattaa

SEQ ID NO: 555 - DNA, 1773 bp, Heterodera glycines
atgaatgagacagggattgcgaccaatcggtcggttgccccccccccctccaccagcaatctcctccaaaaatcattcgattatactttgagtttttatcctttttccacccgttctatttttacgctttaagtcgttcggtggccaaaactgtgcgtaaccgttttctttttgccttcctttccatcaattcaaaaggagagggagggaagaaacgcattggtttaactttcaaatggaatgactgttttatatgcatagtatgtgtacatacataattttcatttaatttagaaaaaaacgcaattggaaagaggccaaaaggagcacaattttaaattcaaagacgaagaaaaaaaggcgcaaatggcggacgaaaatgaaagtgagcagcgatcactggagagaatggaaaagtgagaaaaggcaaagagaaagccaagcgcattttaaaatcaaaaaattcagagacatggaaagtgttcaaatgaacggaggacaccagcagcaggaggaagttgaggtgaagcaatgggagaattgttttgcagtcaaagcattgctcaaaacaaatcagaaactgcaaatgacactccgaacattggaagagaaactgcgaaataccaaccaggaaaaggactattacaaaaaacatttcaagggagagaatggcggtttgtgtctttgtcctgctcatccgacaatttattgttacaaatctttggctaatctttagggactcataatggcaattggcgtggacaattgacagacgactttggcaaggagttgctgatggccaataagagaaagtaccagctggagaacaggaccaagcagttggagttggaattgagagagacgcagcaggtgggagtggaaccacttttgtggaatgtaactgattcatacatttttttggggagggtcgcaaattttgaaattttcttaacaaattcattaaaaatccaaaaaattttccccggcggcgcctatcggcaccgccggcccccctgtttccttttttggaaaaaccgcgccgaaaaaaactgttttttgaaatgcaaaaaaaaggtcttcggcggccgaccctccttcgcaaaaattttggccgacccacccccctttatgtatgaactgattagcactcattgattggcaaagccaacatttcacttttttaagaggtgccatcatttgggggaaagtgtgaaaagcatggagaaattgttgtggctggagaaggaacgcagtgccacgttggaaagagagagggaacagttgaggggcgagttgggcgagctgagaaggcacggagacgcgttgaagagggagttggccgaactcagcggagaagaaggcgtcgggggcacggaattcagcaccgaatcacacaatcatcaggtgggcatcgacggagacaccggtaaggttgaatgagttcattctgtaggaaactatcaatcgaatgcatgccgaatttgaacagcagtataacgaaatgcgagatctgaagaataaagtggagtggcgtctcggagaagtcacgcaacaataccgtatatctgtaaaatcggctttttcttttcatttccatcagatgacaccaaatggcgcttggggggaggtggagtccaccttggcccaccgggactgggaattagagcaagcgaacaaccgaatcaaacaattatagacatcagttgcagcaacgtaattaactctttagcttatgaaacaaaaatatcttttctttcagtccatccgcaacat

SEQ ID NO: 556 - DNA, 1824 bp, Heterodera glycines
  unsure (1)..(1824): unsure at all n locations
gactgtcagatggcgaacatctttcctttcgaggatntgaggcgagagaaggaacgctgggagggacgagtggccgaactcaccaaagccactcgacgacgcaaaatggaggttagacaatcattgacaaggcgaatttgaaagaagccacacaaagggtcggagaattggaagcggaaatgacacggaaggacaacttcgaggaacagaagcgaaagttggagtggcgacttggagagatgacacagtggtggaacgacgcgaaatggaggtgggcacaatgcacacaacatgatacccgaaaacgcaccaccaacagaatcggcgaattggaggcgactttgggacacgagggaaacgcacgcaataaccgaggggaaggcaatggagacgacaagtgaaagggaagggacggcgaaaagcaattggtcggtttagcttagctgagactttgggacggttcagggaactgttgagggacggcattttgctcatcagaaaacagtcacatttggacagagacaagtggaagatgatgaaatagtacgtttttagggggggggggaagagactcaccctttgggtatgaccacttgcaaatgaattgaataattaatgattaattggccaattacagtgagcatgcactggagaaggatgttcgtctgaggagttgttggttcgaagtcgattctgaagggcatcaggaagtgtttctgattgtgaggatgggatgggctgaaatggacgttcaattggctgttctgtattcagggcacttttgtgaattgggagtgcgctttgttgtgtgagcaaattcctgaaaagccttcacgtcggggcatttggcttgaccttccccccgggcattatgagtttcgctttcttcgtgacggtttgtggcacacggaaagcaaatacggcgaatgttggaacgaacacgggaccaagaacaattggataaatgtcgagtgatttttcaattttgacaaaattctattaaattcttaattcaatattttgtcagatttattatttttcatcaaatgacttgttttcgttaaattaataataaaaatttaattccattattctcttcacaatgttcggaacaaattggaagagtctgaaataatcagaacataagggtttttaaatgaattagaagaaaaaaacattcttgaggagaacccaatgtaaatgccgaaatgaaagattttctctccgtacctatttcatattgtaatgattcgttttgggagttaatgcgaagtttgaatttctccagtttaaaatgttcgatttcgcgtggagtgaaatgattggtgaaataaaactaatagaggcgaccaccgatggattggctttgggattttggacgatttaacaaagggcggggggggggagaggcggacaatttccaccatttgttctgccaattgttccgctggttcttccgccgattgttctgttccaacgccccaaaacgaacgaaacgtcgcgcgatttgagcagcactaatccgccgccaaaaaagcataagccaattgggcacccgccactgatcaaatgaatggtgtgaaagtgaaaatgcaacgattatttgttgtaatttatctgtccgccgcctttccttccaattaaattaactaattaattaattcaaacatttctctgctgactttgagctgatggacttccccccccccctcaaatcatcgccatattttaagatcactccctccctctcccgcatttgttcgttggtttttagactgatcggaaagtgaatccgtccaattgcccaatcgaaaacactgataa

SEQ ID NO: 557 - DNA, 3217 bp, Heterodera glycines
gccaattgcttaataacgccctgcctcaccctcctaagttcttcttaatggatactgcccatagagcgaatccacccaagagaccaaacgacacccctgaaaaccgaaaaagaatgactgaactgtgggcttcccccgcatcctccacccaacaacaaacataccctctctgattggatctgttaagagtcactgaattggccttggctcggtatcatttacaaacaacacaaagggaagggcacttgagtttattcggacaaccaaacaaacattccaaatgcaaatggaaaattacggcaaatttagccaaatttaaggggcaattaaacccgctgacagataaatgagcaaaatgccctggggccaaaaggaagaaacgaacgatttgccatcgacgtcgacgcagagggaaactaatggcgaaacgtcgccgacgacggaaatgccgtgctcaaagggcttttgcccgagtgccaaaacgaaggtacaaattcaaataaatggtcaccgattcgtcgctcgtgttctggctaattcccttccccaaagacattcgtcggcgacggtccgtcgtcgtccctccgttgtgggctcggcttttgcactttcgattggctccaaaagctgcacaccgccaaatggttgttggccattttgtgcatgtaattttggatgattgccttggggttcaaatgcgcttcttcagatgcgccttcaaccaatccttcgttatcaatgcaatttttcccgtgggcctttcgacgttagagaagcgatttcaaatgagcaggtaaaaaaggtcagcagaggaagcgtacggctaaattcagcacgaggaccggcatcatctccagttggtacgactttgccgttctgatcgccgttttccccgtctgttactacggaaattacggtagggtacggtagaagcaaaggaagggaaacagagccaatcagctgctcggttgaggtctgattgacaaaccataatccatttcaggtcataagggccgatggatttctgtcggcagtcttataatggcattgggctcggctgtctgcgttctgcctcacttcagcagtgccccttggcacatggaccactcacagatggactccaataatgattttggccaatgcgccctcaggcaattcccccctctccctcgagaattgtctttaaatttttattttactatttgctgcctcaggaatacttctcgaccggactgtgctccttctgctgctgtttggggagcatccgacgcatatttcgttatgtttttgctcgggcaaactctccacggttttggcgcgacgccgcttttctcactcggcacggcttatttggacgaaaatgtgtctgaaaagtcttcgcccgtttttctcggtcctttcgatcgatcagaaaaagcattgccccattctgacagttcagccattcactcctttctgaccagcgttggccccatcgttgggctgttcgtcggtgggaagttgctgactttttacgacgatttcgacagagtctccggcagggaaaggtacgccgaagacggcacttggcacccgcgaccattggccactcgccgtttgtttaggttggccatcaaagactcggccgacccgcgttgggtgggcgcctggtgggtcggattcgctgcgtgttccgtcgtttctctgatcatctcctttccgatcatggtttttctttctttgtgttttcctttttcatttgggcattttttcaaatgttcgcccatgaattgcccgaggcgaagaaacggcgagaaaatgaagttgatttatcagttattttattaggcgggtatttcacattaatccattcagcagatgcacaccgtcacaaaaatggtcacaaataacgacattttatgcaaaaaaagcttcagacttttgagcaaagacattttggtgggtaaaggcactcactcagtgatctgttccaattcgaatcattttgatcacaaatctcattttcattgttttatcaattcatccatggacactttttaggtgcttttaagcagtccaacttttgtcgccattatttttgtcggcattttcgagtccatcgtcctcaacggcttttcctctttcatgcccaaaatcctggagataattctgaatacttctccaacagttggctcttatttgtcatgtatgccatctttcccattcagtttaattttgccatttagccgttataatttttggtgccgccgggggagtgatggtcggtggcattttagttcgacaattgcagttgcaagtgggaggaatgctaaagatggttttgctttgtcatttagtgagtttttgaggccgggtgtacagagacttggacaatcaaccgaatttgtagaatatcaagctttgaaggggggggggtgccatttgacccttttgtcgtttgtcccttttgacgttttgtccgtctgtccctccctccttctgtctgtttgtctgttccatgtcctttttatgggccgccctttctctgatctcctgcatgcttctcaagtgtccctctcgcgaattggtcggtatcaccgtcgcctacgaccacaagttcgtgctgttcttctgttcccttccctcctcttatccctctgatcactttttctgatcagttcgtcgtccctcactttgcttgaaaatctttgtaattccgagtgccattgcgacgccaattttcgccccgtttgcgacagaagcagtggccgaacgtattactcggcatgttacgcgggctgctcccttcgacaggaagaaattgatggaattgtgagttccaaaaaggaggtgggaagcattgacccatccgtccctccttttgttccttaattgccgttaattgctttttcccagggcactctttggggcgattgtagctgcgtacgaaatgtttctttgccgaccaatgccaatttttcgtccgctcgccatttggccaacggtttttgccccgttgattgcggttggactctttggctgttccttttcctcctctttttgtcggttgtcgccagttttgcggccggcattccgacccaacaggcacattccccaccatgtcatgcttatccctaattgcctcattagattatgctcagagtcattcccctccagcaaaggactttgggcatagcagtcaattggacttttctgcgccttcttggtacgctctgct

SEQ ID NO: 558 - DNA, 3168 bp, Heterodera glycines
cgccacgcacggcccatgccaaaggcaattccattgactctcctgagtctatggcactctaacggaagaacattttgagaggaaaagtggtcattcgaacactcccatttgaattcattgtttttttaatctaatgggttcttccccccccccccccccccctcccattgtttgtccgtcgttccgtcccattgttcacccgcaaaagtgggggggggggaggaggaagacacatgaactatgtaatgtttgtgcagctttacgttatggcttaatggttacataaaatcaatcgaattgaaatttaaagtattttttacctaatttaaataataaaaaaacatacgccaaattaatgttacttgcgcaattacaaagaaaaagcagaaaatgaatgatagcaaatggaattttgttaggaaaatggtgggtgatgactcatcgctcatcaccactcggtgactcatcccatcttcatataataatccatctcatctcgtttctcccattgactttcccaccctttgacccttttgctttgacccctctttccgtcccccgtccttttccctccgttctccgttttctgcgacaatcaatttacgttttcgctgtctcttctctgcccaagccaatacattttgttttcttcaaatggccacagaatgtaaaactccgtccatcggcggtcccttcgttcgctttttgtccgatcaccgctcactcagtccatcctccgcattttcttccgtttcctttgattagatggatgaccaatcaatttccttccgctgatcgtcgcttcccactttttggccgtcgttttctcatcgtttctttctgacaattgtcacttttctggccatgttaggcaacggaaatgacaatgcgtcgacgtcatcctttgctcagaattcgctggaggaactgctcaccgccactgatttgctgaggtttttgttctgtttttcttggccaattgtcctccgttcttcattgtttgtcagttaccacgacgcactgaaaaatgtgctaaaattgcgccatgccggagacataggggacacggacagcgcggatttggatgggattggcatgagcaggcccgagcagaggcgactgatgcgggaatacgccaaacactacgcattggagcaacggcagcagaacggcgtcgtttggaagaagttcagactgaaagtgtttggggaggcgaaacagtgcaaacagcgaaaagtgacgggggagacggaccattggcaggggccgggaggggaggcggagacggcgcagcagccgcaacaccacatcatcccgccggaacgcgtcactctgtgcaagaaaataggcaccggcgagtttggccacgtattccaaggtccgctccaaacatctccccgaataaaaggctcttttggtttaagccgcttggcgagacgcaacaggcgatgggaaaaaggcgattcaggttgagtttgggggggggggagttgaccagcagaagccaatcggcccactctccaaaggtggcggtgaagcggattctgccggagaagctcatctcgcaacacgcgtcctttctgcaggaagcggccataatgacgcggatgcatcatccgaatgtaatccgattgttcggcgttgtgctggagacaaaggcggtgatgctggtgggtgttggctcgcttttcgtctcccattagctagcttattattaggtgtccgaactcgccccctgcggctctctgctcgagtgcctccaatgtccgtcgtggagagagcccttttcggtcgctgtcctctccgattttgcgttgcaaattgcccagggcatgcgttacctttccagtcacaggtccctccccccccacccaattttccaattccttccgctgaccgtcgccccccaaaggctcatccaccgcgacctcgccgctcgcaatgttctcgtgtgtactccaagcaaggtcagaccagcgagtgttaccctgacaatgaccggcgcctgtgctttgccaggtcaaaatctccgactttgggctcagccgttgcctgggccatggcgaggattactaccgcagtgagttcactccgtccatgaaattgcccatcgcgtggtgtgcgcccgaatgcatcaattttctgcgctttacctcagcctccgatgtgtgggcttacggcatttgtttgtgggaaatgttttcttacggcaaaactccctgggaagggatgagcggctcacaggtgagcagaggacgaggaaggcaccgcagggggagggagggcaaagatgggaatgaataggatttggcaaaaacacagggggattggcaccagcaagggttgagcgcactgcgattcgcgtttttttcccgcgatttgcgaccgcgggcttttctgtatacgttcacctctgattgacacagttggggggatgacgagaacgaaatattttattttttgagtttgaaaaacgccgccgagaaaactgacagattttatttccacgaagattctccattccatcgacacccaacgcaaaaagttgcactgtcccgaggcgtgtccccgcgaggcgtatttgctgatgctcaattgctgggaatgggaggcgcatttgaggcccacttttgaacaaatctgtgaccgccttccttcgatggttccccctcttttggtgacaatttgcgaaagtggcaccgccaaaagtggccaactcaattacggaagagatgaaaccatcgcattgattgacaaaaagtaaggccaacccattaattacttaatgtatttccgaattagcccttgcgggaaggagggcttttggcgaggaatttcgaaggcgggaaaagtcggactgttccgtcccgaggacacaatcgcatttttgggtgcggaaaacccttcggcaaagggcgacgcgctttcggaacaactaaggacagaaaaaggcaaaatgaaaaagcaattggacaaagaaaagaagcggaaaaaggcggtggaaataagcgagccgaagggcgacttacggcacacgtgccatgtgggggcggacgggagaagttttggccttttgaatgtgagtggacattcgattggaaatgttgggggggggcggcatttctaatgcatgtgccaattccgcaggtcaacaaaagtgacttggcc

SEQ ID NO: 559 - DNA, 2860 bp, Heterodera glycines
atgaccacttcgatggtttcactgccaccgccaaggccaccgaaaaatgggacaaaacagagaaaaaagacggaggcggaaaatggggatgaaatgacaagaagtgtgtgcattggccaaattaacggttagaggggaggggggggaggggaatggacaattaaagcaccgaaagggcatgccaactaatgagcgtggatattggggcagttggcaacgagggaggggggggggcgggtttaaagtgtcacattcactaataagcattcgcctaattcaatgaatttcattttccttttgttgggcaaaatttatgggtcacaatgtatttcagaaaatttccaaataattgcttctctaaatgcaaaataacataattaggaaatgatcaattgcttctaatctctgccgctgggcattgttccgtcgcggagtatttaaacgcgtcgtccgccgccgcttcgctctctccgcccgcccttcccccgaaaccgccgcgcttccgctcgtttgccaatttctccgattggccttccccctccgcgcccagcgccagcccaacggacactttgagccaaccgaaatttggacaacatattcaatcaccaattaaccttcccgatcaaacgcatcctcctgaaccgattcatcacaactcaaaaccaactgaagaagaaaggaaacggaaaaagtcaaaggaaacagaggaggacagagggaggaaaagcgacgaagaagcagagaaaagaggaaagagcaaagaaaagagagaggggaaagacggaggaagagatcgggaggggaaggaggaggaggaggagagagagagaggaggaaagagagaggaagagagagaggaggaggaggaggaaaatgaggaggacgaatcactgatcagacgaccgtccagcgtttgctgcgagttcagcagcaaaggcgaggacggggaggaggagaagcgcattctgcaggtgctcactgacctccaacgcgacctcacaaacttttcgctttgttcgctggacgattgctcggaagggcggccattgctcgacggggagcaaaggagagaaaagtccgtccgatttgaaagtttaacggacgaagaccgattcatttaattcatttacaggaaacttaccgaggaggaggagaggaaaaggcacctcagggaattgtcattggaacggcacggaattgtgacgggacattcggcagaaattgtggggatggaccgagccgaattggagcgaagaaccaacgaggagcggaggagggtgctgaagaagctggtcagggacggcggcgaggagagcgcggacgaaaagagagcttcttttgtgggcagcttcatctcttcggcaagcaaaatgcttgtcggagggacaaatcacggcacaaacggcgggtaggcaaaagcaaaagccatgggggaaagtgaaagccatggaagcaaaagcaatggggtgcctttgggaaacagccaatccgaatggctagcccaactttggcatgcttaaatgcccctgtttatttattcctccaatgatggcatttccgcacttcagcaaagagccattggcaaattggccccccgaagcgcaagaagcatacaaactgctggtgcaatgtggccacaatctcaagggaacatcaatcaacgaagggcattccgagggaaaaaagccatcgccgaaaagcaacgacggaacacttggacaaactgcggaaatgatcgaactgccaaaaaaaattgaatatatcaattcgatgttggtcggctgggaaggagaaaaacgggggaaacgaagtgatcggaaagacacattggaaaggagaagtgatcgaaggaaggacgaattgcatttggcggaagcatcacttcaaaatgagtcgccaccaccagtgccaccaaagccaatggcaagggcgaggtgggcacaaattgggaacaattttgatcaagggaagacagaggataagcaaagtcgatcatttgattaattagcagggttgaacagcagtagtaaatgaaaatgcagagaagaaacgaagctacggaagcaggtgaacgaagcaataaaagaacgaaggcgcaaagccaagggcatttcaatgccaatttgatcggttattctctgggcatttgaatgccaatttgatcggttattctctgggcatttgaatgccaatttgatcggttattctctgggcatttgaatgccaatttgatcggttattctctgggcatttgaatgccaatttgatcggttattctctgggcatttgaatgccaatttgatcggttattctctgggcatttgaatgccaatttgatcggttattctctgggcatttgaatgccaatttgatcggttattctctgggcatttgaatgccaatttgatcggttattctctgggcatttgaatgccaatttgatcggttattctctgggcatttgaatgccaatttgatcggttattctctgggcatttgaatgccaatttgatcggttattctctgggcatttgaatgccaatttgatcggttattctctgggcatttgaatgccaatttgatcggttattctctgggcatttgaatgccaatttgatcggttattctctgggcatttgaatgccaatttgatcggttattctctgggcatttgaatgccaatttgatcggttattctctgggcatttgaatgccaatttgatcggttattctctgggcatttgaatgccaatttgatcggttattctctgggcatttgaatgccaatttgatcggttattctctgggcatttgaatgccaatttgatcggttattctctgggcatttgaatgccaagac

SEQ ID NO: 560 - DNA, 2006 bp, Heterodera glycines
cgattggaaagtctgataattgagtcttagagattgaaatgctgatgggttgattttcagtgattggaatgtcattgaaagttagtgggttgagtcccagtgtttagaatgccggagctttgagtccattgtttggaatgctggtgggttgagttccagcgattgaaatgctggtgggttgagctccagcgattggaaagcctgagaattgagtttcagagattgaaatgctgatgggttgattttcagtgattggaatgtcattgaacgttagtgggttgagtcccagtgtttggaatgccggagatttgagtccattgtttggaatgctgttgggttgagacacaaaaatcacaaaatttaaattttttctgggggttttggagtcgttctgcacataattctcccgacatctttgagctccccacaattttttgtgcgatttcactgtgtaatttcggcccacaaattcgccgccctcctccatttggtggtgcaccatttcacacagctgacaaaaggcggaagtcttcacagtcggcacccatcgcttctggtagaattttgtccaattgaaatatcttaaaaattaaaaggcattttttggcgaaatgtttgttggcaattaatggcattatactatttttaacaattttaaaatttataagttttgccattgacccttttgtccattaaatactgaccccaaatatcggtccttgtccttgtgcaatgccttcagatggtcggccaatgccgtggcattgtcaaaatcgtccgctgcgatgtacaaatcgtccggaatgcccgactcgcgcaccacttccctgcacagcacaaccggcactgtcaaactgcgcaaagcgttccaaaatttctccgttacatattcggagcacaccgtattttcaaaggccaaatagaaaaagtgggattttgcaaggtgaaatttttgttgatagaaaataaaatcctatttaacaggactccgagtccttcagtcccatcaaatgttttatccccaaatcctcggctgcgcatccaaaaaaccttatcccaaatgactgtgccacccaatcaatcgatcggtcgtcattcactcacccatttgctgctgataacatttttgcccatcacagtgttttccgctgcacctgccgaacatgtccaactcaatgagctcctgcaattgctttgtcagcacgtctctgccggagggagccccgcaatgggacacaatttggagggcaaatcgttttttgcgggacattctctcgctgatctgacaaattgggaaaggaatagaggaccgaataatgggtgaaaagataaggctaaactgtctaaattatatccacaaataatatttttgaaaaattttcgacaaaaaaggataattagggcgggcgttgaacggtataagaatttttataattattttttttcgtggagaagttgaaacgtatcaaagtggcggatttaaaaaaccaattaacggctcgggaaaattccaaaccctaagcatttttaaattacaatatttaattatttggatgagccacaataagcatatcccaaccctttactcacttccgcagcgctccaaatctcttccggtgacgtcagtggcgtaattggggtcaattggccatacggcactggaatggtactgtcgcgattgtacgttatggaccagggctgaacgtaactgattttcagttacggtcatccgtaatccgtcattacggcgattttttcagttacggccatccgtaatccgtcattacggaggtccaaaaaggccgtaatttggcgtaatccgtaatacgtaatccgtaattttcaaaaattttttttaatttaaaaaatccaatctaaaaattgttaagattaatttatgatcagaatatctgcttgttttttgaggtgaaaatcccaaaatagtttttttcgcggtgtgctttttccaaaaaactggggaatgtggggggggggggccgggtcag

SEQ ID NO: 561 - DNA, 2041 bp, Heterodera glycines
aataagtcaggttaaattgaaaatatagggtagcttttaaataaaaatagaaaaaaaaaattcattttataaaaaataatcttgcaagaaatcgtctcgaaaaataatttaaagagccagttccggatcaaaattacggaaaatcccaaaaatctgtaccgtaattcgtactccaaaaaggccgtataattaattaatggcttagatttaaatcaaaattgcagcatattaaatctgtaaaattcatctgaaaaacagatacatacgaaaacttaactcattaccttggttgataattaagcacaggaagatgatttaggaaattttccttcacctattttcatattaaaataagagcgtaaaaacaaaaaccaatatcctgtcctgcaaaataatatgaccgaaaaatttacccatttcaaagggagtgaattatgtatgggaatctgtttctgaaatttcactttcacaaataatgtttataaaatgccttcgtagaaaaaatttgttttcttctaattttataattgctttggaataattacttccaacaattatcaaaagttagtgaaatttgttgaaagaattaattaatggcttagatttaaatcaaaattgcagcatattaaatctgtaaaattcatctgaaaaacagatacatacgaaaacttaactcattaccttggttgataattaagcacaggaagatgatttaggaaattttccttcacctattttcatattaaaataagagcgtaaaaacaaaaaccaatatcctgcaaaaaaatgactaagattttggagctaatatttaaaaataattatgaatttttggggcgggcggtgccgataagcgccgccgaggataattttttttcagaattttaacgaattttgttaaaaaatagccaaatttttagcatttcctcttttcccctttgctagcttccccccccccctttatgtatattaataatactacaaattaccaagaataagtcagattaaatcgaaatataggtagccttttaataaaaatagaaaaaaaaaattcattttataaaaaataatcttgcaagaaatcgtctcgaaaaataatctaaaaagccagttacggatcaaaattacggaaaaatcccaaaaatctgtaacccgtaattcgtaactccaaaaaggccgtaataattaattaatggcttagatttaaatcaaaattgcagcatattaaatctgtaaaattcatctgaaaaacagatacatacgaaaacttaactcattaccttggttgataattaagcacaggaagatgatttaggaaattttccttcacctattttcatattaaaataagagcgtaaaaacaaaaaccaatatcctgcaaaataatatgaccgaaaaatttacccatttcaaagggagtgaattatgtatgggaatctgtttctgaaatttcactttcacaaataatgtttataaaatgccttcgtagaaaaaatttgttttcttctaattttataattgctttggaataattacttccaacaattatcaaaagttagtgaaatttgttgaaagaattaattaatggcttagatttaaatcaaaattgcagcatattaaatctgtaaaattcatctgaaaaacagatacatacgaaaacttaactcattaccttggttgataattaagcacaggaagatgatttaggaaattttccttcacctattttcatattaaaataagagcgtaaaaacaaaaaccaatatcctgcaaaataatatgaccgaaaaatttacccatttcaaagggagtgaattatgtatgggaatctgtttctgaaatttcactttcacaaataatgtttataaaatgccttcgtagaaaaaatttgttttcttctaatgttataattgctttggaataattacttccaacaattatcaaaagttagtgaaatttgttgaaagaattaattaatggctaagatttaaatcaaaattgcagcatattaaatctgtaaaattcatctgaaaaacagata

SEQ ID NO: 562 - DNA, 7868 bp, Heterodera glycines
ggatagctttggcgaacatggaaaatcactgccgatgccgaactttcacttgaattaagcatataattttgcacggatttgttggcgcgtgaagctaatgaacgggggggaataaacagacgggtataagtcagggcttgtcctaagctttgtgccggagttctgaatttcagtacctttttatgtttgctaatattaaaaattacggtatggaatggcatttattggaccaccagtgccatcatcggccaacagcagatggaaactgaaaatctttaattaaaattacaattaatgaagcaattacgggttgggctgagacttttcaacataaaacctttaaaattagaaataaaatagtattctttatgaggattgaaccaagcaatataaagatagactgaagtttaacttctaagggcatgcaaatcttttaaaatcgaaaaaaatacaaatcatttaactgttctgctgggcatttagaattgcttatatttgtttgtttccaaaagtttcgatcaaaaattcattttgattaattttttgatataaattcaaaaaaaaattgaaaaaagatcgtactaattgagccggtctataattattaacataatttatttttattttggttttttgaatgaagcactgctgctttaacaaaaaacattctacgaacaatttttacgaataattattattggaaatgtgaaactgagagagatgagctcatcttttttacttaatggaaattcagcaaacaaatcaaaaacaacaaaaaattatttgcataaatgaaaaatataatcattcttttaaccgggatcacaattactcccggtctcctccccttccggcctgtactgtgtaattttaatgcaatttgttaacagatttgtccacaaaataaaacctcaaatcatcatttcaaaaaaaaaaatcctcaatgacctatcaaaaaaccacaaaatgaggataaatcctcagatctgcgagccctgtgtatcaggggtgtgacttatctcagaaaagacgagagcgagagtcaaaggatttttagggtccagcgatgccgttaggcaccgccgtggaaaataaggacaaagggtaaccctgttctaagcctattttggtcctttttatggcattttgtgattagttcacttcttacgaagaatttttttgtttatacatatttttatttacataattcgcaaattttcttacataaaattagcagtcctatttattattaatataattagtagggagtccaattatatggaaatccatattttttttcctggactgtgggaggcctgaaacgcacgaaaaacatgtttttagcttggtttgaagcttctaggaaggatttctatatccatattttccatattttaccatatttcgcgatttatgtccatatttccatattttggcatttttcaaaaaaacctctattagaacggcccccagcagctaaattagcctttttgagcccaaaacccgaaaaaattttcaaaaaatcattttttcgccaaaatttctcgagaatattgaataaatttaaattttcttaaaaattaataaatttatgtcaaaaataatcaaaaaagcgaaaatttcgcttttgtggttgattttgcgctaaaaaaattaataaattttagctttcatgttttttttcttctaaaatgattgcacagaattgccgaaaaaattcgagaccaatttccgaatgttgaccgactaattgcaaaacgaaagccgtctttgtcaaagcgtcttaccgagtcaaaaaatttggaaatgtatctcatatgcaatttcaatcaataaatttgaagaaattttacattcaattttgaaaaatttatgtccatattttgacatttttgccattttatgtccatattttgcgatttttgatccatattttatggccatatttcgcgattttagttgaaaaagtaggtgaaaaattattttgtggggtattttgaggtgctgatcgatgaaaccatcaccgagttatgaatttcgaatattcgaccaaatttctgagggccaaaaaattgcaaaatattttcgaatttttaaaaaattctaaaatttccgaaacaaaaaataagcatcatattcgtgctcagcaccgcaaaataccccacaaaataatttttcacccactttttcaacccaaaaaaaaatttcgaaaatttctagggggcctagctcgaaaatttttgaaattttccgggcatatagcacaccgttcgatagagcttaaaaagctctacaattttgctctaaggcaatttttcgctaaaaccaaccctcacgagttatgggccagggactcaaatgtcccgctcaggccaaaatttttttctatttccgggaaaaaatcgaaatttttctaaaaataccaccaatcgatagagctcgaaaaacgatgttttggaagtggtctccgttttcccgggaaaaatcgttaaaaaatcttaaaattcaaaaacccgaaaaccgttttttaggcctagctcgaaaaattttgaaaattttcgaaattttaaaacttggttggatagcctttcaaatactatacatttttgctcagaaacaattttcgttcaaagcaacccctggcgagttattcgcctggtactgaagtgtacacttttgggtaaaaaaaattagccaaggctacagccttgggcgcccaatgtagggcttaggttttgctggcaaagttgtcggggatagtctgacttaaaatcctaccagcaagagctaagcgatcccggtccaaagaaaaaatttcgtagaagaaaaactgcaagaaaaagtgagaaatccgtccctgggactcagtcgtccgcgctgaatttttttctatagttttcccggatgcgcctcaaaaagttgtaagacccttccactactttcagggcgctcccggccttcggccaggagaaaatggttttagcaacgaaactccttgtcaatataacataaatagtaactagcgggtgcgtgaaccgtcggctatttcgctgggaaaaagcgcttcgcgctttgggagcttcgctacctaggcctgatcatgacttatagggtgagaaggttcaaagaggtacaacagtgactaaaagaggtacaaatgtgattagaagaggtcaacagtaattagaagagttgtggagtaattgttagaagaggtacaacagtgattagaagaggtacaacagtgatcagaagaggtacaactgtgattaaaagaggtacaactgtgattaggagaggtacaatggtgattaaaagtgctacaacactgatcagaatccgaagcatgttaggggtttttcgggcgcttcgcgcccgttttttaaattttgttgggcttggacgggcgcttcgcgcccgtttctaatttttaaaaaattgacagtgattaaaagaggtacaaaagtaatcagaagaggtacaactgtgattttaagagctacaacagtgatcagaagaggtactacagagattagaagaggtacaaaagcgattagaaaaggtacaacagtgattaaaagagagaggtacaacaattcgcggccttagtcgggcgcttcgcgcccgtttttcaattttattggccttggacgggcgcttagcgcccgttttttaaattttgttggttcagatgggcgcttcgctccctttttaaatttgttaaactcatacgggcgcttcgcgcccgttttttagcttgttatgccgttcgcggcctcagtcgggcgcttcgcgcccgtttttcaatttagttgggccttttcgcccgcttcgcagcctcagacgggcgcttcgcgcccgttttttaaacttgttgagatcgcacgtgcgcttcgcgcccgtttttcatattttgttttgctttgacgggcgcttcgcgcccgttttttaaatttgttaagctcagacgggcgcttcgcgcccgtttttaaatttagttgggccttttcggccgctttgcggcctcagacgggcgcttcgcgcccgttttttaaatttgttgagatcggacgggcgcctcgcgcccgttacaacggtgttagaagaggttcaatagtgatcagaagaggtacaacagtgatcagaagatgtacaactgtgataaaaagggtacaacagtgattaaaataggtacaacagagattagaagaggtacaacagagattagaagagttacaaaaatgattagaagaggtgcaaaagtgactaaaagaggtgcaacagtgatcagaagaggtaaaacggtgattagaagaggtacatcagattagaagaggtaaactgttattagaagaggtgcaacagtgattaaaagaggtacaacaatgatgagaagaggtacaacagtgattataagaggtacaacagagattagaagagttacaaaaatgattagaagaggtgcaaaagtgactaaaagaggtacaacagtgattagaaagtgggcattcaaatagagcatttacggtaattaaggaattgtttttattcaaaatagataaaaaatcgatgtgttatatttttcattttttaaaatattatacactttttattaatgaaaaacaaattatgaaatgtataataattgaatagttatttaaattgaaatgaaaaaaattttacaattaaattttaaaataatagctgaaattctttaattaaatataataaataatttaaatgaaaatcattattcatcaaaaaataatttaattaaactaaaaaaatttattattaataaaaccaaacatttaagtttattaaaagtaatgaaaattaacccaaaaaatacaaagaaaaataatgtacaccgtccggcttcgaactttgccccccccccccaaaaaatgatgcctcagaatccccaatcacacagggatcctgaggtcttaacgatgtcaaaagtaaaatctgatcacgtattcgtgatcagcggcccaaataacccctaaagacatgttttttgaagatttttggtgaaaaaatttttcaactcaaaaatcctatgctcacccctttggtcccgaatctcaaaatcacttttatttttataaaaattcttaaaaaagtgatacaaatgccaaataaaatttatacaatagagaaaaaaactgcggatttttgtagtattttatttttccagaatatcttttcagaaccgagttatgaatttttttctgaaaattcgaatttttccagaaattctggaataacttttttccttttttagatagaaattccaaataaagtccataaaattctcctgatttttctctatttttaaggctttattcctgtaaaattgatcaacccttcgatttgttatgaattttcaaattttaacccaaatttccaaggaccaaaaaattgaaaaatattttcgaatttttaaaaaagttcacttttacaacaaaaaacccgaattttgcttttaagcaaaattcgtttgaaattggaggccccttttcgcacaaaatccttaaaaaaacccctaaaaaatcactttttttgccatcaaaatatttgtccactgaaacatcgaaacgggcgaaagcagtgccaatttgaggccaagttgagcatggtcaacagttggaaaatgtccatccaaacattttggcggttgctgaaaatcttaagaatataaaattacaaaaaaaaaaaaaaaaacactaaaatagttcacatttacaaaaaaaccgaattttgcttttaggcaaagtgtttgaaattggaggccccttttcgtacaaaatccttaaaaaacaacaaaaagcataaaaaacaatcactctttaccatcgaaatgtttgtccaccaaagttcgaaacatggcgaaagaagtgccatattcatttacaaaaataaatttaaaaaattgccaaatttggaaaatttttatttttagagcaattttgaaatgtaggcccccgtttgggcacaaactgcttaaaaaatattcggcgctatattaaaagtgggcctttttgaaaattttttaaaaggggggacacacttttgttttgcaaaatttttttgtgatagtcataaaaatttattctctggggtttttggggtccccgatcacgaatccttcaattattttgatcaattccgatttcctaatctaaatttgaacaaaaaatcataatttgaaaaattcaaaataatagaaaattcctaaaaaaatttcactttttttaagtgcaaaccaaaaattgtagagcttagaaaatattttaatggtcaattaaaaaaaaaataaaacttacgacttaatccactttcgccatcgaaatgtttgtcgaccagcgcatagaaaggggcgaaatcagtgccaatttgagttcgagttgagaacgttccaaaagggggaaaatatccatcagaaatatcgttgcatacaaagctgaaaaaagtgaaaaaaattgcatgaaaaaagccaaaaaatgaatatggatattttaaaacaaaaaattttttgcaaaaaaaaagctaagtaaggcattatcagactgtgtttttattacttacacaaacaaagggtaaaaatcaatttttcaatagacgtaaaagttgagtaaatcaataacgcacaccatctcaaacatgagaatgaaataaacagatggcatataaaaaaatacaaattatggacaataaaattaattaatttgaaacaaaaaatttattcatcaaaaataatttaatttaaatttaaaattatttattaatttttaataaaacaaaaaggttaaaattaatttaaaacggtgaaaataacttaaaatgcattaattagaagaggtagaggtacaacagtgactaaaagaggtgtacaacggtaattagaagaggtacagcagtgattagaagaggtacaacgatgattaaaagaggtacaacagtgatcagaagaggtacaacagtgattaaaagaggtgcaacagtgattaaaagaggtacagcagtgattaaaagaggtgcaacagtgatcagaagaggtacaacagtgattagaagaggtacagcagtgattaaaagagctacaaaagtgattagaagagctacaaaagtgattagaagagctacaaaaggattataagaggttaaacagtgatcagaagaggtacaacagtgattagaagatgtgcaacagtgattagtagaggtacaaaagtgattagaagaggtacaactgtgatcagaagaggtacaactgtgattaaaagaggtacaaaagtgattagaagagctacaaaaggattagaagaggttcaacagtgatcagaagaggtacaacagtgattagaagatgtgcaacagtgattagtagaggtacaaaagtgattagaagaattttttaacaaatttaatttaaaaaatacatgaaattctatcaattaaaaaataattaatttaaacttataaaatttatttatcaaaaaaaaattaaattaaatataattttttatttattaactcaacaaaatattttaaattaattaaaatcattgaaaataacgtaaaaatgcacagaaaaataatgttacaccgtacggattcgaacttcccccccccctcaaaatgatgcctcagaatccccaatcacacagggattctgaggtcttaacgatgtcaaaagtaaaatctgatcacgtattcgtgatcagcggcccgaataacgactaaagacatgtttttggaaaatttttgacgaaaaaattttttcactcaaaaaccatgtgctcccccctttggacccgaagcacaaaatcacttttatttttatatctttttttagactc

SEQ ID NO: 563 - DNA, 1525 bp, Heterodera glycines
agcagtgattagaagaggtacaacgatgattaagagaggtacaacagtgatcagaagaggtacaacagtgattaaaagaggtgcaacagtgattaaaagaggtacagcagtgattaaaagaggtgcaacagtgatcagaagaggtacaacagtgattagaagaggtacagcagtgattaaaagagctacaaaagtgattagaagagctacaaaagtgattagaagagctacaaaaggattataagaggttaaacagtgatcagaagaggtacaacagtgattagaagatgtgcaacagtgattagtagaggtacaaaagtgattagaagaggtacaactgtgatcagaagaggtacaactgtgattaaaagaggtacaaaagtgattagaagagctacaaaaggattagaagaggttcaacagtgatcagaagaggtacaacagtgattagaagatgtgcaacagtgattagtagaggtacaaaagtgattagaagaattttttaacaaatttaatttaaaaaatacatgaaattctatcaattaaaaaataattaatttaaacttataaaatttatttatcaaaaaaaaattaaattaaatataattttttatttattaactcaacaaaatattttaaattaattaaaatcattgaaaataacgtaaaaatgcacagaaaaataatgttacaccgtacggattcgaacttcccccccccctcaaaatgatgcctcagaatccccaatcacacagggattctgaggtcttaacgatgtcaaaagtaaaatctgatcacgtattcgtgatcagcggcccgaataacgactaaagacatgtttttggaaaatttttgacgaaaaaattttttcactcaaaaaccatgtgctcccccctttggacccgaagcacaaaatcacttttatttttatatctttttttaaagaagtgataaaaataccaaataaaatttatataatagagcaaaaaattgcggatttttgtagtattttacttttacagaatgacttttctgaaccgagttataaaattttatctgaaaatccgaatttttccagaaattctggaataactttttttcttttgaacattataaaaccaaataaatctcataaaattctccttatttttctttatttttaaagctttatttcattaaaattggccaacacaacacattgttatgaattttcaaatattagcccaaaatcccaagggtcaaaaaattgaaaaatattttcgaatttttaaaaaattctaaaatttccaaaacttaaaataaacattatattcgtattcagcacctcaaaataccccagaaaaaaaattttcacccccattttggcccacaaaaaaaaatttgaaaatttctagggggcctagctcgaaaaattttgaaattttccagacttatagtacaccattcgatagcatttaaaatgctctacaaaaatgttctaaggcaatttttggctaaaaccgatccctgacgagttataagcccg

SEQ ID NO: 564 - DNA, 1024 bp, Heterodera glycines
ataggtgatgtcatggcaaagaaggcaattgtgtaggccagggctaggcctaatattagctaggcttgggcctaagcttcaattttctaaatttatttttgtacgttttgccattgacccaaataggtaaccagtcataaaactaaaaaaaacatacgaagagtcaaattgtccacggtgttcaccgacagttttttccatggcggttgatgttcatcaacatccatatcggccccctgttggttgtctcgacgtgggaactttttgcgccgattactccgaaaaggatatgccggtaggcaccgcggatgtgcgcgagtcggactccgtgttcaaaggaacggacgccacccagatgactcgagtgcccgtcaactgtctcgagcttgttcttccgaccgtgtgcgtgtaggtatggtcgcgtgcatgtttgtttgcgtgatcgcccgtttagtgatttggtgcaccactgtcccgacttcgctgctagtgatgatgaagatgaacaggacgaatatgaagagaaataagaacaaacacaagaggatttcggaaggtgaggaggaggaggaggatgagcgatatgataaaaacaataaaatgtagaagataattacacccgagtaatccatccaagtttatcgaacgaaaaagaaaaaacaaaataaacgacagacaacagaaaaaatcacagagtcataatacagagaaaacggtttttcttttttcttatagttatatagagaactgtttgggatggtgtgtgtgttatggtcacgtcctttcgatggtctcatttcgacgaggtgtatttggtcacgggtttggtccccctcaaaaacggcatgctttgccaactcgcccggaaggatgagacgcgacccgccgcctgaatttcacgtagaacagattgccgaacgcttgttgtaatgggtcaaaccgaatgtttcggcagcaatgggtttcaacccatcattaccaaacctaaaaaaaggcaggaaaatttgaattgattaaatttggg

SEQ ID NO: 565 - DNA, 2823 bp, Heterodera glycines
gtcaaattgtgcactggtgttcgccgacagttttttccatggcggttgatgttcatcaacatccatatcggccccctgttgtttgtctcgacggtggcaactttttgcgccgtttactccgaaaaggatatgccggcaggtcggcggatgtgcgcgagtcggactccgtgttcaaagtaacggacgccacccgatgcgcagtgccctcaatgtccgagttgttttccgccgtggtgttaggatggcgttgttgttgctgctgacggcgcgaggaatgttcaccactgtttgccatcggtggatgacaatcaatttttttcattggagtaaaaggaatggcataaatcccgaaacaggagacaaaaattggatttgaataggggtaaaattgtaaaatatgataaaaacaatacaatttagaagataattacacccaagtcatccatccaagtttatcgaacgaaaaagaaaaaacaaaataaacgacagacaaaagaaaaaatcaaagagtcataatacagagaaaacggtttttcttttttcttatagttatatagagaactgtttgggatggtgtgtgtgttttggtcacgtcctttcgatggtctcatttcgacgaggtgtatttggtcacggctttggtcccctcagaaacggcatgctttgccaactcgcccggaaggatgagacgcaccgccgtctgaatttcacgagaagagattgtcgagcgcttgttgtaatgggccagacgcgatgcttcggcagcaatgcgttcgaacacatcattaacaaacctaaaaaaaggcagggaaaattgaattgcattaaatttgggtgtcaaaatagttaggttattggaaattagcgaaaaattgcttggaaaaatgcatttagttgaataaaaatgcaatattagctattggatttggttttaatgtataaattcattcatttttgaccgcaaaaatcccttttttgagcattgaaatgtcaaatattgaaggcgtgattttctcgaaaaagaattcatatctttgagccttaaatactgaaattcctcttaaaagctgaaaagaaaagcgaaaatttaaaaaattcataaagaccgacgagttcataatagacatggccttggacgagatgccggtgtcagggtggacctgcttcagcacacggtaaatgtagacctaaaaacaggggttttaagtgctggccataacactcagactcacgccccggggcacaataaacttactgagtacgactccttgcgagacttcttacgcttcttgtcagccgtgcgcaccgtcttggtggacttcactgcctttttcgccccttttcccgatggctttggtggcattttatttgaatgaaagaagagagaagatttgttgagagaagcaaatgattgattttctaaaagcaaaatgaagatgagagagagagagagaaactgtgcaaattttatattcaaaaatgaggggatccgcctactcaacaaaaagcaaacagggaagaagggcacgacacgcccatccaaaagaaaaacaaattgaaaaaactaaggaaaccatgaatttaaatattttggtattcggaaagaaatgagcaattcaattctttaaaaggcttaaaagatttggtgtttttctaaaaagtacatgtaactgacgaggtacatacaatcaatgcaaattttatattcaaaaaaggggggaggggactgcctattcaacaaaaaccccaaaaaggaaagggcactcactcactacacactcatccaaacgaaaagaaatgaaaattataaaaaaaaaattatgaacgttagaaatgtaaagaaacattgaacatccccatttttatagacaaagaaaacccccgactgtttttcacaccgagtcaaaaaacaaaaaatgaaccaataaatagagagactgcagagaaaaacacttttcattttcgatggaattttatcgagcggcttaattgtctaacaacaataagcccgatctcgagcattatatgtagtttagcttcaatctccagggctctagtgaaatgcttgatgtttgatcattcataagtttgttgatttgatcgttgcattgtgatttaatggttggttagtgcattaatcgatgtacttaggtacatatctatctacctaattaagtaattactttttattaccaattatgcgtttttttatcgccctttttgtttttgctgccttacaaagtgtgctttggtcctctaagacgagctcattatcttttttgaagtccctttcccgttgaataaattgcaacaatctttccgattccgttattttcaaagaaaatttttccattttaatgtctgcaatgtttgattattgtgtcgcttcttgctctggcgaaggccagcagaaaaatgacggcggtccaacaacagtttcaacgagtcataataccccatttgatggccatgtgcttgtactttccgagtttgggaaaccaattttttcgaggtttttcgcacaccataatttgaaaaacagcagatcacatcatctccctttttttggattcaagttatggcaatgaagatgaattgtgcactgtgttcgcccttatttctgtgattgtccgtcgttttcattcattagcttttggcgaggaagaagctggtgaaactcaggtcccgaggaaaatttctcattttttaaagtcggtgacacgacgcaaaaattcccaaaaattgcagaaagattcgttgttgagcatccaactgggaatcgcgactttcaatttctttacacgaagtcccattgactctaga

SEQ ID NO: 566 - DNA, 2170 bp, Heterodera glycines
  unsure (1)..(2170): unsure at all n locations
tgcaggtcctggttcaattgggataccatttataatcaagttggttgctccaaatttgacaatttttggatgaatttttattgaaaatattttagggacgaattttgaagattttttaatttcagataatttcgatgttttctcgccaaatgctaaagggatattatgcaaagcgtggatataactttgatattagaacactttttggtttgttacgcttttggactagggttgcaacttcaacgtcggggttgggaaatatcgggggtcgaggtcggagacaaatttcgaaaatcgccaaaaaaaatttcggagacggtttgcaaccctattttaggaattattgcatcaaattacactttttttatctttttattattttaagatggtattgataagcgaattgatgcatgtgccaagggattcaacgaagatccggtggtgctttatggtaaaaaaaacaaacaattttttaactgatttattaaaaaaacaaaaataattgttgtttttttgggctttcgaattttgccactccatcaggcggacagagactttcttgtacaaacaatgggcacagttatcaatgaattatgtccaaatgtaattctacaaaaaaaaaataccggattttttttttttaatttttcgatagataattgcatttggactgctcatcgcccaccgtcaactcgtcacattagtacgcatgaaaaaactgaacttggacgcgccagatttcaacacaattgtggtaaataataaaaaaaattctaaattttcaacaaaaaaaaacaactaaaaatttcagaatctaattgaatgtcataaaacgaatctcatgcaaggtgatcaccaagtcagttttggtcaaaaccttgtgataaattaactaacatgtttttctttaggtgccaatatgtctgccaaaatttaaccaaaagttggttgatttatttatttttttgtttgtaaaatattttagtttaaatttgaattatccgcgaccccgaaaaccgtcagaattatctttttgacactttttttcgcaatttttttaaaggagagggttcaaatattctcatttaatataaaaacaaaattttttttttgattccatgccaataaatcttgtttgtttgaagctccttcctgtatgcctacatctcacatttgtgggacggcactgggccatgcatggtgttgctgtcggtggccaaggaggcggtgcaacaaatgtccaaggttcggccccgactggaggaagcgcttgacgcatacaaacgcagcgggccattgaaggaggcgttgcaacagccggagggattcacattgaaaaatgtccgagtttttaggcacaaatctaaatggcattttaaaattccatggcattgcttctttttttcagttacattgtggaccacttctttggcatttcatgtacaaaaacatttcaaatgctcaagttcgtaacgaaaagggggacaactgggcgccagtgacagtttttttttcatctttttttgtattcaaaacccacgaaaaattgttttcatggtcgttgatcacgtttcaattattaatccgaaattcggaacaaagaagaaattaatttttcgggttagagattataggcattggtcgaactggtattggattcgttgatcaacggctccgtaacccacaagaataagttatcacaaaacaatagttattcagaaaaatccgggctgtccgcccagttgtcccccaccggttcgtgtcctgtaaacacaattcgactggtcttaaaattcatttgcatcttttcaggatccgacccaagtgtgctgttcgacgcccaagaaaccgttaatttcacgagacgaactgaacaacctgtacaatgcctatgccaaattggctgatttgttgcggaaggggcgcggtggaataaaacaaatttttgtgatgttggaacggcactccatttttgcatgggtattcaaaaaaaaatttttttggccattactgtaaaaaaatatttattgttagataacgccaggctttgaactnttttgtaagttatttgttgccccagggttttgctccgttatttcccccaattttttaaggtgcattcaatccgcttgtagcaaaaaaggagtggtgggagctgctgaccgattgc

SEQ ID NO: 567 - DNA, 3164 bp, Heterodera glycines
gataatgaatgaattctttcatcaattaatattagtcagggaatttttgcaaaataaagttcaaagtcgagctctaatttaatgttcaaaatgggttcgaaatatatattcaattgctagtgtgatggtgagcgcactttaattgagcctgcaaattgtaaaagtacaccaaacataattgaacaaaacaaaaaatggttgttttttttgcatgcattgtaccaattgcgtgccggaccgctgaagtggagttccactttaccacggcccgggcacagcacaattcgcaacatttttttggtgtacggtgtaaaaaaacacaaccatttgaaaaaatgcacaaacaaaaacaacaagcagacatatttatttcatttctgcttcgtgcaccacgtcgccgtcgtcctcgtccaccgttggccattcattctcatttatcggcttctcagcctgtcgctggagttggtcgttgagtttcggcaccgcttggtatttggcccactgttccgtggccaaacatggcgcaaaaacctgtgcacatttttgtttgtttgtttattataaatcaaaaaatgttcacagtgagcgatttttttaaaataaaaatttgtcattatttttttaattggcgttttaaaaaatttcaaagattttcttccaaaaaaatttctgtttgagaatttaaaaaaaatctcaggatttacctgtgccatgacaagcatagaatgaatgcaacgttcgaattcggcactgtgaccaagcacaattgaactactaccacctttcgacagcgcatttgcttcggtgacgagcgctttggtgaaatggtgcagccgtgtcaatgccatgttgtgggattggaaaccgtccaaataagagctaatctgtaaaaaaaaacacccaaattataattggtcatgaacatacacccctttttgcataaaatgtctgtgacaaaataaaaaggggtaaaatgtttttgcattcaaacgttgaaatcatggccccccccccccccgctttttgttttcaaattcagcacaaacggccttggaattcaggttttgagccaaacattcaatttttttttaatttgggaaaattttgaaatttgggtggaatttgactcattatgaagcatactcttttttgaaatagcctccgtttttcaacctttttcacgtaatttgtatgatggttcagaaatgttcggtccgcttgctcaacagcattttgattgacggcatcgtttgttgcaattgacaatgcccgttggcgttctgtcacataattgtccaccactgttcgcacacgcaaaacccatcgattgatggttttcaactctggcaaataaaaataaacataaaaaatatgggtgcactacaattaacccaggtgcgcaccccaaaattttgccgggaaaaatttcaccgccaaatttttctcaaaaaactttttctagccttctcaaaatttaggatgctaacatacgaaatgtggggtacggatagggccaatcaatctgatagttgggcctcgcttcgatcaacaattgcatccttgtctcgtcaagaccatagctgtcgatgacacccatgggatcctaataaaaaattacattaaaaaagcggaaaacaattaggccccgaattttcgagaaaattcaattcatgttcccaataaattttcccaaaatttaccacgccattatgcttcgactttgacatcttctcaaactccttctgtacggcttggccgctccctttgtgcaccagccgagaattaggcaattctgtgagacaaaaagtaaattaaatattttttcctgtttttagcccaataaggccgtctgaccaattttcttacaaccctttaaattttcaagaaaagagtgctctgtttttagaatgttcaaaacacccaaaaatcgttgggtttgttcagtaaaaccaacttttgttgccgtccacctccgagtcgggcacatatctgccgtcaggcaatttgtaggtgggcgcccggacaacgcccaactgaatgaaatgcgcgaacggctcacggctgggcaccatgccaagctcgtgcaagaaatggtagatgaagcgggcgtagaacagatgcaccttggcatgttccatgccaccaatgtagatgtcaacgggctgaaaattgtctaatttttcattttttggattttgggggacggggtgctcccctcccggaaaatgcgccagcaatacagtatttttatatagggtactgtagaattaagtattgcactacaaaaggccaaaattatataaaaactttgttctaaattctccaattaaatttttttaaaggatcaaaattttttgaaatttatccaaatccatactctatgcttatgatttcaagttcaagtcgtctccatttcatgctcaccatgtgtttgctgacaatgtccgggtcgaacggcgcattcgaattgtgcgggtccaaataacgcaaataataccaactggaatcgaagaatgtgtcactggaaaatgggaagggaattaaaaggaatgaaaccggtggaagggaattaattaattgatcatttatttcttacagagtgtcggtttcgacgcgaccccagccagagggaaagctgaaaagtaaaaatcagttgagaaaatgattgagggattggtaattcataaaaattttcggttacccgacatttagtcatccatacccaagtcatccatccccaacttatccgtacccaattcatccatatatccaactcatccatatatccagtacccaactcatctatatatccaactcttccatacccaactcatccatatatccagtacccaactcatccatccatatatccagtacccaactcatccatatccgactcttccatacccaactcatccgtacccaactcatctatatatccaactcttccatacccaaatcatccgtacccaactcatccatatatccaactcatccatacccaactcgtccatatatccagtacccaactcatccatatatccaactcttccatacccaactcttccgtacccaactcatctatatatccaactcttccataccccactcatccgtacccaactcatccatatatccaactcatccatacccaactcatccat

SEQ ID NO: 568 - DNA, 1052 bp, Heterodera glycines
tccgcaaatgtcggtccgcaaatgtcgatccgcaaatgtcggtccgcaaatgtcgttgtccgcaaatgtcggctttaaaaatccgcaaatgtcggtccgcaaatgtcgttgtccgcaaatgtcgcgacacgaaattttcaaattaattaaaaaataatccatcaactgccgagcggatccgaaccaatgataaaagggtcattgaaatgtaagaggagaaaccgcattaaaattaattgcctgtccgtctccatgcgttgtccgcgcatttcgatgagcactggcagctgttgttccgcaacgggtgccacggcactgctgctgctgccagcaccgtcttcgtcggccaacattggaatgggtgtgccccacccacgctgccgtgacaccacccaatcacccaaccgtcggcttgtcagatagccacccaactgtttgtcctgtggaacaagaaaaaaaacaataatttagagtgcggataaaatagctagcgtgaggtgaggaccgaaaagattgactggaaatggaatgtgtgccgtcaaattaaagttcatgtcagggcaatggttaagaatttgtggtccctcggcggaggatgcaaaatggaaaatgaaaaaatgaggggaaaggaaggatagagaagattggaaaatgaatgaatgaagggaaaaggccaatgtgtggtgtgtgatgatttgaccggagaggatggaaaatgaatgatgaatgaagggaagagagcaatagtggagagagagtgggcggggggaggaagggggatgtgtaacacttttattggcgatggaagggaaaaagtggacacaaaaaataaataaaaaatcaataattacggaaaataatcttcgacggcgcctgtaggccggtgcaccccaaaactcagctgccgaaactcatccgaccgaaattcagccgaccgaaactcagccgagacataattcagccgtgaataaatttttaaaaaattttcaaacttagaaatttttcaagaaaaaaatcttagaaaaatttttcatagaaaattctatgaaaaa

SEQ ID NO: 569 - DNA, 4924 bp, Heterodera glycines
ttgggaaacattattttatgacgttttgggaaacaaaaaaagaaaaatatattcatgtggcctaaactacatatatgagtgccgtttggtgttaaatcccgtaaaatcaatatgtaatttcacatttttggtgtacagtgcacgtaaaagaaaatcattttagaccttcattgtaattttatttttcttggtgtgcaaaaacctatttgaatttgtaatttcacattttaagtgtacatgagcgcgtaaaagtaaaatgtttagacccaaaaaacgaattgtatttcaccttttcttggtgtagaagtgcacgtaaaatgttattgcaacttcacgtttttcttatgtaaaaaagccaaaaaatgaattgcaatttcacgtttttactgtacaaaaagccagaaaatgaattgtatttcacgttttcttgatgtgcaaaagcagattatttattggatgtcatattcgtgatcagcgaccccaaaaaccccatggttacattttttatgtcttttaacaaaaaaaaaatccatgtggcctaaactgtataagtaagtacccaccaaacaaacgtgaagttgcaattaattttctgtgtctttgcacaccaaaaacgtgaaattacaattcattttatgccacttaaaacgatttcccttttgtggtaaaatcgccaattttggcataaatttgtcttggacaagcatgtttgcgacgagcagccacatccggtggacaaacaaacaccccttttggctcagatattgcttaaattgaagcatgttgaagggagtgggaaaaatgttaaaatacgcgattgtttgatgtaggaattttttgaaaatttttaaaggaaatttagtcaaccaacttatatcgtttttttggcgctatatggaaagtcaccgattttgaaaatttttttcattttttttggtcaattttttttttttgacacataatgatgaatattaagtattaacagcataattatggcgaataaaaaatatattcacgattttttatctcaaaaaatttttgcaaaacaatagggtcccccctttggtttttgataaaactcaaaagttgtcaatttttaactagcgctaaattttcttttaaaatgttttttttcagtttattaaatagtatgcaatacgttccatgttaaaaaaacaaattctgcattaaaaataaacaaaaaaaaattgaccaaaaaaagtgaaaaaaaatttcaaaatcggtgactttccatatagcgccaaattttttatggtggagatgaaaaaaaacataaatatttgtaatattgtcctccatcgtctgctccctcccaaaatgagttcacaaataaacaaatgatttcccactcactgaacggttcgttgtgtgacaatttgccgtgcttggccgcttcttcggcaagcgaatgctctgttgtgatgacgacaaattgtgcggtgccaagttgggtcgggtccgtcagacgaaggtcaaactgttgttgttcaacaccatgcccactgctgtgctggaagaaatttctattaaatttgttgaaatgattttcaaaaagaaacaaaaaaaaattttcccccatttttttcacgagaatatagaacaagatttttttttcttcaaattgtctactctgtcagattgtggaccacccaaaacctcttcaaacctatgacactttaatctgatttataaagtttttatttcattttccactaccacatccaaatctattgtgtacacttatattaataaattgtacaccacctccgtttggaggaggaatcggtgcacgtcacaagtgccaatccaatcggcctgagtgccgaccacaccgccccattccgcttccaatgatgacagtccgtccaacaaacgctgaaaacaaattaagaaaataaaaaaaatttcttgagattttttgaaaaatttttggaaaccgagggtaaggggaatgaaatgcacccaacataatgtgcccatagaaaaattgggtcagtgcttcagcaaaacttttttttaacctttgcataacgcggcgtttcaatggcccattggcgaagcagtcgtttctcaattttggcacccgagcgccatgaacaaccgttgtcatcaatctttaatgaaaaaaaaatattgtaatttgcggtggtagagaatgaagcaaccagaaattgaaaacgaaaaaatgaatgggaaaaaatggggattttttaaaattatacaattttaaaacagacttcgtcaaaatttctcagaattttctttctccggcggtgcctataaaaactaacaagggaacctcgcgagctgttagtcggaaaatgcatatgtgtgatataccactggatagagggtcgatttaattaaaaaaacggtcgctcgcctccccccccccctcgccgaagcaataagggtcttctgggtacggcactttaggtcacctgttcatcggccaacacagtgccgtcaagtgggtcccagttcacttcggaaagcgtcttcctgacgaagccatgcctgaagagttggataaaaatccactgggtccagcgaaagtaatctggtcggcatgtgaaaatctcctggaattgaaaagggggagaaatcgcagtttcggcacaattggacgagtgacagaggagggcactcacgcgattccaatcgaaattgacgccagtttttgacaactgtatgcgcatctcctcaatgtttctagaaaaatttgtttaaattccgttacaattgtgcatagcattgcaagagtgtagacattttccccccgccctccgattttttttttttttttttggaaaaattgtatgaaattaaaaaatatattagaggaattccttggaaaattggggtggaacgagctgctccaccagaattgtattgtttccttaaagactcccaaaatttcatttttggtgtaaacgttagtgccaatttggcataaaacattagtgccgccaactcacttatacgtccattcggcggggtcaattccacgctctcgtgccgcattttcggccggcagtccgaacgcgtcccatccaatcggatggatcacttggtgtcctttcaacctgtggtaacgactgatcacgtcggacagtgtgtacacgcgcagatggcccaagtgcagccgcccggacggatatggaaacatgggcaaaatgtatttggaccgcaaattgcgacacaatttcatggtaaaagacaaaaaaaaagctaaaaattgaagcgtgattagactgaaaaccgaaattttttgtttaataattttcacaaaatagcatggaagcttttttcgccgattttttgaaaaataattcatcataaaatttaaaaacgttagaaaaaactttctttaaatttctcggcgcggctttttactcggcaccataccaatttgtttttaggctcgtgccgactttggtgttccaaaaattggtagctttgcaatatggaaaaaagcggaagtatccaagatattaaaatgaatctgtgtgcatatttgtttaccgtttgactctctttttctatcacctgtatttattccacaaaaatacaaaaaaaatggctttgcttttgattttgtcacaaaaaaagggggaggaaaaagagtgggaaagaaagtgtcgccgtcgtcgtctgtacgttttcttttccgtccaagcaaacagatcacatatccacgaattaattcacaaaaacaaaaaaaagatgttcctccgcccctctagcgccagccaagccaagtcctcaccaactcacacagtaatcaggcatgcgcatacaatcgggtccactgaatttgcatggctcaattatacaatttttaggcttcaaatcatacataaaccactcaatcagaaataagcggcaaaggttttccggaaattataaaaaaatagtgaagttgtcgattttcccaaaaattgggtcacttttggggatttttgacaaattttgaaaatctaatattgctcaatatatttcactctccttcgttttcaccatttgacgtaaaatgtgtctcatttgaatttaggcgggtgatgatagcccaatgcgcaattatagtaaagtttggtctaaccaataatgtcacataatgtgtgcaccccatcatccgacctgttttgcagtttgaatcgcttctgtttcgctgtttttccactgttctgccacatcactaaacaagaaaatttgaaaaaccggtcatcatagagtgtgtcatgaaattccgaattccatgttgctagaattcattcaaaacgaacgttgccaacgggtcgtccgggttcggagcagacagaagcgcctgaatggagagaagaacggtgcgaatttgcaaagctggtgaccatttatctgaaaaacaattccaaacaacaaacaccatatttagaccaaaaaattttttcaaaaacaatcccgacggtttctcgatgataaaatggaagagggacatgattttttgctcgttttattttgagtaaaagaaattttacgaaattcaatttttgaaaaaaaaataatgtaaacgtagcgacacgcacctttgagtatgtcaagacaaattcgcccaagtttgtcaatgtttggatgataaatctgaaatcatatattatttggtacaaaataacccgaaggaatcgcaaatttgaaatttactgggattataaaaaacatacctttgtcataaaacgaactttcggtgcagccattggatactcctccggcagaaacaattccaacttaaacacgccccctaaaaataataatgtgtgtatctgttggacggaaacaacatgttgaacaaaccggcaaatggcgactcgtccggacccgcgattatcacatgaaagtaccgtgcctaaaaatgaaaaactttttg

SEQ ID NO: 570 - DNA, 3458 bp, Heterodera glycines
atttgtcatgataaataaagaaatgaataatagcacttctacaaaaatggaaacaatgccataaatgtagtatagcaaaaacagtaattcacctcagaatgaaaaaaaaacaggtaaaataacttagaaatacccacaaacaatgttgttgtcacagttccaacaaataatcaatcaagcaacaatacaaaaacaatcaaagttctcctttcggcttcggtttgagctcattgatccgcgtaatgtagtccaccttctccgtacaaccctgaaaaaaaacattggaattttgcgaaatttattcaattttaagaatcaaatcaatgaataatgtaagatagcatccaacaatattgaaagccatattttccccctggattgtggaaggcctgaatcgttatttccatatttttgcattttttttaaactattagaaagttggctttttttaatctttaaagttttggatgcccagtcaaaacccaactaactcatgcatacataaaaatgttactaattattgcgcaaaaaatgcacgtaagaatttcgaccgacagtgaaatttcctcaaaaaaaagtgaggcttaaaaagagttcattcgatttccgaaaaatttaaatttaaatccgtgccttgcaggaatcgcccaatttaagcaaaagttccttgagctgtttgacacgcattttctccagcaccaaactgtcccaatctgaacaaaacaacacaatgacagaagcaattaaacattaccaccgccaaaacagaagcataaactcaccaattggcttatctgaaagtgatttaaattggacagattagaaattttttaatcattttaacagtttttacaaaaagatccacccgattttaggggacaaaaataaacaattatcatccaaattcacgttacgaaaaatgcaaattattttaatagtgaagttttaggttgaattttagacaaaaatgtgaactcgttgccagtcttattatttttattttatttatgatatttttaccatatttcagtgcgcagatctgagaatccctttccttgagttgagagcatacctgaaaagcatataggtatgtactatatattaatataatttaaaaaatatgaaaaaaaatcaagccaaacttctacctaattaaaaattgtcaatcgattttgttcatttgaatacccatcagagtttgaataaaataaatccagtctttaatgattacaaaatctcacttaaatattagccctattatactttattcggcggtttatggaagctcaatggtttcgcaatatcgcccaggactgaagtggacgagtcaggatgagcgccaataaagaagcactgaaataatcaattgtttttttcattttttaaaagaattaattgaaaatgccaaccaatttttctttcttatcatccacacctttgacagacttgcaatgctcaataatcattttcctaaaaaactggtaattttaagaaaaaaaaaaaataggaaaattgttgaaaaatacttcactgccggctctcccttttcaccagactcatcaacctttttcatcacctccgtaaacagatcagtgcaaacttaaaaaacaaaaatggggattgaaaaaatcgaattaagaaaattttgagagaaaaaatttaaggaatatacacttatttatgtgtcataaaagaaaaatacttccgttataattgccaatatttagtgatggtcccaaggattggattggttcacggaagaggccaaactcccaaaaaatggggtacccttatcataaatgaatttcgatatttattgtctgtcctttccgggaataaaactgatcccagcaaatactgcatatttaccttcacattcatcatactccgcagatgcgtaaaccaacgcaataatacaagttgaaatgagcatgagaaaagttggcttcataattaatgccatggtaatctattcaaaaaaaatgtgcattaatttttaaataaaaataataaatgaaaattacatataggtatgtaaaaaagcatataaaacagtataaagaaaaagaaagctatgcatatgtcatgcaaacgtttatgtgttatcgctcgttcgcatatcaatgtcaaccgaaaggaaaatcgttgtgaaaaaaaatttaaaaaaattatgtcgtggcaaaaaatcaaataaaaaaaacaaagaatttttagcgtgtggatttcggtaagaccttccaaaattacgcatcgactaaaagatgaaaaatgatcacatttccataattgattacagtagtttcccaattctgggataggttacaatacaaaattgtatttggctttacaaataaacacacagcaaaacgtaaggtttgttcatgtgtataaattaatattaaaaaattgtttaaaaaactctctcatcactgtgccagtggcatgggaaatgccataaataaaatgggaaataaaatcaaatcgtcgccttttgtccgatcacatcattctcatcctctttccagaattaacagcaaccagctacaaaaatcccatcaactaatccagtttgattctggagtaaattttatgcacaaaactggcgctcgacacatagccaacggtgccgcacaaaaggccaagtgcgagcgcaaacagcagcatgtaggcaaaatagaaactggtctggaacaagccgtacatccttcaaacaaacaaaacaaattttaatgaaaaataggcaaattcaaatttgtcccatttaaaaaagaccaattcaattgcacacactttgtcttgaagaaatagtaatagaacgcgtagttgtaagtgtaaaaagcaacggaagcaccttgaaagaaaaaacagaagatatttattgtcgaaacaacaactatttttttttaatttaaatggctaaaattaaatcaaacatttttgggaagtgaaaatctttagaaatttttaaaatcttattataaaaattttcaaaatttcatttctttatacaaaccagatgcaaagctcgtccatcgcctaaaacataatattttttgacaattaaaaaaaaattttactcaccaacgatagtcctcagcattaagcagaaaataagtgcccacaatgctcacacaggctgaaattgtgagatgaaacaatttattagtcaaggcttgtaacaaaaaaaatatataaaaaaattaattaccagtcacaacaatcaaaatcagtgcaaccaacaacatgaagccgtacacataataaattttgtaggcccaaaagctggtgaaaatgaaatacctgtgaaaacaaaaagaatctcaaaaattaattgcaatttcctatccccaaaaagtccaattagagtaaaacacatacatttcaatgaaaattgaaccaaatggaagaaagccggcagaaagtgcgatgacaaccggctcaaggtaccattttttgtc

SEQ ID NO: 571 - DNA, 10505 bp, Heterodera glycines
ctgctactggcacggatgtgagagttgcttcaaacctgtcgacgaactggttgacggaaaaacatgccgagaactcaacgatgctaccaaactgcgtttgctaaaactgcaggagcctgttccggctgaggatgcttacggtggagaagatgaacaaggccttgacgtggaagagatttgggagtgtcagatccgagaacagctcaaaagagatgatgaaatgcgagcttttttcgacgacttggggaccgaccgggggcccatcgacccacgtcaaacattctacggaggcagaactgggccgcttcagctgattgcagagccaaaggaggatgagaagatttctgtcttcgatatcgtcagcctctacccgtgggtcaactatgccaccgactacccgatcggaatacccgctgtcatccaccccaccgttgaggagatgatcgtcgactggactcgacctgagcatttacaataccaaggaatttatcgtgtgcgggttattcctccaaaagggctccgaattccggttcttccactaaaaatcgacgaacgcctactgttctgctgctgccatcgttgtgctgccaaatttcggaagttgaacacacgacgagtgcacaagtgcccacacacggatgagcagcgggcttttacaggaaacttcacacatattgagctggcaagagccttggaaactggctaccgagtggacagattctggagagcttggcactacgatgaatggtatgagtttgttaagaaatcttaatatttttgaaatttaggagtgatggaatattcaaggactatgtacgtttgttgatcaaattaaaggtctgaataaccttttttttttaaagtcaaataatgtccaaattgcaggtggaggccagcggttttcctgatggtgccaacactgtggaacaacggcaacagttcgcggacgagtacagaagaatctacagtgtaaacttggacctggaaaatgtgcggagaaatcctggattgcgcttcatctctaagctgatgctcaacagcctttggttggtaccaagaattttagcaaaataaataacaaatttaggggaaaattcggcatgcgaaatgaattaggcgccaacaaagtcctaacaaggccacaggaatttttcagcctcatcatggatcataaaattgtaagttaaatgtataaatgaatttcaattttgtacattgtttaggaagtgtcggctgtcatccctttgtcagacaccgccgtccgtgtcatgtacaagagcaaaaagaatttcgtcagcgaacacacgtccagcaacattgtgataagtctgtggacgaccaaccgtgctcgcctcaagctactcgattttatgacacaaatcgatcgaacagagggagccaaactgttatatacggtaaaaggtgttttaatattgccaagtacatttgccccaacttttaggacaccgacagcgttgctgtgctccataaacgtgacatcgtgcccatccagacaggagaatacttggggcaaatgagcgaggagtatcttgactacgagatcaaaacttttgtctgcggaggtaaaaaaatatttaatctttttaacttttttattctaaaatttcaggcgcaaaacaatacggctttcgaatgttgaacaaaaggacaggagaagttgaatacgtacaaaaaattcgtggcattacattcgacgtgaacaacagtaaggcgctgcagtttgatcacttcctgcaaaaggtgaaaaattacggacggaacactggtgacgacaacgatgatgctcctgccgtgttttcctacgacaaaataatgccaacacgagacagccgaatcatcacacgtgagctacgtaaaaaatacatgccaatatgtcaaaaaggaatcatcaacgagcaatacgaagtctacccatttggatatgaataatgaatttaaaatcatattgtattattagtcaaaaaagaaaagccaatataattaacacacacatttattcgtcttcaaaatgtagcaatacaacaattgtttcagtgaaaataaaaatacttccgttttaaaaggtttcagttttggagacacgtaacaattcaatggggaaaatatcgcggtggtgaccaccaccaaattgaacaacacacggaagggttgggtactttaacatgacacgatgacgagtgtaaaggtgctgctgaaccgtgattcctaggaatccccggtatgcaaacacctgatttgcaccgatggggcacaaagcatcgggaataatcttaatattttttctaagatggacagtctcaatgtccaattggctcagataggcaaggttctcagtccgtcgtttctgtagttgcttcgtcagtcggtatgggccacagttgttgaatcggcacagcactctcaccaggttgtagtctcgttttcgcgttcgccgtcgctccaatagttgatcagatccagctcgtccactatcaggttcatgttgctgctgttcgatagttcgcaatggcgtgacagacacagcggcgagtctcccgggcaaatcttcaagtccttcagctccacatacagaggttcgctccttaaaaaatgtaaatgaaaatattaatatttagaaaacttaccacactatcccctcgaacttcttcttcggatagcatgttgagtacagttcaacgtcagcaatcaattcgagcgacccgtcgatatgcacaggttggttcggatggtcagcgtttgcgatgtgtacacagtcgacagcacaaagtgggttgggatagagacaattcccaccttcaggcccacttttaatttcgtctttcaaacaggtgtacagatcgtctacactgcttagcccgtaactgtcgatcaaataacggattgccctttgcatacaataagtaggtaaatatggtgtgtcagttttggcaaatgaaaatagcctttattaaaatttaggaaaaaagcggaccaactgaatgcaaacaacaaaaagcattctttaaatactccggctactggctccacccctttgatcactcgctgtcgcagtttcatactgtatattcagcaattgttgatgttgggacgaataggcgtcgtcaatgaacgggttgctgtaataaccggtgctaccagacccattaagtggattctttcggttctttcgccgtagctgtttaagtatgtatgtgcacagtacgattaggaacagattgaacagatatgagatcgacatccatgcgtcagacatgcgtagatgagcaaaaacgccgcggttgatgttttggtctttaggtttataaattagataattaaagcggacgtcactggaattggctacaaaaatgagcgcacgattcccttttacatagtcgtcaatgtgaaatttatagatgcgttggtctctgatcacaaacacatggttgtccaccagagtatagtcgcttttatcaggcggaagaaaagcaacaaagttgctcttcaaaatcgtatgggcggaagactggtttgttcgaagccaccaaagctccaggtattcaagctctatttcactaattcgcctctgatgcttatcgatcagaaataatcgacccgagaggtggtcaaacacaacccgtccatgttggataagcctttccactattttctgctgacgaccacggaagatagcagtctcacccgattctctgtcttcaaaaaaggtaaaactatgcccattgtattcaaaacaggccaatggtgacattttcaccaatgatttcatttcaaaaaacacactctgatagttgtgcaaagtatacacattttgaagtgaaactgcccattcgctgttacgctcacacttctctattcggcacgctgtattccaactataaccaaagtgttgtgctgtcgcatcctttgaaaaggtaagatatttgcctctgtctaaatagttttggttgtcaaccgtcaaatccacatttatcagctcagagtgcaacagtaacggcacatagctgaggactagacccacgtaaaaaacattcataaaatgaaccgtcatttttctcactgttcaggaaacgtgagcttttatagaccgttgaccaagtttctgacaaaccatttcaccaggtaatctgccatacttcgagtcttgcgcaaagtctcaatcacatggcagaaaggaacgccagaacatcggcttgccaaaaaatatatacaaaaatggccacacgtatcggatgtgggaagttgaatttggtctttagtgaccagcacctctttaaatgtgttgaggtaggcggctaaatcggggtttgggtactcaccaagactgtcaaaatattccacccctcgatggcttgaagcatagcaagccacccaatgctcacctcgtgtcccttctttgcccgtattcacgaccatacaatgaggaaatttagaaacacgcttcggaattcgatcagatgggaaaacaccaatgaatttatttttggtagggcgcaaccttttcagaattatttccaactgagctgaattcattgatgttttcagtgtcaatcaattgcaattacacacttccgtctgtactcagaacccggtctgcattaatggacaacacagaatcgaattcgccaaggacaagcatctcatatccatccgcttttataggctgctcaaattgcacctttatcgtgcacgtgccttgtctgatcagctcaaaaccaggtgtgtcctccagagtggaggtcagcggaatgacgaaaaaggcccaaccattaagaaaacgctgcatcccaatcgagaccgttttggtgtcggagtcatccaaacccaggcctgcgtacatgtctacaaatgcacgaacaaaacggggctgtgcaccatcgaaggacagcaaatacggggtgctgggaaaggtctgtccgttcgcttcaacactaattgaacgtacattggcgtgctcaaacttgtagggcgacatttttcggttaccggaatatgcgtcggttgaaacaaaagtgcaaattaggcgacgaggcaacgttgaggtgaacacgttgtgtgccaactcggtccggcctgtgccaagaaaaatagaccgcatctcaattttacgcaacggatattttgctgaagtggactccaattgtcggctaatggcaaggttaaggctcggtgtgacgtccacagtgcgcacatagagacgcatgtcatgcacacgtatacggtactctttcttattttcctgcagtgtaccatctggttttttgtatgggggcgtaagcaagaggaatgaatcattgttgcggtgaatagtgaatattacatcctgattgttcaacatcaatgcattttgacgtgccaaatcaaaattcagttttaccattgtctcacactgtttaccgcctgaaaaccgtgccgcacgtgcggtaaaacctgggtttgttgcgctgttctggtcatcatcgtcggggtagtagcacgatgcctcgtggaaagccttacgaatttcctgtgaatagcccaactccttcattatgtagtcacggtagtgataataaattgaactgtcaaacacctcaatacctgaaatgttgaccttcagcgagcggacaaagctgctaccaaagttttggatgaccccaacatgtttatcatttgggtccgtgtcactgagtgctacccattctcccgcatcattcttccgttcaattgagctgagcaggtacatataggttttgctcaagtcacaatattggctgtccgagaacaagcgaaacaaatagggacctgtttgattaagagcagacagaggcagcaattcacgaacgtttgtcttgtttatggccacatttgttggcggtagagaaaataaagacagacttccttctagaccctcaacactgtctttgtcaatcttcttaattacgctcattttctactgttttttttttgttatttatgtttctctcaaaaatttgaattttggtggtgagaatgtagttgatagtgaaaaactcaaattatcatacctatttataggcttcgcgggggtgccaacattttaatgtgcaaatgtgagctgatcgatgatctgtcgtttccctctcaatttgccagttttgttattttttctatgagtgattgctttgtgccgttgccgcccaccttttccacactgattgagtttttcggccagattctcaaaaccttgcttagcctgagtttttagagactctttaaacgcctttccctgtgcgagatcgtcaagcattcgtgttcctgccgaaatgccctcctttgaggcagactttagcaggtttgtggctacaggcatcaggaaccgcgaaatattttgtaacaggccgccaccacgctgaaatttactgcctacaaaatactgcagctcaccacttccctcctgctgctgttgtaactcaagaaacgcggaccaattgacgttgtccggattaaaaacaacgtgcgtcataactgtttttttctagaatagtttttgtctaaaatgtaatgtgattacggtagttccccaaccaaattttacgtaacgtccaaatgctgtctgaatttcaatgttaatttcagaaatgcgtttattttggagagaatgaaaaatttcattggtatatataacctctggcatgtccaaccccggtgtccctgacacgttgacaactcgcagcaacggtgccatgcggtcacctatgatggaatcctccaccagtttaggcgcgtaaacgtacagctgacggacaccaccagacagatcaggtggatattttgccgactgattgttgtaaatgcgtgttttgtgatcaaaccccaacacataggacagctgtttgctcaaatcaacgtgcattactccagggcccattctaatgccgaatcgctgagttatttcattgtaagcaaattcagctgccattttggattcacgttgttgtaccattaactgcccatgctctccgtggagcacttcttcgatgagtttatatgttgaaatgcggtgttcactatcgttgtctttaccttcttcttgtaacatcttctgctgtgcatgtgttccatcgaccattcggtccacttgttcgtcaatcagcttttcaattattttctccttccttctctctgtcgctacggttgattgcttagcaacaaattttgggttattggaagacaacgcggctgcttgaggtaaatttccaccatcttcagcttgagtcactgatgtagcagcatcaccggactgttctaatccacttgatggcggcgtaccgggttcatttttatcagcaatactattatcttgatctgctaaattttgttcagctggcgtctcggatgataaaatagcggtggcagtagtggtggtgttttggtggttatttttactattgatagcttcgtctgggtttgcgggctcatctggtgaaaaggagtctgttcgagtggagctagtcctatttgacccctcagctacagcactgaggcctgagttagctttccctgtctgcgcatctctttttttagcctcgtattccaaagctgcaaaccgtttacgcctgtagtcaatcagccgttgaatgctctctatttgtcgctgcagcgaatccctttccgttgcgtcagtttcaaattcaagcttttccctcaattccctcttcttagtgtactcaagttgaagcgcttcataatttttctggattgcttgccagtaattaacgggattggcttgaaagaattcttggacgaaggttaggttttgttcatggcttaaccgttcaaaatcctcttgagattttttctgatcacgttgcaatgctgcgttgtttaatatttccatctttcttccaaaaacgtgtatggaatttctcattcgttcagtttgtgaattgagctcttcaagccttttcaaatctttaactccttcatactctcccatctttgtctgtagatctagcacatctcggaggtaacttgacctccattcgtccagctgctctctataattgtcggggtatcgggcaaagaaacggtcaatgagtctttgttcattggcttcttgctgctcaccgtcccttctcttcgcctcttcttcaatcaaatgcaaatgttctttcagaaaagtttctcgcccctggaagaccccgagctccgtcgaaagaagtgtttttcgttcgtcatccgctgttgaattgtactcctttgtcattttttcaaccctttctctgagctgatagtgcttttttctcagttctccaatctgttgccagtagtcaaagggatttcgagtgaagaaattctctacttcgataactccagcgcctgattctgacaattcggtttgtcgtttgactcttttgttgggtgtaccatcatttaatgatgatgagccgccaaactttgtatcgtaagcattctggattatctgattcagtgttttttgtaaactttgtacactttggaattgtacatttggaatcttcactgacaaattgataaatttttgcgattcctcgtcagaatttccggcatcttccctgtagttaggattaaccagtttgacagagatagagtcatcctcgtccacactgatcgatgggaatgaatatggatagattattgctgataatgcgacggaccatttggagtcaagctctaaagtgtgcggaagtctaaccgtaaaattagaagcagtatttcctggaccaggtgtgtttgagggaagtacaatgtaaaaagcttccattatttagctttattcaaatgttcgacgtttcactaggtctgagtcacggacccagctgttgtatttgtctgacaagccaacccaacgaacgaaatgttctttgactccgtttcgtgtacgcgattttagcacttctgcgcgatgggtaccgttttccgttgtctttacaagttcttgatcgtaaaaaattccctttatgtcttctccgttcaaatcacgtattctgtacgagtgcgggtctgtgttgtttacacgttggaccctaaaaagttcgtcagtaaaattgggatagtaaccttttgaaaattggcctttctctttgctaattcttacaatatcgccaaatttgaattttgcgtttactttgatttccttgtcaccggtgtgttctttatataggcgttttcttaaagccggagcattcttaaaggttacagaagctggacttattccaatggtacgatttgtagtaccgttcacattatttgcgattttatctatcacccctaaccaccttagagtgttattttcgctaaaatatttgtataagcgctccttgagtgttcgattcgcccgttcaaccacacccgcatgcaggctaggactgtacattacgtgtttgattatgtccttttgcttccagtattcaatcatccgttttgcttggaactccaaacctgcatcactgtacagtttgttaggcagcacaccggcttttttgaacaccttttcaaatgcttcaatcatgtgttcgcttttcttcgactccgactctgcggtaaaaatttttctactaagcacatcgacacagaccaaaatgtagcggtaaccgtcattatgcgcccttaacgtatccataatgcacaggtcacattgccaatctgtatgcagaccactcggcaccgttttgagcctaggaaatttgtttctccgtggcttaaacagtgtgtaagtgcgctggcggtgaagaaattcatagacattgtgtaaggaaattcgaggatttcttctcttggcctcctcccaaacttttagcataccagcatagctggccggtgagcgtaaatcgtaataaatttgttccaataatttatccacagtcggctgctttggtgctatagtcttgcccataattcaggtttaaatttgcgttttggttccgttcggtgtaatccaggggtttttatagacgatgaattcatcatattgacaagcactaattttttctttcccattttcttcactgtgctgcgtcgccgacattctcgcgtttgtggtattttttgaagcagtttcatcattttgggcttttttgagttttcaacgcccgctggcagacttaagaaacgcgtatgggtttcggaatttaagcaacccgctagcaccattaaacatgcgtagattaattatcttttattgcttactttcattggaatcatttttcgattcatctgtgtatttaatatggttttcaacaaattcaactccgtttaattttggtaaatcagtgatcgtgggcaaagtattccaaaattcatcgccaagatcatcaatgtaacttttaatgttgtcattagctttatattgagttgaattgtctccatttttgtcgttattaccatgtacattaacgctgatcaacaaaatagtaataataataagaatgaaattattaaagaaaatgaagaaattcatttttgcaattttctaaaaaaatatgaaa

SEQ ID NO: 572 - DNA, 2565 bp, Heterodera glycines
gttaagaaaaaataatttaaaaaattttaattacatgttttcctggaaatcttattttttttgggggggggggattcccacgccgtggctatggacctgactggtgggtaatgagtaaattcgaattcagtcgccttttccccttccgttgccttaccttttcctcctcgcccgccatgtaatcgttgtcgatgggatatggccacatcattccgcgctctgtccactgaatttgctcttcccacgcgtttttgggccctaacccttggcccataattcggctcctccgctcgtcccaatccctccaaaagcgcagcggtcgctctttgagtgcgtcgcgtcgctcctccgcaaacagcggacggaagccgtcgggcggtggcgacgacgcggcgaacatcgcgcggtacggcgcgctgcgcccgcccgtcttcgttttgttttcagcatccgtctgctgttgccgcgtcctccgctcgacgaagtgccgttgaaattgttcagcctcggcggaataagaatccacgaaatctttcctactttattaaatggcatataaatgtccccaaatggcaattgaccgactttatagccatcgaaatggacattttgcactgctccgccagctcctccaatcgttcccatttttcgccggccgcaaaaggcggcggcgttttcagcgaacgtcccccgtccgtgttgggcgcggtctgatcggaggccatccgcgtgaattggtccaacagccctttgaagtcactctccgcccgttggtgcgcctgaagcgcgccaattccctgctgaaaagagaggggaaaaattggaaaatggcggaacggcaaaagtctatttgttgtgattaattgtcagtgattccaattattttgccagaaaaatcacctgaacgtagcgatagaattgctcattccgtgccgcaaccgccgccttttccgctattctccgggccgcttggtgcctttaaaatgggagggagtggaagcaaatgtttataaattgtgataaatgaattaatatttacggttttttgttggtgtcttcgccggacgaattggccgacgcgtcgtcagaacaaaaatggcacgaaataaacggcggaccaacgaaagggcaacagggcaaagccaaacgccgctgacaatggccaaaagtaacgcgttgcatcatcaaaaaacaaaaaggacaagaaaagaaaaaggaaataaaaaaggtaaaatcgaaaaaatacgaatgacatttttaaaaagggaaaattattagaatatttatttatcaaagcataaaattgtaaaaaattagaacaatgaacacatgattaaataaaataaaaaagcgggaaaacgccaagggatttgaaaagagaaataattcacaagaaatgtaaaattaaagaaacccttatgttcataaattagccattggttaaaatcccttggggtaaaatgaaattaagaaaattatttgttaaatgtaacaagtcgatgaaaaagggttaattcgcttccgttttaattctgagtgatgccttctgcacaatgtccttgccgaactgctcgaacagtttggggtcatccttaaagccaaaaagatcacaaatcaagtcaaaaatgaggaagagactgaccaaaaatgggctggccaattctctgagtgtaatgaccactcttcggccgaaaatatggcacgggaaaatgccgtggttccattcggagcgcacttcaccggacaaacacaaaagggaacggcgcgggaccgggacgaagacgagcaatttgcggccggggtgttcaagtgtgaacacacaatccgagttcagagagacactgtaaaagcagcaacatacagtataggaagggggaatacggtagaaaggagagaaaaatactgtaatacccggatgttcatcaaatctacctgacaagtcgctcgccccatatccattcgtcatcctgagaagcagagagtgcatttaaccaattgcaacaataaaaattcagacaatttaaagggtccccagcccgacattccataaaattcagtggcaatgttctcatttaacttatcttgccaattaaacgccaaaacggcttattccaatttgtcggttttcggattccctctcaaacggataacccttcggttgttcgttaaaacaaaggaaatgagcagcaacaacgaccaccttatgcaagtcaatggatgaaagtcgctcactggagtagtccaaattgcacaattccaccggacggaaaccatcgaaaagtcgcgcgacgccctccccccgcatttgacccatccgaagcaacaaatggtcaacatagtcgggcaagccgaagaatttagcactgttcacgcgttggtatttgaaattgacgcggggcccgtaatcctatgaaagaatgggggatttaaatgtgaaaaacccaaatatatgtattaaattggtgggaaatgtccgaagactctagaaaaacccggaaataacaaaatttgaagacgaactatgttgaccgtttagacaacagaggacatgctcccgattaaaca

SEQ ID NO: 573 - DNA, 1830 bp, Heterodera glycines
ccccgactgcgacggcgtccattgggcctcatcgatgcgactcaacagaaattgctcctcactttctgtgacaaaatcgggcaccaggcgaaggccgggaagcgcaaaacagcggccgtcctcacaaaagtggggaaaagcaaaagcaacggaacggacaaacgccgcttcggtggacaaagcgacgggggaagtcaaaaggacggaactgaggagggaaaaggaaaaagaggagaacatcaattagcatagagaggaagagaaaaagcaaagagccaaaaaagaaaatttaaaaaacaaaaaagggaatctctgagagtcgagggtcacaacctcttcttttattatttgcggattctgtccaatttcattttcatggcaagaagtctgagaccaattggcaaatttttttagcgacaaatggaaattttctctgtaatttgacattccgtcctcttttggtcaaatgtcagatttttaattttttttgagtcattttcgtactttgattcggcacttttatgtgcctttccgtccgtcacattgaaaatgctcgcaaaatgttccgaaaatgcgttcccttccgtccgtacgtcgcccctccttttcctcactctctccgtcccctgaaaatgccaaaatatgcagaaaaatggaacagcacaaaccaaacaaacggcgcagtagcgcaggcccctgcacgaacatttttgaaaatcggcgactttttcaggcaaagagcaatcggacatcaaacgaaaaactgcaaatttgaaaaaatgaaacatttgtgaatgtaatattcggtgtttctgtgtatccttttctcccacaaaaaaagcaaaagcaaaattaggtaaatcttattaaaattttttgagaaaaattttaatgttttttctgcaaaactgacccatttaaagaccgtttttttctttgttttcttgctttttaatcattccaatgctttttgtttgttttgagtttggtcccacaaattcatatttaacatttttatgaattacctaattaggtaattaatgcattttttcttatttatatgtacgtatgaaaatacgataaataaattcatacgaaagtgcctttggcatttcgagaatggcaggaggaatttgtacaaaaaaaagaagaggaaaaggatcacaaaaaaaggaggaaaaaagaacggaatcacacaaagtgacaaggccataaatttacaggaaaataaattaattaacggtaattaatgaacaattaaacatgattaattagttaggcaaataaagatcgtttaaaagtgaaatccgcggggcttttcaattttttgccgttggcggcgccgaagggacgggcaaaaaattgccaaaagaattccgacgaagtgccaatggttcaatgttgtgcattcgcatgtacgaagtcactgaatttgatcgacatattgacacaacacattttcctgctatccaaacagtgagttgttatattcgaaagtagaatttcccaattttccaccggtttcgggagagcccaaaaatcgagtcggaattttcgtctcatggatctcgatcactaccatttttgggtccctccctccctctcttttacaccgatctagtgatctcgggtttagtgtgtgcccattcgtcctccgtggcacaattgtccacccaccttggtaagggatctcttcaaggacggctttggcaagttcggcctgcactttcgcctggtgttcccatgtcaatttgctgttcggcgattggacggcgccgtaatattcgcgaaaagggacaaactgaacaaattgggggggggggggggggg

SEQ ID NO: 574 - DNA, 1245 bp, Heterodera glycines
  unsure (1)..(1245): unsure at all n locations
cgtcgctgtccattcgtccattttggaaaagtcttcgtcaccaatgccaattatctgaaaaaggaaatctaatcccaaagaacaggtcgagaaaaggaccaggacaagaagccgatcacttacaatgattgacaatggcagtgacgaagcctaaaattaaaaaaaagtggcaaattggcatccaaatgggcggagaaaggcacctcaatgatggccaatttggtcttcaccatgtcgtaaatgagcccgtccgtgattaagagcagaatcttaacggcaacagcacataagtaaataaacgagtcttacaatacggtacaattaccatacccctaacaaattgcatgacccaataggtactgtatctgtgcaaaaatttgcacaactttcaacacctgatatcgtgatccatcgcgtggaaaattggcgcatttctgagaggcgtagcgcaccgtcggctcaaaataagtggggccatacagcaaaacgctctgaaggggaaatggtgtcaaatatacggtacagtacggtatattaaaaattttgttttttgccctcccgcccacttgaagcgtcgtccgataggcgtccatcactccgtcgacgccacgtgccgcgggttgggcattcgcttgcagtgggaacaaatggctgaccgtcgtctgattgggtggcactttggcgccgaatccaaacgcctcgaactgcttggagtcgttgtaatgttggcaaatttccaacaccgatcgaatggcaatttcgtattggttgaggcacaaatggtcgatgaaatggcgtgaatttggcaagcgaacgtcgccatttgaggcagtgaagtcgatgctgaccatgaactcgagttgcattctgtgcaaaacgaaccaattcgatagtaatcgcctcattcgattagggacaattaaatatatggtaacaattgcccaaatgacagcaaaaatcgcaattaaaattagcgtaacttttcgatccaataaaatttaatttacaattggtaaaatgttttttgcgcgtaccctccgccgacaaagtcgagccaagtgtactcacgacggcactcagccagcagaaagcgcaatgtgccgcagctgaccattgangggggaaggggcgggcggtgtcttttttttgaggcgtttttttgcctccnttttttccgttcnncacgggaaactgtgcntggcgtaaagtgacgagtttctgggacggaaatgagcgcagaaccaa

SEQ ID NO: 575 - DNA, 2228 bp, Heterodera glycines
  unsure (1)..(2228): unsure at all n locations
tctccccatttttgtcctccactggaatttaaataattaatcgaaaagtgactcacccgccggccaatttgtagtcgaaacattccaccaaaaagtcccttaaacaaataaacaccgtgacaaatagacgacccctctcttttctcagcctaactccacctgtttttgtccccctggcaaaggtgccgcaccgaaatttcgatgggcttccattcggggtccaccgtccgagtttggacctctgtccggtagacgagctgtttcctgtcccaaccgatgtgggggaagtgaccaatgggaacagaaaacccacgatccgtccgcgtagaggcggtgaaattcgaggaaagggtccctcgcggaaaggcaccagcaaatgcccttggaggccacctgctgcccatggcacaccatgcgcaccatctctttttggccctcgtcgacttcgtccgctcggatgatcaatttgccctcttggcctggctcatccccaaaatttggtacttttttcatgccctctttccgcaatttgtgctttttcattacttcagcttaagcgtcaatacgccgtgtgcggcggccacaatgtccgccaaatggcactcacagcggcctgaaaagcagcgtgttcagtctggtccgaacttagattactgcacagctgctaggccatgcaattgccaaaatccgaaaaatcagtctaaatgcacgcccgattcctaggacaaaatgccaatacatgctgactcgaaaaagaggggtgaccaatgcgcaattggagttgtaaaagcattgaactgcttcaacacgttgggatttgagttttgtttcggagatcggcggagttaatttccacgacaaatgtttataaaattgtcgtgccattcccttttctctgtcttcgcattcttcgcattgtccgttcccaaactcgaccactcttcccagcacagaacacacccaaaaagtcctggctgctcaagtcgcgcgtgttctccgtgtcgatgtcgaacacgtcgaagcgcaactgctgcttggtctcgaagaagtaattcagcgtcactttggtgttccatcgcgggttcaaattgttccaaatcacttccgttcgcccgatctccacatactcaggccccgtgccgcctttgcccggcaccagcgaataaatcacacacattgggtccgacttggacaacaaatccttgtccttcagatccctgtgaattttttggccactttttcgtactctctccggcggtactcacctggccgagagcattaactccacccgcgtgtgcggaatgtcgggctgacccggcagaggcactgaacaaaagtgggcggactaagcattattagaaaacgaaacattaatgagacaatttagaaattgagtacatggtcaaaaattaaaagtgcgtggtaataaaattaatcgaaccgacattttttgtaagtttatttaattgcttatttttccgcctaattggcccttttgccactttcccttttcacctgttccgccttgggcatgcatttcccttggcttttgtgccaaattttgccgcatttcgtttctcttcctcactttagctgatgattaaatgtcggctaaatgattacaggctttttcaacggtgctgccgatgtccaaactttttaaatagtttattataatgcgcatttatttgttatttttcaaaatttgaatgaatgccaaaaaggggtcatcgcaaaatgctcgtaaggtaagaaattggcaataaacttaaaaaaagagattggtgggaaagggaggggggggggcaaagaaagggcgggaaaaggaaacgtaaaaaaggcatcaattttcgggggaaaagggggggggagggaaagaacacactttcttctcatttgttcgcctctttgccgtcctttcctttgtttggcacatatttaatggacatattttacgtttcaagagatttttttgggattgtgcgttaaaaatgagaatttccttcgtttcgaaagatatgaaaagggacagcgccaaggaaaggaaaggacgaaaaaagggattttatttatggccaagtccattcaaagaacggaaagtgtgcccagcggggccaaataaattatgccttccggcggcggaggacccacgaaagcgtgtccaattcattngtcgccgaccaaacgcgtcagcagcaaccgacaaagttncgttttttaaacagctg

SEQ ID NO: 576 - DNA, 1384 bp, Heterodera glycines
  unsure (1)..(1384): unsure at all n locations
tcatttcatttgtcgacgacccacgccagggaattgtgagatgattgattgtggggagaanggcacagacaaaagaacaaacaaaagagagagagcgtctttattgacttttaaattctttgtcagtagcaaaaatataataagtgaaagaatacggttttgagcaattcattcatacatgaactcaattagtgcttaaaatctcaaaaagtaaaaaatcatttaatttaaatatcaaaaaaagaattgagcggtttgtttttgtccatgtatgggatgacacattacaatcgattgcactcgttatgaagtgagaagtcaatgtgcggagaaagaaagggtgggcgctgaacggagagaatggaaaatgaaaaacatccaaattaataaataacccacaaattaggaaggattttattgcaatagtccgtccattcagaacccattcaaataaattatgtgagcaaaaataatttaatgagcaataaaggaggaattaaaagtctgtaatatcatttgaaaaattaaattagtccactggcatataattaacgaattaatggtttgtggtttgatggcacatttttttctgccaacccgccggtgagaagatggggagaaagaaggaactcagaaacgtcgacacatgataataaatttcgaatacccaattcaaaaatgagcaatggtcagattctgccgatgcgccgcgtggagttcgggatggtgcaggaagtaccagtcgtgcacgtacatcagaatggccatcggttgtccgagaatgagcgaaagccaaacgacaatattcccggcacgaccgccctggaaaaacggatgaaaaatggtcgtattatgttttgaaatttgttaaaattgtccggaggcatttttttaattaaaaatatttttatcaaaataataatcggcaatttctgtaattgtttttttaaatatttgttcaaatgggatgcaaattattaacaaattcaacggcaccttcaagtattggtccgtgaacatgccaagcggaatttgggcaagcattccagtgcaggcccaaagacgaaacattttcaacggaatggacacctaaaagggtatgagaaaactaagtgttaattgaggagaataatggcggatgacaaaccaaatattcgtgaaagaatgccgaggtggcgaacacagccagcgaagcgtgccatcgaccaaatccattgcgcacgaagggcttgtacatgtggtgaatagcccaccggtggacgggaatgttccacgtcttccaaaacgtcgacactgactccgagttccaaaagtcccttaaattcaaaataatataccagtggctgaatttcctcanaatttacaaantaaaattctctgtcag

SEQ ID NO: 577 - DNA, 1273 bp, Heterodera glycines
aacaacgagtcgcgtgcgacgtgtacctgacggttcccctgcttgagaaactgctgcgactaattgcattgtcgcaaattatcagcgtaaaatataaaatataatcaatgagctcaataaattcaatgagcaactgatgaaacaaagaaaaaaaagcagttgaaatattaaatttggaaaagtgcgtaaaacaaaacacgtaacggtctaacaaaaatagaaggaataagaagagagtgttgccgtgagccaacacccaatcatgccattggccgcaacaacaaatcgggacaaaatgtcaaaatcaacggcgccctttgttggtcgccaaactcaaatagtcttcgtcggccaagttcaagaaaagtccgtccgaaggcaaatagacgcggtttgacgagttggcaatgaaacgcgcaattttctgagccgcacggatttttcgcagtttgaggaagccggggtcattcttcatcgactcgcccaacttaaaaatgacagagtatttaagtgagtaattaagaggggttaggagagggtgtttaaaactcaattaattatggtatgtctataaaacgcatttatttttaaagggcaaaagaccccgccagaaaaaatggcaagcgaaaattgtctttttcaattaatggggaaccggttttatagccaaaggggaacagagacgaaaatttatgaaagacaataaagaaataatatgaagaaacgatttgtttttggaattaagaaagtacatggtcatgccaatgtaaaagaacatttttataaatttttggaattccatcacaggaaatgtttattgttttttacttggtacggtatgaactccttatgtataacccatttctacgtgtaaaacacccaaacaaaattttttggatttcttattttgtcacaaacaacgaaaattatagttggaaatgccgtcctttttttaccaatttggccgcttgcgcctctccctcggcttggacaattttctcctggcgctgttggatggccttctccaccatgaaactggcccgctgcgcctcctgtgccgccacttgttttgcctcaacggcggcactgtattggggcgagaaggccaactcggtgatggccacatcgtcgagaatgatgttgaagtccaacgcacgctcaatcagaccctttcggacgagcagagacacttgctgacgttgggtgatcagctgggaggcgttgaacttggccacgacgcccttcagcacctgcggggggggggggggggggg

SEQ ID NO: 578 - DNA, 3962 bp, Heterodera glycines
  unsure (1)..(3962): unsure at all n locations
tgcaggtcgatatantttctttaaattatgttgtttgagtctctccccattattacgccatctgtgacctcgttacaaattgacggaagcactcgctcctcccaattggtgccgagcatccggcagatcgtctgcagctgccccgggtccggtcgggacagcacacgaagcccgatgttaaccatttgcaaatccttgctgccggtcggcgaccgaatttggttgggacgtgcacgaatgtcgtagacaatcggatattggaaccatggaatgcgaaagtgcagtccttcccggtacacctcgtcgccgagcccaccgattcggttgaacattatcgcacgatggccagcctcaactgaaacacacaattatacttgtgtaataaatttatgagaagcattaggagccattgtctgcgcaaaaactcactcgtatacatcgacttgtacagcgcataaccggccaccgcagctgcagtcatcaagccagcgccgactccggcacctttgctcggtttggcaaacttgttgaagaaatccttcgggtctatagaagccatcggcaaaattgtaagcaattaattgacaagcgttataaaaaaaattaataggaaaaagaatgaatgcatattgaaaataatgaacgattaaaacgaatggataattaaagaaaatgcaaacgcaaaaattttcagcaaacaaacaaatcgagaaagtctcaaacaaaaatggttgtgctggtaacgataacaaagaaacaaaaaaaatctcctttaatcgccacgggtccgccccaatcgaccatccatcggtcactgtgtcatttatcatccgtcactctttggtcagttaatcctccctcctctgatacgcctccacttccagttcagtcaattctccgccaccggcatttgccctctcttcttttgctgctgttttcgtctctcccttttccctctttttgtcctcctcgtcatcttcgctctcccaaagttcaaacagttttgcacattctatcgccgtgcgttcatccaatcgttgagcgtcgcggattaatgtacgagcccattcttcacccattcccaaaatgttgtacagcagcacgccaactacaacatttgttgttggttcggtgtagaacacaacagcacggagctgaaattcaaataacaaatggaaattattgtctcaatctactctgatggatttatagtccaaaagtggaatttgaagagggaaggaaatacaaagattctatggtagcacaaaatttaaaactaaaattatacgggtagccaaatgccaaatgtgagtcagtgccgaattcaaagttccgtaaaaaattacagcaaataaaaaaaagaatgaaaggaaggtgccggctaaaaaagggcaattcaaaccatagattcattcacctcatcctcagcatcttccgcaacttcttcatctcgttttgcaaatattgttgtcgtgcttaaactatgcggatttacgtcgccaactccacagacatgagcatatgggccgaacattgagacgaacgctcccttaccattcgaggaaaaatgaaaaagtacgatagtgggatgggttaatcaatttgtggacatcggttccaaaaagcccaactgaccacaatccggttgtgtctctattaccaaaagtatcaatcacctgatgggtgtacgttttgtgtccatccgtcatattttctccggcaatccgtcccgtgatttgtgcgtgttgccaatgggtacagcgacgtcgcctttttagaactgggtctacgaaagaacagacatcgccagcggcccacacattgtcacagacacgcaaatgctcatcagtcataacgccaccgttcgcctgacaaagaacgagcaaattaaaaatgaatttgatgcaccaattgtccctcccttccaacaaaattgcaatcaattagtgaatttactacggatcactttgtccagtttaatgctgctcttttcgtccaccaattcgatgttcggttcggcgcccaacgcaatgattacaaagtcggccataacttgcttcctttccttcggaccgtcgcttgtcgttgctgcagttgtgttgagacaaattcggcgccttttctcatcccttcccttaaccgatgccgaatcaatgcgagtgtccgtcagcacttcaattccttggtatcttagcatatccgttgaataatcgctcagagcatcgggcagaatttcggataaaattcctgaaaaagcataaaaatgaatcaaagaaagtataaatttagacccaattaaactccaatgccctccgtgaattacaccgattctcttccccaccgggttcttggcacagctgcacaattttcagcgcagggttttcctggtcacgagcgtaccgtcggttcagcgagtaggccaattccgtgcccaaaagaccgcctcccaaaacaacaataacattttgtgtgccgttttcagcgacagccattttgtcaactttggaataaattttccgaaagtcggaagccttaaattcgattttgttaatttcttctcactaatcaacctttccaagtgttgtgacaaagtcatccagttcaggaaggtgttcaagctgtgtgtgcaaccacgcgtcactccctgagcattaatttggcacaatttgccaacagtttgcgtgccctcacctgtcgcgataaggcatttgccgaattcgatcttccgtccatcttccaacagcacaaagcttccctcggtgtccaccttgacgacctttgcgccacgtattagcccaactccgccatgttcccactcatcaagcttgtccggtggcaggtaaaagccgtccgcctcgtaaaaagcgtaacgcctccgtccggtgctactcgtcggatttgtgtgggacagcgagtcaatgctcgcctcatcggcaaaccaccaaagctcttgaaatttagtgttgaaaaggttattccgaagctaattgtcccttcccaccctttcattccctgcggtgtttccccatacctttggacaatggtcctcttttgtacggtgtttcatgctcgtccgttatgatcaaaactcttgcgtccgggtccctcgcacggattgacaacgacgcgtaataactcgcagtgccaaaaatattttttcataattcgaactaatagattttataaattgtcgccaccctcccaccaatatcgtggtgaacatgcttttagcttgttgccacccctcaccctaaatttgtaccatttgaggctttttatttctcgattttagggtcaatatatccagaatcaaattaataccctatattctactaaatttttatgaggcacgaaattggcaataaccatgacttaccaccaccaatgaggacgtatgggacgacacttctcaacacattattcctcaggcgtgggaaattaattgaagcaatgaaagcacgtctcataaaattcatttgtgcaaaacggaacaaagtctggaatttcaaaattattataccatgttaaaagagtgaaatactacaaagaatttcaacaattaattcagtcgtaacggcgatttattcgaaaaatttatcctttaaaaagcttttgttctccaacttatcctatcaaaatcaacaatatcggaatcatcgtcatcagacatttccacagggtcaaagttcggcttttgctcaaatttggttgccaccgactcgacaatgttttcctttttcttctcgagttcgttgaccattttccaccgctcgatttgttcgtcaatcatttcgatgtccgaacggagtgccgactgttcattctacaatgactaatcattaaaaaagcaattaaatttaaacggaccaattcctcgtgttcatcttctcgctgaacctccaattcttcgaccctcttgtaaaatcggtcaatttcactggtaaattttcttttgtttttca

SEQ ID NO: 579 - DNA, 2962 bp, Heterodera glycines
  unsure (1)..(2962): unsure at all n locations
atcaaaatacttcgttttattttcttttcactcctcccataatccgcaacatcaaattctgtcggttgtttgcgctttaagtccgtttcggcaccgtttctgctgttgatggcatttacttcgcttgttgtttcctttgcctttttcagcgaattgtctttgtccttcaattttgacaatacttctctgtgcttccgtccatttatgtgtgccgtaagtgtctgaatgaaatttgaaatatatttgtccaaggaagtgccaaatagtcaatcgtctttcccctcccttaatctacaaataaagttgctgggatggattagttatttcataaattgctagaactctaggaaatgatttcaccttagttttaaattgcattgaacaaagttgacaaaaagaattcccattctttaaatctttgacgcatgatgatgatccggaagacattaccaaaataaaatacctacttttggtttttattaatgattagaattgtccggaaatgtatacgaatcagacaaataacatcatcacaaaaataaacaaataaattttaattttaaaatgtgaagacgatatctttaactagagcccggattttgcgggatcccagtccgcaatcattacgggattatacgtcccgcaaaattttgaagttccaattccgcagcggcgggacccgcaaatttgatttttggtgcgggatcacgcgggatcagcactatgggtcaactccactgtgcagatgctcatattcacaatgccaaggttaaaaatccgcatatccctagctgtagctatggtagctgcagatcgattaatctacagctcaaaacccgtattccgaactctgaatacgactggggatagttcgatccccagctacctatccaaaagatacggataagccgctacttttccctttgttagtgtattctttgtctagtgggtagtttgttagttttctaacaatatctatgcacctctaagaattgaaaaattttctcaaaaatgaattccctaaaatacatttttttcagataaacttttgtttaaaattttcggcgcccccacaaagtgtccaagccacgaattgtccaagccacgttttgtccaagccacgaattgtccaagccacgaattgtccaaaagagtaaaaacccacgaattgtccaaaagtctaaaaaactcatagaaagccggagaatgggtctattttagggttttcggggtcgctgaataccaatacgacatttatatagccccttgcctaaccctagacccaaatataaagattaaatagcaaaaaaatattcaaagctcttacaaagggtgctgatcaaaattcgtacaagtttagggctcctatgtgatccgaattccctctatagacccaccctcagcttcacacattgaaaaaataattttattaaacattcaataaaattcattacgggacatggacaactgaatcatcaaaattttcaaatccttcaattttcctgcatatccctcaatttgagagtgccggcggaattggaaaatgtggtgcccgaacgatttcgtcctcccatgctgtaaatgaatctttttattgagtttaaacggtttaattgattaaagaattctgcctgaaggcgctgtcgaagtcgatagcgaactcaacaaatattgaacaagctgctcacgtggactcacagtggttggccatgtaagagttgatggtgccggtgagccggtgccgaactctaggggtagccgcatagcttgttccgagttgatagtcaaaattattgtcccgagtgtagctaaaaattttaatttttggaaataaatgcataaatctaacaaacaatggttgccggtgggtgaaaattgagtggattatctcaaaatgcgttaacaccatccaacatctggcgctgtgtcaagccgatatatgttcgagagaagtaaaggaagaacattggcattccaggagaagacggccaagataattgagaaaaactcgatttgtgcatcttcagcgatttcctgagtggtgtgtgaatctaaatcctgaatagtttggaaataaattttttgcggtgcttcaaacatacctttcaaccatagacaatctcacccaaaattgatttttccgcgctcaaaggtcattgttgaaagttcagcctcgttcaaattcggttgttcaacgctgtcagaaattctcacggcattcggttcgacgaatttcactcccaaattcacgtcctcctcagttgtgtttgaaatgtctgacaaataacgcttcttccgactttcttgtagactttcaagtttattacgaatcattttgttcgatcattgaataacaaaatcntgaagacaaacaacagcatatattttaaccgagtttttagatttttcttattcgggtgggtctagggttaggcaaggggctatataaatgtcgtattggtattcagcgaccccgaaaaccttaaaatagacccattctccgcctttttatgagttttttagacttttggacaattcgtgggtttttactcttttggacaattcgtggcttggacaaaacgtggcttggacaattcgtggcttggacaattcgtggcttggacaattcgtggcttggacaatttgtgggggcgccgaaaaatgagttaggtaactttaattaaatttattatttaatttatttaaaattatttggcattctatcttagaaaaattttcaaaaaaatcaataaaatcccgcataattccgcacaaaaaatcaaatttgcggatcccgctgcgggattggaactcaaaattctttgcgggacgggatcccgcgggattaataccgaaaatcccgcattttccaaaaaatgcgggattgcggactgggatcccgcaaaatcccgcgcggcactcggtctcgtgtcggcatctactttactctccgagcttcaaa

SEQ ID NO: 580 - DNA, 540 bp, Heterodera glycines
tgatcagagaggctctagaaccaaataaaactgatcggagaatgaaagagcgggagtttgcagtttggtggtcaaacggacatttcttatgtattttctcccgtgaatacaaaatttaattgacaaattctacaataatattgttaaattaattttagttttcatttaatcatccacttggacgaataaaataatgcatattagtcagagcaaacatttgccacatttatacgggcctaaaaggcacttaaaagctagagaaagccagcaaaaattcagtatacaaaaaagcaacagtgtgcgatgttttgaatttcagaaatattctgatttagatggtccaaatctgacaaaaaaacattgataaatccgaatcctgtgtgagtttatacataaaagacaatgcattcacatgtagcgatataatggaatatacaatggaatacagcagagaattacatattatgctttacatatatcgtttcatcgcattgactgttttatgacaccagcatcattcttcattccactcgtcctctg

SEQ ID NO: 581 - DNA, 2580 bp, Heterodera glycines
tcatcttcccgtcgctggtcacgtgatcggtgttgtaaccggtgccgaagcgccataattccaaaactgatcggcccgttgctgtcgttgtcacaaacttaacatttccttgcatcgctccgaaatgttccttcattttgaccaccaattcttcatgttcgaccatcttctgcttgatgaatggtggtggcagccaaaaaaccggcacatgactgaaccgcttcagcagctgctcaagtctccccactcgctccatcacgttttcaatcgtctcatctcctcttatcgagtcccgcccaaccatcacaatggcaactttcactttggaggagagaatggcgccgtcaaacgccctgatcacttcggtgattgttccattttcggcaccgataaattgcgatttgggccaaagtttgaccagttgtttagctgaggaatcgccgatgatcacagtcgccgtctcgaccaacagctgtttccggtggatgattgtggcacgcactttttcgagaacgaagttggcccttttcagcatttcgtgccatcccatcttctccgattcgggcaattcggcgacaacgttcggcagtggcacttcaattggcgcgtagcccgtcttcatcagcttctctcgtgtgaccgcacatcgttcgacccatgccgtaaaggcactctcaatgtcattttccgtcgggaaaaagccattcttcacaaggtcttcgcgtccgccactgtatgcgatcagctcgaagccaacgggtgcactgatcacaagctgcgtcaacttttggccgccggcgactgatgaaactgcgcccgatttcagcaagaaattactgaggagagccttcattggcgtgccgatcaccttaaaaccaacttttccctcaacattttccatcttttcttgtcttccaatcactttaaggcctaggccggccctctcaagcactgggtcgaggtcggcagccgttaattggacacaatttcgatgttccgtgccgagtccgccacattgcatctcccagaccaaaggatggtcagcgttgtccttcgctctcacctcgccgtcagctgaatttgcaattgtcctcaattgcccaataaaaagctggcccatattttccgttttttgaaattcgtccatttttatggttccatttccaaatttaacactttttgtttgtgtaaattgtccattttcttcacacgtctcaatatccatttcacgatacaccaaacaaactacactcagcaatgcgttcaattggtttttgaagggatttttaccccgagggagagtactaatatccggtacaccttccggaactttcactagccgctcgattggaacacttataggttcaaaattcggtttatcgactggaaccaattttgctgacgaatcagagagatccaaaattttatatggaccgaactgattccaaagaagttttcggtgggctgcgcgggtatttacgcccggaaatatgaccattactctctcgccgattttgaatttgtctgctgtcacttttggttgtttttcatagtgatttttcatctttatgcgagcaattttcgagttttcctgtgctaatttgattagctgcgcaatattttcgcgaaaaagttgaatgtaagtgtctacatcaactgtatagttcgggttaactggcaaaaatatctcagttggaaaatttgggatttttccaaacatcaaatggtaaggcgagaatttagttgtctcggatggagtaatattgtacgcaaaaatgacaaatgggagtctttcgtcccatgtccagttcgatgccgtcgaccgttttaacattgccaaaatggtctgatttgcacgttccgtgattccattcgcctgtggatcatatccggatgtcagcgatctctcaactttcaaaattttcacaatttcgttcagagtttcgtttacaaactcttttcccctgtcgctgtgtaactttttcggagttccaaaaatcaaaataaaattcttgacgaattcgctggcgattgtgtccgcacttttgttaggaattgggacagcaaccaaatatttagtaaagtggtcaactgcaaccaagatatatttgttcgacgaataggcaagcccaatcgaaagcacatcaatgcacactaattcaagtggttccgacgtttggacgattttcattggcggttcatttgctcgtggcttccgcgaatgcgcacaaatccggcatttttgaaccattttaacgcagtctgcgtacatgtttggccagaaaaattgttgagcgagttgaacataaatcttttttccgctcatgtgtcccgcgcaacttcctgaatggcgctctcttatcaatgcgtcgcgaaagatgaatggcacaaagaggcgtacttttccgtcgttttcgcacttgtagagggagtcatccaaaattgtgaaagttggaagaagcgaaataagcttttgcttattttttgggtcctgtggcacaattcttttgttcaaaagtcgtagatgaagtccaattcgctttctttggtcttttcatccattcctgtcgatttttgacc

SEQ ID NO: 582 - DNA, 8633 bp, Heterodera glycines
  unsure (1)..(8633): unsure at all n locations
cagttggaaaatttgggattttcccaaacatcaaatggtaaggcgagaatttagtgntctcggatggagtaatattgtacgcaaaaatgacaaatgggagtctttcgtcccatgtccagttcgatgccgtcgaccgttttaacattgccaaaatggtctgatttgcacgttccgtgattccattcgcctgtggatcatatccgggtgtcagtgatctctcgactttcaaaattttcacaatttcgttcagagtttcgtttacaaactcttttcccctgtcgctgtgtaactttttcggagttccaagaatcaaaataaaattcttgacgaattcgctggcgattgtgtccgcgcttttgttaggaattgggacagcaaccaaatatttagaaaagtggtcaactgcaaccaagatatatttgttcgacgaataggcaggcccaatcgaaagcacatcaatgcacaccaattcaagcggttccgacgtttggacgattttcattggcggttcatttgctcgcggcttccgcgaatgcgcacaaatccggcatttttgaaccattttaacgcagtctgcgtacatgtttggccagaaaaattgttgagcgagttgaacataaatcttttttccgctcatgtgtcccgcgcaacttcctgaatggcgctctctgatcaatgcgtcgcgaaagatgaatggcacaaagaggcgtacttttccgtcgttttcgcacttgtagaggagttcatccaaaattgtgaaagttggaagaagcgaaataagcttttgcttattttttgggtcctgtggcacaattcttttgttcaaaaagtcgtagatgaagtccaattcgctttctttggtcttttcaatccattcctgtcgatttttgacctcgtccaattccgtttgaatttggcacatttttatgtgcgcgattcttgaaatttcgatttcagccggtggatcgggacattttagcgctggtgagcgtgacaagagatcggcgatcacattcttcttcccaggctgatattcaaccttcagtatgaatctcgaattcagctgcatcagccatttatcgacacggctgtttccggtctcagttttacttttgaacatgtggacaagtgcccgatggtcggtaaagactcttgttggtggcatggtgataaactgtgaaaattttttggctccgaagcgaacagcaagcgcttctaattccgttggacaatatttgctctcgtaagagttacactttctcgaggcgaagtaaattggcctaacatttgcgttttcgtccggttgacaaagaattgccgcgattccaattttactggcatcagtcatcattatgaactgacgtcttggttcatttttggccgcttcgaagtttggaaagtgcaaaattacgtcgtcaaaaattttttgctttaaggcctttattgcctctttttccaatttgccgaaagcaaattccgcatctttcttcaacagtccgtacaaaggcgcggcaatggctccaaaaccaaaaataaattttcggtagtatgccaaaaatccaagcagtgattgaagtgccttttttgatgttggaattggcaattccataattggacgtactttgtttacatccatttttattccttcagtagtgagaatgtgcccaagaaacggtagttcgtttgccgaaaaatggcacttgctgatttttaattttagtcctgcttcccgaattcgttcgaacactatttttaagtgctcttgatgcttttcccacgactcggaggcaattaagatatcatcaatatagatgaagacaaaatcgttgattaatccttcgaaaagctgtgacataaatcgttgaaaagttgcaacggcgttgcaaagtccaaacggcaaaacgacgaattcatgaagcccaaattctgtggcaaaagccgttttgtcgatcgattccggtgacattttaatttgccaataaccggaaataaagtcgagggtcgaaaaaattttcttgcctcccagtgccaataatatgttgtcaatattcggcaaaggatatgcatcctttacagtgactgaattcagtcccctgtagtccacacaaaaacggagcgtgccatccttttttggcacaatcacaatcggtgaagcccacggagacgaagaaggtcggatgatgccacgccccagatagttttggatcatttccgcaactttttccctgtaggcataggggacgggtcgtatccttgaacgtatcggtgccgaatttcccgtggcaatttgatggctcaccaagtccgtttggctcaattcctcatcggaaaaggcaaaaatttgggtaaaatcattcaacaaggccattagtttggctttcgcttcatttggaatgtgtccaactttcagagacatttcatctccaaattggatatcgttttcaccttctccaattagaaagtcctttgtcggcaaaaacgaattgccagaatcataagacaattctacctcttcaactcttccgatcactgtgttcccatcgatttgctccacatttgaactcaaatttgatatttggcagacaattttcccattttcgacttttccaatggactgatcaattctgactgctttttcagcaggcactggacatattagcacgtcctggccattccattgttcatcgacctccatttcgacgaatttgctagtccttggttggaatttcatgttgaaaatcatgcggacggtgtcttcgctttttgtcgctttttcgaaatggatcatttcattattgggttcatcgtaaagcgagaacccgagtgctgacaatgaattcgttccgaaaagcatgtcgaatccgaacggtgcactggttacgtaaaaatgtatggccacttgttcacagcctttacggagaattggcaatgtgagtgtgccaaaacatcggagttccttcccattgacgtcggcaattctgtcatttgtgcgtgcaaaatttgttttttgcaaatccaatcctttttctctgatcagcatatacagaaatgaggcgccaaccaacgaaatttgcgctccaccatcgatcatcgcttccgtttttgcaccaaatgtttcgattttgatgaccaaaatttttccaactctgtcggaactcatttctcgctgattgtttccgtctttcctttctttgaactcgttggcgaaaaattcagcgatttctgatgaaagctgaacaccacggcaaaaagcttccggtggtgcttcttcttgcacgacaatgcaattttgcttcaaaaagttttgtgaccgacgttgatcagactcttttgtcgaagtctgtggaagtgctcgcttttcaggaccatttggccgcatctgaaaactattggccccagcggccggcactgcatggctttggttagcccttccatcaaagtattgctttggtcgtcgacattcgcgagaaaagtgccctggttcattacaattgtaacaaacagtgttttcacgcggttgaaaactttgtgaaaaattttgcttttgttggggttggaattgttgcgcaaatcttgaaaagttttgctgcataggacgggttctttcctcaatatttcgccgttcgtttggcacattttttgttgccttttgaattgactccgcacgggcagccaatgcgacaaactcatcgaagcacatccccggtcggcgtgccatttcaagggacaaagacaaatccggatttgataaagcacgaatcaaatgctttgttgcatattcatcgaccaggttttgcgttaggcctgggtaggcacgcagaacgacattctgaacccgatcggcgagttcgtcgagtttctcgttcggtttccgcttcagaccattcataagttcgtcaaaagcccccatttctctacaatcggtttcctccaattgtgcttgtacagctcgtcggattgcatcaaaccgataaggctgattggccaatgcggcattgaatgcgcgctcggctcttcccgagattttggattcaagcgatgaaatccgcttgttgtcgggccacccctccgttgctgacacaaattttttgaagaaatagcgcactttgtcagcgccttcattcccttttagttcgggaagtcgatcgagaatgagcacgtactccaaattgctgatcgggggttgtgcccctccttgctgattcaccataacatttcccgaagttccatacccaaaatttgggttcgcattttcgtaacgcgcgggttggtttctcacgaacaaatttcccgggttttgttgacggtaagcgcgttcttcaaattgcgcataattttgttgatgcgttagccgcggttgataatcggcgttttggcgttgctgcacattcattggccgacgcgccggtgcgaaatgaatttgccctcgctgttcgaggtgttcggcaacaacatttggatgcgccgcaaaattttcttccgaaaagaaatgctgttgaaatgccagttgacgatttatcgccaaattctcttcttgctgacgaatacgtgccgccgcaacatttggggtcgaggtaagatgagggttgaactcccaattatctaccagatccaaatgggcgattcgctggtccaaatttatccccaaattttgttgctggatgtttcgaccattttctcgacccaaattttgttcttgggagttttcgtgaaacaccgaattaccatggctgtccaggagagcactttcatccaattcgcctcgattttgcgcgtccattccgtttcgtggtctcggaatttccaaaagtcgctgatgaattgcttcgggtcctaaaacagacgaaactgatgaaactcgactttggcgatgttggttttcgcgcaatggagcattttcaactacgaagtgctgttgctgaactcgctgttctccttgcgtatctcctatgccttcatttcgcacttgtatgccaaggtttagcgccctttgtcgcgttaacggcgggcttcgcattaccggcaccattggtgtgtgagaatttgttttctcgttttatggttcaaagctttttgacttagttgtctgcttttccttcactttcgtagggatttgtttccccgtttttgcaaattttcaattcacacgatttcggcgagtggtgataagatgaaaaggatttgtttcctttttaacaaattcggcgatttctcttccactgtctttacgggatttgtttccctcttaaacaaattcggagattctttcttccacgtttgactttagggatttgtttccccgttttacattcaagcactcgtaggatttgtttcccgttttttttttgttgctccttttcgcgctttacaaatttcgaaattgccgttgatctcacctcttttagcaggagcgccacgtcgtacaaagtggagcacgtagtagagcacacacacaattaggaacggggaattgtatcccaaaatccaaacacaatccaaacaaaaatccttttacaatcaaaagtccaaacagcgaagaaaattcacaaacatttaaaattaaccaaaaacgagcgaatatccaatctgaatgcaagtgaccaggaaaaaaaaagtcggcagcggaaaacaatcgataatgaaaaggcgggagattcaaaattgagaacgaaaggacaaaaataaatgagagggaaatacaattaattaattaagtcaaaaattgggaataaaagaaattaacaatcttatcacattctacaccgcgtctgaaaccttcaaatctgtaagtaaaatattttccaaaaagtgctaatttttccgtttctgttgaatccattatcaaatgctttttttatcagagcattaataaatttcgatttatcatttatataactaaaatatttttaatgattaaaataatattaatttatttatagattctgcacgcgaattaacaccatttttttcaataaaccaccttttcattatccattttctattaagatcacatgaacttcactatttccttaatttttatcgcgtaaatcttataaaagatttaaataatattaattttttaagattctacaccgcgtctgaaaccttcaaatctgtaagtaaatattttccaaaaagtgctaatttttccgtttctgttgaatccattatcaaatgctttttttatcagagcattaataaatttcgatttatcatttatataactaaaatatttttaatgattaaaataatattaatttatttatagattctgcacgcgaattaacaccatttttttcaataaaccacattttcattatccattttctatcaagatcacatgaactttactatttccttaatttgtatcgcgtaaatcttataaaagatttaaataatattaatttttaaagattctacaccgcgtctgaaaccaaatcttaagtaaaatattttccacaaagtgctaatttttccgtttctgttgaatccattatcaaatgatttttttatcagagcattaataaatttcgatttatcatttatataactaaaatatttttaatgattaaaataatattaatttatgatgggatgcactggttgatccaatcaattaatttaatattttatttgggatggggcgacaaaggacacaatgtggaaaatttggtagatttctgatcacaattgatcaatatccgcgatgcttcgaatgcccgagttgtgatgtattcagagcgagttgttgtccggcttgttgagtgaagagaaccgataggctaacagagtgaattggttgaagcatgcttaaactgaaaacccttcccctttttataccaaaattttttggttatttaatagcattcaaaatttccacattatctttttatggttttttcatttctaaattattttttatcgttttagttttttcttcccttttatttaagaaaggaaaacttttcataaacaattttaattgcttttacgttcaaccgttttattgtggaataaatttatttattatttggggcgttttattagattatttttagtttttattgcgagaagcatttgcttcgtttttatgaattcattttgttttatttatttattttattttacttttattttatattcctttatttatttaatttaattttaaaaataaaaattttatgaaattttattttattttggatttatttttattaatattttgtattttcatgtaaaattcttattattttaatttagttttgtttttattaatagttttatattttttcggatttaatccgacaatttatttatagattctgcacgcgaattaacaccatttttttcaataaaccaccttttcattatccattttctattaagatcacatgaacttcactatttccttaatttttatcgcgtaaatcttataaaagatttaaataatattaattttttaagattctacaccgcgtctgaaaccttcaaatctgtaagtaaaatattttccaaaaagtgctaatttttccgtttctgttgaatccattatcaaatgctttttttatcagagcattaataaatttcgatttatcatttatataactaaaatatttttaatgattaaaataatattaatttatttatagattctgcacgcgaattaacaccatttttttcaataaaccacattttcattatccattttctatcaagatcacatgaactttactatttccttaatttgtatcgcgtaaatcttataaaagatttaaataatattaatttttaaagattctacaccgcgtctgaaaccttcaaatctgtaagtaaaatattttccaaaaagtgctaatttttccgtttctgttgaatccattatcaaatgcttttttttatcagagcattaataaatttcgatttatcatttatataactaaaatatttttaatgattaaaataatattaatttatttatagattctgcacgcgaattaacaccatttttttcaataaaccacattttcattatccattttctatcaagatcacatgaactttactatttccttaatttgtatcgcgtaaatcttataaaagatttaaataatattaatttttaaagattctacaccgcgtctgaaaccttcaaatctgtaagtaaaatattttccaaaaagtgctaatttttccgtttctgttgaatccattatcaaatgatttttttatcagagcattaataaatttcgatttatcatttatataactaaaatatttttaatgattaaaatattattaatttatttatagatcttgcacgcgaattaacaccattttttcaataaaccaccttttcattatccattttctatcaagatcacatgaactttactatttccttaatttgtatcgcgtaaatcttataaaagatttaaataatattaatttttaaagattctacaccgcgtctgaaaccaaatcttaagtaaaatattttccacaaagtgctaatttttccgtttctgttgaatccattatcaaatgatttttttatcagagcattaataaatttcgatttatcatttatataactaaaatatttttaatgattaaaataatattaatttatttat

SEQ ID NO: 583 - DNA, 7982 bp, Heterodera glycines
gcatacggccgattgcgtcacccatacaacataaatgtggctgcccatttttatgcgcggcatcgcataaagctgcatttcccgtatgtaccatgcattgttgaacacttttcttgtggaggagagaaccgacactaccccatggagctgcttgagcttgtcaatgacgacgaaaaccggggaccacaagagcgctggttgggacgacttttcacagagattagcgacagtgaccgactctctacgagttcatcagacaaaaccatgcttttcaaattaggcgatgatgatgatgatgatggaaataaaaattgtggacgtgatgaatgtagccaatcctccacttattggtaacgcactcacacgcacacagtattcgcactaattcgatgacacttttgtaacttccaactcttaattatgcaatttccttctttaaattgttatcttctctgtcttaattatgtcataaccatttatcttaatgactttataattttaaattgtatcttccatacactaattctgcgtttttcttccaataaatgacttcttcttctttctcttattttatcattcaaaattgacaaaaaaaaaaaaattttacaaagtatgtccaaaattcatcactttaaattcagctcctacaattcctttgcctacaaatggacggtaacatttttgcattggcatggaaataacccgtcctccttccctaatgtttggtcgaaggaagtttgggtaggtgacagtgatcggttcaaagtctccggtggttgcgtagcgtactacctcctccttgaatgtgtcatatctgagcccttggttgttgatgacatcgtagttgagcgtcattccccgcaccttcagcacatattcctttacagtatctgctcccgcttccttgcgttgtaggcatagtccatactatattatggtaataattaatttaatttttgtcaatcaaaaatgtttacttgtttggctcctccactacaaaattcaatgatgttgtgctccggatactcgtcagtgaactgtccaagatggggaccagttttgagcggacactgttcatcggggtgaaccaggataaggctgtcagtgtctgtggacaaacaaagaatttcacacaaaattggaagtccccatctttacctgtatacaatagtgcacatcccggtgacctgacaaccttctgcatggccttgagcagaacaagacgcgcggcagaagtagtccaaagcgatataactaaatcataaaagttttaattatttataaagttatctcaccaatattggagcactcgtgctcttccacccagtccttcttgtgcaggtagctgatgagaatgtgttcagtatccagttcatcgattgatgtcacatcgattgatttgttgtctaaatattcggccaaagtggcagggtcgtcggtgatgagggtttgggagagaccaaagttccgtagagaaaatctaccccctgaaataaatttgattcagaataaacggaaaaaaggtgaaccatacataaattattcagacacaattttgcaagggagcgtttgcctttgttcacgatcattttggtagggtcaatgcatatgccaaacatttctgcgcattcccgaacaaattgctcctctttgtcggactgccctttgatgtttttgtcgaagccgctcgcttgaattttttgtgccataaattcagcaatgtacggtctgaacagttgatcatcgctgcgctcatactccaacacgcggaacagtttggtgacgcgatatccctcatccaacgcggcgttcaactcaattgatgtgcacgtgctgacccagcctcgttgttggtcactgtggtcgcagtggtagtcaaagtcaacacctcctgttggccattctttggcgcacttgatgcacaatggaaagcataggcgattgtcaactttcacaggcaaaaccggaacatcaatttgtcgaggcggaataacccagactttcagcagagccagtgggtaagggttgtcgttagaactgtgccagtcgacctgctcgttgaatacgtgcacatttggctgcccaattgggtagctcgtgacaaagctaaaataataataaactcattttgttatacaaaataaatataactttatatgagggtagagtgacgtgaagtcaaaataggatatcttttcaccctcgcgcgctttgtgcaacaatttcaatggtcccgtccttccgcccataaacgcgtcacgaataaccaatggcccgtcatcaacatattcagcaaaactctgtctcatctctctgctcctctccaacattctctcaatttcgcactcccagtacacatcaacacgccctaattggcttctcagatagtctagccgtttggcatctcgttccctcacttcgccggctgtctttccgttaggcagaagcatattgtcgcgtgggtagcatttcttacagccatgccatgtgcaaccttaaataaataattggaacttttacacataaatgtatggtattaccattgacttcaattgcacgccgttccgtttcaatccacccgtccaatgagtaaggtccaattcgtttctctcctccaggcgaatgtgcagtttgaacttggaccccgtgctcctcggcgtaccaatgaaagaagcgaagtgcaagaaggctctgattttgagtgttgtcgtacccacgttccggcacaatagcaagatgttctgtgggcaggtgattggtgcggaagggtcgcatgcatgccccggcaatggtcatgcactcccgcaacacgtctatgccgtcgtgattttcgcgctcatcgattccatcaacatattcgttacgccgcgaaatttcaaaaaattccttacggaaggcgacgagtgctgccatcaatatctccacatcatttgtacaataactgtataaacaaaacaaaaatttgtattttgaaagttaaattatttaatacctggccaaagcctcgtccaacaagaatggttctgcctgatgctgttcataccatgcatcaaactgtcgtcttttctccggcatcatcccttcggccaagtaatcgtctggtgtggggtagatctgcctcccgtaattgtccgggcggtttgccaaatgcgggaaaaatggcttctcttccacatcgagaccataagaggggacgagcgccgcgagtgagcacggcatcaaattgaagctgtcccggaaagtaatgtttgggttccttttcttttgtttgcggattttcatctcatacattttattcccctgaatattcgtcatcaattatgttaataattgtcactgatacgattacccgtctcagcatctcagggttgaacccaatccggaagatttcgcggaacactaacaccatgtcgaaacgaccgccaaaatgggaataggcaaaggtgtcatgcttcttgggcagttgaaagacgagccagtcgacaaacgctgccagtgggttctcatcaatcacttgcttgtccacagcggtgtcaacaaaacgacgttgacaaaaggtaactgtgcgatacggcccacaaattctgcacccggctgttgctcgcttccaatttccgttatcaatacaatcaggacatgcaattcgcgcagcaatgaagtttggctggtgttctcttctctcaggctgctgtgcgctcaccggctgatgctgcatggtctccaagtcgaacgccacaatacggtaggggtcatgctcctttggctgcagcggctggatgaagcagccccggtccgggttatgataggacatgcagagctgacagtaactttcgtagcatttgtgtccctataatcaataagaaataattagattttaccgaattctattatgtatactttacgtccgttgcggttactgtcccgaacattccacatcacaccacagtctttgcattgttttgaattggcacaataattggaggccaaatgatgctggtagcactcgttgttccggaattttttgttacatcccgcacattcattgaaaaagccagctgaaggtgaacaaggaaatgatggtccgatgcgagagcaaaatgcgcagcgtgctttgcacgattttagatgctcggacggtttgctatagggacgttcacattgcaaacaatagggcttcccaaacaatcctccttgtttttgaacgccatcaaagtgcccgttgttgaaataaagcaaaattggagtgtcataattgttgttagcgctgatgtatttgaacagaggtttgtactgtcctgttgagccaaaaataaacacagcaaaatggtgttgctgctgtgtgttgttccagtggtcaaccactcgcggtacaaaagtatccgccgaatatgcatcacggccaagcggggcgccaatctgccgcattaattcggttgtttcatactgcatacagccgtgctgtccacgcctactgtgcaggtagtcgtaaaacttccaacgggcccacccttttgttttgtaaaccattgtcgcttgcaaagcgtaaaaaaggcaatagttcctttcatcgggatttcgaatctttaaccgatagattatgatttttcttattgattggagcacacaccttaatcaaacattgatcgtggatacgatgatggacaggtgccaagttccgacgtgcaccacctttgaggtttcttttgatcggaaggctggagcggtcaaccactgtgatgatcactttgaacggttcaccccaaagcgtaacattttgctgttgcttactctgtgcaactttgttgaattgattgagaatggtgttcacggtgttgtcggtgatttggcgaatgggtattggaatgtcgccgctcgtcaacaacggactactaatcagacaaccaagatgtgtaggctcaatttcgcgctctctgctgtcctgcatggattggtcaatgcagtattgaaaaattccggccaatagtccttcagggttggcgggcacatcttcaatgttgaactgattcttcactttgatgtattgaaaacgcggaacgtgttcaacacttgagcccaattttttgacgtagtcatttgcagttttgtttgttgttgttgttgaaacaccagcaccctcttgaattacgcccaacaattgattgattaggaagccgtggcgtggctttttgttcgagtaaagaatggaatcaattgaaaagtttgtggggcgtttgggaggttgattttgcatttttaaatctaatgaattaaatcaatgaataaatgttatttaaatttcaaataaatctgagctttcaaaaattgtgataaaaaatcaaaattgtgagcaatgagtaagaatagaatgagaataatttaaaaaaactgatgttttaaaccaatcttggcctgacgagcagcgcactgccacccatgaagcacaagacgacagggcaactaaactactcataaaattattaaaagaattttcaacgaccattgaagagctaaaagtttgttgacaggataaacggagctttgacatcaaccgccctggttaacattagaaataaattcgaataagattgtccccgaaaaaagccttttaatgagatgatccctagctttattcaagattttatgaccccgattattcaaattaagggacaatggaaggagggaggaggggcagatgagcgagaatgagcgaagcaaatttttaaaatgaatgaccggctgcacgaaaggccatcgaaatggcttagaccacgcccaattgaaactcaattagtgccaaatcgtatggaggtcgccgggtgcttgcactacagcatccatgcgataccctaacatgagctgtactcatttcattttgcgattcccaaataatactgatttgccaaaatggcaggcaagagaagccaaggcaacaacaacatttcactggcaaaaaaagccaaattgcataaacaactgccgacagagttaatttgggaaatgatcgattttgtaccaatgatgcatttgtttggcggcatttcatgcaaaccaggttctcgaattctgacttttaaatttttattgaaaaattaggaagcaaacggccaccaactggtattgcggtcattaatcgattttttgaatttttacgcaacaaacgacactgcaattttgccacaatggtacaaatgtttattaaacagttaaatgtgatttattaatatttcagatgagaattcgtttgaattttgaaatgcaatgtgcgaaaagaaaacttgcatgtggccaactgtgcatacagtatcggttgcaatacaagcttttggactccacatattttgccgattttgctcgttatctctgttatgggagatcgggacgtatcgaatgcactaaaatgttggtcaactcgccaatggagttggtgaatatttatttttaaatcaaattactaaatgttcaatctagtcttgcacaactggggctttgtgcactgctatccttgactacatattgcgcagccaaaatcctctgacaatgaagaagagaacggcaattgctcttgttcagcgtgagcacttcccaccaattttgagaagcaatgttcgcgaaatggccgaaatgggcattgggcaaatgccttgttctgatgtaggtgaagcgtaccgtctgatcaacccacaccattcaaacgatgtgggctatcttaaaatctatgctcgatcggatcttcgtgaaacttttgttgggatcgattttcccgaattttatgttttttgcttttctcttgactaaacatttcaaagaaacgatgctcaaaacttatcgatttaacattcgtttgagaataattaatgagaacatatcggggcttgtacaattactgagtgctttaagaaaactgtcaaacgaattcccaagggacatgtagtaaatgaacacaatgcagtgggcaccacaagtagacaccaacggggattgatatggatttttgttctttctcactccctttggaaatttgttgagaaataatgtggcaatagtggatggaatgggctgggcgagactgtcaaaatagagcactggtgcatccaatcccttcgcatagacagcgcaccaatgagagccgtccttgtagtgtgcgtctctgttcacaatgagcgctgcgggatactgtagtgcggagggagatggcaattggtcactggcgtaacaaccccgaaatattcgtgtggtcaacggatttcccctcaatatcgttgcgatttgcacgctgtccattcttcagccaaaaaattgaacaaagttgatgcaacactagactgacaattaacatcaaatataaagcaaagagtgcccaacagacggcttgttgaaaaaggttgctttcctctggtctatctttgcacagttgaattaggggtggaaggagagcagatattgactcttgttcgtcaattaatttttcactttttggagtcgttgtggaagagctaaaggtagttggggtaaaggttgtgatggaggtggtggtgacagctgatggtttagttgatcgagcgaatattcttggatttgttgttgttgttgcagtagtagaaagtcttgataatgataaactttttaggtactctgcataataatagtcaggttgtttttgcggcggctgctctggatataaacagacaacgggaagagaaactcggagaatgaataaaataaaactcactttttttgaaaacatttttatttgtgcacaaatgaaatgataaaccgtttaaatagtagtgtctgtgcttattgatctatttttgtctaacatcacaagtgaatcacattctcccatcaccaccagcattattccaccttctggcactggctggttaaattttatgctcacagcggtagtcccattcttgatcaaatcaaacaatgtcgcttgatcgtctccgctgttggtcaaatgaacacgtaaatgcagt

SEQ ID NO: 584 - DNA, 7841 bp, Heterodera glycines
tttgatttggttttcgcggcttccgatgaaagtgatcagttcaaaacccgactggtgctccaatcactgattgtgcaactttctgccggctgcagatgaagaaatggcgttggtttttacagaaaagtggccaacaaagccttcaacggagttccgacgaccttaagcccgaattttgcattttgtggcttcagtctgctttcggccaccttgagtccgaatccggccctctccaaaactgggtccaaatcagcggttgtcaattggacacaatttcgatgctccggtccgagtccgccgcactgcatatcccaggtcaaggcaaagtcgatgttgtccgtctccattacctcctcggtcccttgaaaaacaattgtcctcaattgtgccacaattccgcgaattttcccaaaaaatccttaatttccgttcccatcaaattttttccgtttactttcggacttttttgagaatccattctatctccctggaaagaagtatttttgctgatattttgaggatggtccttgcctttaagcaggttataatccgtctcattttcaagtttttcgttgtaaatcagacagacaatgcacagaagcgcattaagctgatttttatacgggtttttgcctttcggaagcgtgcttatgtccgggactccgtccggcactctaaccatcctctcaatgggtactttcaacggttttgaattcagtttatcgattgggacaacagacgctgctgaagcagaaatttccaagattttgaaaggaccaaaatgattccacattattttatgatgcggcgaacgcttatttgtgccgggaaagataaccattactctttgtccaatttcaaatttgttggcagttacttttgcttgtttatcgtagttatttttcatcttctgccgttctttttctgagtgttctctcgccttaacgaccaaatgggcgatgttttctcggaacaattgtatgtattcgtccacatcaactgtgtactgtggatttacagggaaactgacatcggacgggaagttggccggttttccaaacatcaaatggtgtggcgaaatctttgtcatttctgatggggtcgtattatatgaaaatacaacgaacggaaggcgatcatcccacgtccaatttgaagctgttgagcgttttaacatgctcaaaatcgtctggttgaccctttcggtcactccgttcgcctgaggatcatagcctgacgtaaggctcttctccattttcaaaactttggcaatttcgtttagagtttcgttaagaaactcttttcctctgtcgctgtgtaattttttcggcactcccaaaattaagataaagttcttaacgaactctttggcgatggtgtcagcacttttatttggaatggcggttgccaccaaatattttgagaagtggtctacagcaaccaaaatatatttgttgcacgagtgcgcgggaccaatcgataaaatgtcgaggcagaccaattcgagcggttctgccgtagctacaattttcagaggaggctcatttgacctcgggtttcttgtatgcgcacaaattcggcattgaaatgcagatttaacacagtcgaaatacatattcggccaaaaatacttctctgccaactgaagaaagattttctttccgctcatatgtccagaacaaacacccgaatgtcgttctcttatcaacttttgtcgaaaagaagacgggacgaaaaggcgaagttcagcgtcttttccacatttataaagaagttcatttataattgtgaaattgtgaagtgaagatgccagtttttgccgacttttcggttctattgggagtacttttgttgtcaggaaatcatatagaaatccgagctcgctctctttcgttttcttcacccattcctggtgcgataagatttcttgaggtctttgaccattttcagatcggcgaacctgtccgatgatgactttttcggcttcacttggcgaatccaaacattttaaagcgagagagcgtgagagtacatctgcgatcacatttttctttccggcatggtattcaacttccaaaatgaatttcgcattcatttccatcagccatttgtccacacggctgtttcccgtttcctttttacttttgaacattggtatcaatgctcgatggtccgtaaaaatttttgtgggcatcatggtgataaattggctgaatttcttggtaccgaatcgcacagccaaagcctccaattctgttgggcagtatctgctttcatagtttttacattgtcgtgatgcaaagtaaataggccgaatgttgcctttttcgtcgggttgacaaagtattgcggcaataccaattttacttgcgtcggttaagagaataaattttctcgttgtgtcatttttcgctgcttcgaagtttggaaaatgaagcataacatcactgacgattttgctttttaacgtattaatcgctttcttttctaagtcgccgatcttgaaatttatgtctttttttaaaagtgaataaagtggagcagcaattccgccaaacccgtagatgaatttgcggtaatatgcgagaaaaccgagaagagattgaagttgttttttggtggacggaatgggcagatccaggacaggttttacttttgccatgtccattttcaatccttcacgggagagaatatggcccagaaacggaagttcgtttgaagcaaaatggcatttgcttactttcaatttcagtccggcattttctatccgtttaaaaacttctttcagatgttcgatgtgtttgtcccatgattcagatgcgattaagacgtcgtctatgtagataaagacgaatttgttaagacattccgcaaaaagtcgggtcataaaccgctgaaatgttgccactgcgttgcaaaggccgaaagggagaaccaaaaattcgtgaagaccaaactctgtcgaaaaagccgtcttctcaatcgaattacgatccattttaatctgccaatatcccgaaatgaagtccagagtcgaaaaaaccttctttccgcccaaggctaaaagtgtgttgtcgatgttgggtagcggaaatgcatctttcactgttacagagttaagttttctgtaatcgacacaaaatctcagcgttccgtcttttttcggcacgatcacaatcggggaagcccatggcgaatttgatgagcgaattattccgcggcctaagtagtcttgaatcattgccgataccttttctcggtaggcatatgggactgggcgaatttgcgatttaattggaagcgcatttcccgtttcgatcttgtgacggattaagtcagtttggcttaattcctgttcagaagtagcgaaaatttcggtgtgttggcttataagttccaacagttcggtcttatgatgccccaaaatttctccgatgtgaagatcagcgcgtccgagtttcccactttcgtttttgccgtaagccattgttgatgaaatttcagctgacaaaattgaattttcggtgtcaaaaatctcgtccaccttttcaatcatgccgatataagttttttcattgacgcgttgcgaaagggtcgaataatttgtgatttgtgcaatcactctgccatcttcaacttttccaactgttggctcaactttaacaccgctttcgatgtttgaaggtaagatgatcacatctttaccattccattctttgtctactccaatttcaattaatttggtcgttcgaggttcgatttttgtagaaaaaataattcgagctgcattcccatcattttgctgcccttcctcaaattcaatcatttctttgttcaccgagtcgtatagaagaaagcccaatttcgacattgagttcgtaccaaacagcaaattgtagccaaattgcgccgttgttatatggaaacaaattggcgttttctcgcgtccttttcttgaaattggtattgtaaccattccaaaacatttcaattgttgtccgtttacgtcagcaattcgtgccttcgtacgagaaaaaccggattttctcaggtccaggccgtgctcctttatcaatttgtaaagaaattctgctccaatcaatgaaatttgagcccctccatccaacattgcatccgttctaacattgttcgtctccactctgatcaccaaaatttttcctacatggtccttttctttggactcttcactctgatttttctcatgcaactcattctccaaaaaattcgaaacctccgatgtcagttgcacaccacagcaaaatgcatcaggtggttggtcctcctgcataacgatgcagttttgtttgagaaaattctgtgatttgggttgaaaatttctttggttgttttttggcgactcttcgttgttacgaatcgctaaagaattcgaacccgtcgcaaattgattgcgaattcgctcattttcgttgctgttgactcgctgccctttgatctgctgattacaatcccgagaaagatgacccggctcattgcaattgtagcaaacaatccttcctcgaggttgttgtgagtatccttggaactcagaactttgcggtcttgagaaattattcgaaaaataaaagcctcggttccgattatccgagtatttgttttcattggatgacactctggtcgcccgctgaatcgattcggcacgagctgctagtgccacgaattcatcgaaggacattcccgatttccgcgacatttccaaagttagagatagctcaggatttgctagagctctgatgaaatgtttaatggcataatcgtcgcatagattttgtgtcaatcccggataggcacgggagacgaggctttggattctatccgccaatgcgtccaaattttcattcgaacgacgctttacgccgctcatcagctcatcaaatgctcccatctcacggcaatccgtctcttccaactgattctgcattgcacgtcgaattgaatcgaagcgatgtggtccagagcttattgctgcattaaaagcacgttctgcacggcctgaaactttcgtttctaatgccttaacccttttatgctcgggccattcttccgttgcgtttgaaaattttttgaaaaaattttttactttatccgctccttcatttccttttagctctggcagacggtccaaagtcaaaacatattccaaatttgcgatttgaatttgttcagttctttgctgaccaaaattttgctgttctggatgtccgaagttgaaattgtcgccataattttcagggtgaaaatcatttcgtaccgcaacgggacgaaaaatttgttgattccctacaaatccttgattttgtcgcggaatttgttgagggttaacctcgccgatttgcgggttgtttgggtatgaaacatgctgaatttgtgcgcgccaaacgtgttgagcaccagcgataggatgaaacgcgttaaaatcgcggtcgttgttcacataatgggtcaaatttgcttggcggtgtctaaccagagccgcttgtcgttcgtcttcatcaatgaaacgctgttcggctctttgccgttgattgccgtttggatttgcggcgatattttgttgaaaactattcagaaacatcgcttggggacgaactaagcccgggtttaagggttcagagtttggtcgcctttgtggttgcaccgcatggggcgtcgaagtcacaacaggccgtaccccaactaactcatattgcctcggaccattttcaaaattttccgaaaattgcaacggcggttctctgaccaccggttgaaaaacgtccctctcaaaattttctccccgattttcattttgaaacaagtcgttaccatgctggttcagcagtgcgtcgaattgttgctcatcttgcggtccgttctgaactccagcagcattttctccaattccagacatgagcaggcgtcggcgaatttcagttgggtccaaaagtgatgaagcaactgaagagacagaattatggcgagcctcgttttccaaacgtcggtctgctaggtgctgtggttctacaatttgttgccccccctgctggtttgcgttgttatttagacgaatgccgaggttgagtgctctttgacgagtaagcggaggcgaccgaagattaggcattacttcgcccttttccacaaaatttcacttgtcgaattcggtgagaagaaaactgatgaatttcacaaaatttccgttctgtagaagatgaaatgtcgatgggaattactttaccctttttgtcgaatcagctttgtagacggaattactttaccgagctgacaaatcgttggtgaatttcttttcactttttacttttttgtcgccgcagtagttgaagactttgtagaatttcctacttctacaattccccgtataaaacccgcgtcgaccacacctttttgcaggagcgccacgtacaaataatttaattttactcagcagcacgtcgaacagttcagcacttacacacaattgaagcacacaaaataaagccttattattttatgtcaggcaattccaaattaaagtctgaggacaaaaatgaaaacaaaaacgaaatcacaaacattaaaaaaaatgccaaaaatatcataaaatcaaaaataaaatgaggtcattattaattacgacaaatatgtagtaggaaaatcactttcttttttgtgtttgcaaacaaaagttgggacttttatgaacgaagcaacaaatacatgtgaggagcaattgacagatcattttccattcataataatcgattaaaatttctcatttcctaataattctttcactttttcttccgctgtccgctgggcccggcattcattttcagcagaggaccttttgcgttcatttgccccgcctttggtggagacaatgggctaagcgaaagcgcaatttgtgttagttactcaaacaaaagaaaatgttgttgccacgcacccaaattcatgcagcgtaaagtcgacattgttcaaattgtccgtctttttgttctcccattgaattgttttcccaatttggcagcgcttcaacagccaatcaaaatcagtgtattcctcaacattttcttctttctccattgtcagcttttcgttggtccgtccattcaccaattcaaatgactcaattggcgtttcttcatcaattagtacaagtcgaattatataattggccgaagaagtggtggcatggagaaatgcctaaacaatggaaatgaaaagcaaacgggcaattaatccaaacattatgaaaatgtagccaccgcacctctttgaaagcgttgacccatttaatggttgctgacataaaatcacaatggaattgctttggctgcccatttgttgtcggagtgttcaaccatttggccaatgcttggcccgcagttgcatttggcccatcatcactaattattgcatcgggcaacaaatattcgtaatcgattgaatccaattgatcgagatcggtgagaattgttggcgaaatgcgacgacgcatattgtccaggtgatcagcttcggaaaaggccaaatggcgaatgtttggcacaacaatgggccagattttacgagcaaaaacatcccaaattggctgcgcatccttggcattcttatacaagaaatgaacatccaaacgcaaattgatgcctttgtcaaaaatttgcttgttgtaacgaagaaacgtgatgacggagtggtcaatatatctgaaaaggaacagttttatcagttacataagaattaggtatttatatgttatctgcgtccagcagattttcaaaaaagtttatgtttttggatttaactttttttatgttgcc

SEQ ID NO: 585 - DNA, 1146 bp, Heterodera glycines
  unsure (1)..(1146): unsure at all n locations
tgtccatccaaatgtcgttgcaaatccaacttaaatgcgggaacattaattgaattagaaatttgaaagtttaaaaaaagattttcttaccgtcgactgnnnngnngannnnngnngnnnnangcgtttcagccgacattgttcaaccaaattatcaaaaaacagttctgttgatttgtatcagttgcagaattgcgccgatgncnnagtggagaatgttttttcttttttttaacgggcgnnnnngggcggccataaccgggtgtatatgaatccgttttgataatttataaaaaacaaaattcaaattaaataattgtcaacaacttatgccannnnnncnnnagcccactatcaaattatcaaatttaaaattgagatttccccaaaacctcaaaatttctcaaaaaaccacaaaaagcctcattttctataataaagacaatttttgaaaaaaaaaattaacaaaaaaatatatttttgttgagttgtgtttcatcctataaaaacgctgcgccaggaatttacataataaaaagtgaatgcaaaaaaaagaaaatcgacaaaaaaagacaccaaaaaagacggaacgggtcaactgcgtcccgccaactgcgtcccgggccaactgcgtcccaaaataattttaatttttttttgaaattccattgaaaaattttttaaataaaaatcgaaaataataataattagggctatgtatgtttttcgtatttttctactcttttgctatgaaaagagctgaaaatagcatttctatgttttgatttggagaaggtttagtgcattgcatgtacttacagccctagtaataacactatcctcataagcagattgaaccgtgaataagtgtggaacaattataaacatgtctacataactaactagactacctaatatatgccatatatttagaaaacaaaatctcgtttttaagtgcatgaaaaatttgaagagttcctggttaatggacataaaacaaaaatgttttccaggtcctttcgtccttttcctttttgctgaagacaattttacaccatagaaccgaaaggacttcgatgggtttggtaatccatccggctgtcacaggagatttttgaaaattttggagaatttaaaaaatcctag

SEQ ID NO: 586 - DNA, 5910 bp, Heterodera glycines
  unsure (1)..(5910): unsure at all n locations
tttaatcccattcgtttttccatttgtaaattaattttcgatttgttcctaaaattcttccaattttattctcaatttttacacggttttttatttggtatttttctttacttttcattctttcattaattgcgtcaaattttcggataatttcccttttctgctgatcattttttaacgtccatttctttttttgatcatttaaatcggcgccattttctcctccattttgtaaattatttgctgaattgtccctttgttgttcttcttcttctgctttttcttcccatcctttgccaaatatttcgtcaaaattttctcggattttttttacagattcaatgtttctttgtgaataaattaatgttaatataataagaaacaaatcaattttcattataaaggacaaatatttatatgaatcttaatcataaataaataaatgtaaaataatttgttttgtcctctcatttcaacatttggttggacggacggacactccttactctattgatgcaaatgacttataattaaatttatacatggaaaattagtaaaatctctccaccatttccctcaaaagcaaaaaagtttacaagttttaactgatttatttcatcaaaatttatattttaattgtagaggaaataataaaaaaaataatttttgaaaattttttcccatttaggcttaatagattttggctttgtcctacccttgttggctaaaattactccagtgattgggttaaatttggaatatgagcacgaagtgaattcttacgctattttacaccataattaaaacttaattagtgtacgcgtttcactttttcgactttttgggcaaagcttaaaaagagggccaacatcaggaaataatcagttaatttgatgggtcctcccaataaaagtgagttggatttggctttgattgattgccaattttcccctctccctcatccctcattatcattttgtttagtcgacagtgggcctccccatattttcatcctttctctccccatttgctccacaattattaaaacgtttagtgccacgtttggtctgccatttcatttacgcaaattcttttcccacttcaaaaacgggtacttgtactgttcacagcccataggattttttttttaattttcaaaagccatggaaattgtttccaatgcttttcggagtcgctgatcacgaatccagcatccatttcgaccaatttggaacaccggactagaactcgaacaaaaagtcgaaaatttaaatttttgaattcaacatttttgtttcaaattttgtttgaatactcggaaacgaagttgaaaatgatcattggttcaataaaagatcatttaaactatttttatattaaaaatgtgaaatttgaaaatttaaattttttactcttacaaattagttcgaatttggatccgggtttcgaaattggtcgaaatggatgtcatattcgtgatcagcaaccccgaatactcatggaaacacgttttatctttaaatataaaaaaatttaggtttttcggtacgtgaatataaattaagtcataggaaatttgaagaaaaaaggcatatgcctcaaaaccgggtccctaatattgagatgaatagagactggaaatttaaaaaaaaattgaaaaagtttaaaaattaaagacataaaaaagtttggtcttgtcaacttaaaaattttcaggataattaattgcattaattgatttctgaaaacctgcggaaatgacaaaggtagcttaatttaaatgaaaaattaatcaaaggttaaggttgctgttgtttttttgtaaaataattggatgaagttatttacatgaatgaataaatgaagttttcctctttattcaatatcaataaaacaattggaaatttttacaattttttatggtccttggaatcaaattttttacaaatattcttaattttaaaaatgatcaaacgctttttttgtaaagtttgaatttgttaatagtttttttataataatttttttaaatttaaattttttgaaatctccttatcccccatgtgagcttagattagcaggtcccgcaaaaacatttatcaatttccaaaggaaatttgatttttccgtctttagctcagaatctctactctttactaatttttaatgattttccattcaacaaaaacttatataaaattccatgaattttagtggttaataggcaaacaatggaaaaagtcaatcagttaaaagcaaaaatcatttaaaatgggaaataaatggtttttggtcaacttttaatgccatggaaatgtaaatttgtccgacattcttttggcaacaaatgagggttatatgccataaaaatttgctcctctttcttcttctcttttcattcgttcctctcatattctgccatcttcggcttccgttttgtttgctcaatttggcctaccgtactctcttagtaatgagtcatcagtgtcgccattactgtcttctgtcccttctccttcccaattgatcggactttctgtcgtagtggtcacaaatgtctcttccgcaccaacaaatgtgtccgaaacagggtcatagtgttcaacttgtttacggtcatcatttccattgttccccgtcggtgttgccggagttgttgctgttgttgtgatatccgcgctcctatccctattccagtctaaaaaatttattaatttattgttctgtcattttaaaaaatgaaaatttaaaaaaatgacgaattagttgatactgtaattgtaggctttacgcagaacacgctataaatcttctgattgatccacctaatatttaaatcacagtatctttccttaaatacagtatcactgacaaataatccatgataaaatatcccattgccattttattcatatttcatcgacatttgctattcatttgatttttcgtgcttttcccaacctgccgacggcgccgctgtgttggcacgaccattcattgcgttgaacatttgcagcatcgcaagcaaatgttgtgcccggtaatcatcccctgccgcaggtggtcgctgtgctgctccgccaaatggcatgccaacaccaatccacgtttgaaccacgggcaaaattaaattgaaattcagtgaaaaatgtatacttggcggtggcggttggcccggaatttgaacacgccaaatgaaaaacatggtaaaaaaagcggtaaacactgtgacccaatttgcatcgcttcgagaggcatcgatgccaactacggcgattaaagacatttgcacaatcagcaaaatcatcataattatgttggaatgaatatgaaatactggaggtgcgcgtctatgacgacggtcttgtgaacggtcggcgccggtgccattgagttggggctgacaaataaaggtttaatggtattttcactattcttaattatgtgcaatttagttccttaattgtatgtataaataatattatgaaaaaataaatcaatttatatgagtatcatttgggttattcgggcgtaaattttatgataaattattaggtacatttataaatttcaaatcaaagtaattttcatgaaattaccacccaaaatcttttaatttacctgcagataattgtatttttcttggccggcattagcaattcctttcaaaattgtatttgtccaaagctccatgatgatttgtgtcaattcacttggcattaaggttactgtatcgccatcgtccgaagctaccgtatgctttttcaacgttttcgtcagtgcatctttggttgttccaggctcaatttcttggctaattcggctcaatgctttcatcgcttgcgcatatagaagcagagatgcatcattcgggtactgttttgctcgtggtaaaatctcagccattgtaccgtgtactctaccggtaaaaattatttccgtcgtttctgtttttttcattgcttccacaatttttggcaaatctttttcaatgaaatccgttaaatgttccgttagtttttcaattgtgtccaaattttgacctgtctttttgtcacaaaattttgccaaataaccattggtcgggtaacttgaggatgaatttttgctagcaattttggctaattggcattccgttttcaacaactcaagtaccaattccaaagatttgcttaaacgatcaattgaaataagaagagaagttagcgatacgttaaaattcgggtgccccgcttttaaggatgcaaatatgcactatttcttaaagctataaatcaattaaaaaaattgaatatcaaaatttccgatttacttaatttttttttcaattctttgtattaatttttggcatggttttagtgccaaatttatggtgccaactttttcggcatttatataaaaatcgaaatttactttgcattgtcaatcttttcgccattcgtcagttcctctgtatttgtatgataaataaaatgattatttaattaatgggcatttaattattaattttctattttcaccgttaatttgttgcgacaatgcttcacttatttgctccagagcaacaaattcattggcaatttgatgatggttgttgcgtttgtttgcggttccgcagacaatgccaaacaaaagtgataatttaccaaaaatacaataaaaaagtagcaacttttggttatccattttctaaaatttttctcacctttacatactcattaatttaattagtttaagctattagagatgcgcgtaaattcacgataacggtcacttaatgtgtcgctggcaccgctttttggcattacaaattttgctaaattaacgaccaaattttccaagtggcgccaaggcaccgcctgattctctcttattaattttttgaagggcataaatatttgaaaagttttcttgggaccaaaagaagagagataacttttagattctgttcctaaacgcttgaaaattaattaactttatctggatttgtttttgaattattgcaaaatatacgctcaaatatttcgtgattaaataaatatgtaaaattaaaaactcaaatattacatgtaaatgaaatgttaaatgaataaaatctgaattttggggtttaaatctggaatttagtgttttgtggcctgaatttgaaaaaaaaacttggtcaccctgagattttcctaaatatattttcatgtaaggataactgaaaacatgtattttggggttttcagggtcgctgacgatgaatatgacctaaatttttaatttatatttcgccgggacactaattctccagtattagcccaaaattcatacataattggaaaggatcaaggcaatttcaaagtttattgctcgatacaccatcatatgtacacatatgtatatacaataactggtagatgatgacaatacacataatatgtacaacagcgaacaaaagtagggcaaacgaacacagagagagagagagaccattaatttatgaaatgatcggacgacagacacatgcatacaatacattacatatacataactatataataatatcatcactcagaggcatcacgtcacatcaaaggtaccattcgcccgtttgttgttgctgctgctgcgcttcttgcccttgcggcggtgtcgctggcggttgcggcgtaccctgctgctgttctcccggcggttgcatcccctgtccgtccggcggttgtggcggcgtcccctgctgctgttctcccggcggctgcgctaccggcggtggtgttgatgacgacctcgctcgcggtgtcgatgctgatgccctctccacgcgccgtcgcacttccttcctgtanntgtggcggtcgttgcggaacaaatctggaaaattggacacaaaaattaatgatgatggtcaatcaaaaatgtgccgac

SEQ ID NO: 587 - DNA, 1624 bp, Heterodera glycines
cgggagcagctcgtttcccccccccccgcatcgtttccccccgagaaattaaaaaaaaattttttgctaacttagaaatttttcgagaaaaacatcttagaaagttttttcataagaaaattctaacaataagaaaaaaatttttcgagaaattttcaccgattttttggaaaatcttagtaattcatcataaaaattttcgaaaaattttttttcttagaattttcttattaaaaaacgttttaagaattttttcttgaaaaatttctaagttagtaaattttttaaaaaaatttctcggggggggggggggggaacggcggagggggaaacgagctggctcccattacttttaatgtaaaacaaaatgcagattttaccaccaaaaaatggaaataagtatttaatttttataaataaattcttaaaaaaattaaacattttttcttttcttttgtgtttttatgctttttaaaaatctatttacgcatattttaatctgcattctgcttaataaaaaaaaatgtaaattaattagcaatcaataaaatgcaaaaaaataatattgggacattaattaccttttttgtcgtaactatcaatgcccaagtagatttctggtgctcggtaaattggtgttcccgcttcggttgtcagattttctggcacaatatctctggcaataccgtagtccaaaattttcacattaccacgctcattcattacaacattagtcggttttaaatcctaaattttagattaaaaaaataaattgatataaaaataagttaaccttttatagttaataatttaattgttaagtaaattacccgatgcacaatgccagaattgtgtaaaaaattgacaccgcacaaaatttgaatgatacagtaggacaattcttggtgcgtccacagcgtgccatttttcaacttttccacaattctttcgcgcaaatttttgccaaaatattccgtcaccaagtgtaaatcatcaaattttttcaacggctttaatttgggtggcaaacggacatcgtaaagagcaattaactgaaattaaattaaaaaaacaatttaataaacacaatcctttgagagaaattattttaataaaatgcataatttattttcaaatatgataatttattaataaaaaaactgaaaattcttaaggagtaataatgcaataattattttctattttaatcagaagaatatttatattactttaattttcatttaaaatttaaattatttttgataattataaatttgtttatttattacaatattttagacattcaatactttcataaattacattcggatgattcagtgtggagagcagtgccacttcgcgcaatgtgtatttggctgtgccgggtgaatgaaacggcgcacgaagcaattttattgtcacattccttgttgtgccatcctcctccgtggcaattcttataattcatttaaaattatttttttttgaattaatttaaatcaattatttgaattttacgatttccacacgctgccctgttcacttctggccaacattgttttctctccatatgcggcattccgtaggcttttcatatcgccattcactaaaaaatttatatttt

SEQ ID NO: 588 - DNA, 1031 bp, Heterodera glycines
  unsure (1)..(1031): unsure at all n locations
gtcaccaagtgtaaatcatcaaattttttcaacggctntaatttgggtggcaaacggacatcgtaaagagcaattaactgaaattaaattaaaaaaacaatttaataaacacaatcctttgagagaaattattttaataaaatgcataatttattttcaaatatgataatttattaataaaaaaactgaaaattcttaaggagtaataatgcaataattattttctattttaatcagaagaatatttatattactttaattttcatataaaatttaaattatttttgataattataaatttgtttatttattacaatattttagacattcaatactttcagcaattattaaaaataaattacattcggatgattcagtgtggagagcagtgccacttcgcgcaatgtgtatttggctgtgccgggtgaatgaaacggtgcacgaagcaattttattgtcacattccttgttgtgccatcctcctccgtggcaattcttataattcatttaaaattatttttttttgaattaatttaaatcaattatttgaattttacgatttccacacgctgccctgttcacttctggccaacattgttttctctccatatgcggcattccgtaggcttttcatatcgccattcactaaaaaatttatatttttaaaaataattttaaaatttaatttaatgaattatttaattggattttaaatattaaatttatgctaacctcgctttatgtcatccgattgttgttgttgctgttgtcgttcattgtcacaactgtcgtcagatgaatttgttgatggagttgtgtttgaagtggttgacggcgatgaaattttgtaactttttaacaaactcacaacacttttcaccatttttttattaataattgcttaataatttttcttttaaatttttaaataaaaattcaatcaaaaattattattaaaaaatcaaaataataatatttcattaagagaaagttttaaaaaaacattaatttatgacagcttttaatgaaaa

SEQ ID NO: 589 - DNA, 7544 bp, Heterodera glycines
cccccccccccccccccgcaaaccaatcaatttttaacacaatttttccaacgtccgattcatcacaaatacgggccagacgagcgctgagcaacaacaaacaatgcacatgatcaatccctcaataatttgatcaaaaagaaacgccaaattggcatggacaaaatgattacaatttgtttaaaaaaaaattattttttaaatttattataaatctttttgtgtttgggaagtatataatattttagcataaatggcaaaccttgaaaagagactcaagaaaagccactttttggatttaaaaaacaaaagaaacaaattttagaaaataaccatttaaatttaaaaagaattcaaaaatttaatgcattttttgctacatatgttaagttcaattcttaaatattatttttttaatttaattttaatttttaatattatatggacaattttgatgtttcttggaataatattttaatttttttacaaacatattataattattcttttgccagcgtttttccccaaacattttttttgattttttccgagaattttggttcgtaaatttttatgggactcagttgaaccgcgtccagttgttcaacattattagtaataataataacatcatcaacgatagaatttgttttcgaaatcaccagcaaaatccccactaccatcagcagcagcaattttgcgcaattttccattagtgatggtattagtgatttggacgggaattatttcaccaaccattcattcattcattgatcgcaagtggacgacaatccaaaaaaccatcgccgccctccacactctcgacacccataaatcatccaatcattgcggaaaattctttttttgttctcgagaatttggtgaataagcaagcagcaaccaattttggcggactgacaaataaaatgtgtacgacagaaaagaaacgattgtttgtcgaattgttgggggggggcaaaagtgaaaatgtttcataagagaagagccatttgcttattataccattgcatataaagttaaaactttttccaatgtgctttaacttttaacaaatattatttttatgatttttaaaatagtaaaaacttttattttttttttgcagaaaatgcgtggcaaacgctcgacaagccgaaactatgcttcaaacactggtaattgtttttcagcttaattattatcattttaataattatgttgtaaaatatgaaatgttttcactaatttttttattcataaattattggattattatgattcttattatttaaaaatatttgatgtagacaaggaattagcatttggtaagaaccggttttaattacgtatagttaacttacaaatattgttaattgttttttgactgtgtccaattgttttgacaaatcttcgttaattagttaaaagttcatttttaggtgtgcctaacacttaaattaattctatcaaaattccattcgtttttaggcaatatttcttttttttttaaaaacctagaaatattttttccattcattgaaactcaaaaatataatgtttataaaatatttataatttaatattttatcaattactttaagaattatctgacgacgcatcagccggtgaaatggaacgcgagaatcggcgagtgcgatcaaacagactcagccagcaaagataccgcgaggcattcctttgaaaattcataattcaaacaattaaaccccttataaatacatatttaaaagggataattatgcatttatttaaaaactaacaattctttgatattataataataagtctccactctttttagtttttttaatttttaaatcaattatagtgaatttttattaaatgccccaaaaatcaaaaatttcgcatttttttcttacattttaaattttttacatatttgagaatttatcaaaatttctcgtgaaaaaataaattttttttgaaaagtatccctaaaaatacgtttttttcaaaaaagagataccaaaaattattttaaaatactaaaatgtgattatagcctatttggtatttttatgattttgcaccctttatgaagaatttttttccaaaaaataactatattaaaacatgaaaatccttttaaatgcatattaaaagagatgaaatgataaaaatttatttaaaataatattttttgataatttaaatttccacgcctttttaatttttttttaaagccaattattactaatattcctttttagaagggtaatgaagcacgcaatttgttgcctcagctgtacagtcgaattgctgagttggaacgggaaaacaatttgttgaaggatttgttgtggagagaacgcaaccccaacagtttcgcggtggcacaacagcagaaaatggtggaaaagaaattacgaaaatgaaaatgaaataatcgaattctcaaaatgcaattgtaatttttaacaattttttttactcattttttatttaattattcgtattttctcgattatttgaattcttccaaaaataggaatggaatcgtgcaaatggacaaacaatggacatggaaaatgcattcccacaacgcgcgatgagcgaagcttcggtcaattaatgctaattgataaaataattaattggcaaaaaaaacatttacacataataaaaccggaaattcttttctatttttagattccttcaatgtttaattgccaaacagttcggtcaaataatttaattttcaatggatggcctttactgaatcggaataaaaaatcaaacagaaaactgaactgaatttaaaaacgattaaaggcaatgccgccgggcaatgaaatgttggcacccgattggcaaatggttaatgtgaatggtgccaatttttatgggaacgatacatcatcagcagttaataatgccgcacttgggggagcagtgggaagtggccaacaacagcagcaaaacccacaacattttgtggccacaaatggcattgccattgcacggactcggcccatcaaacggccgagtgttcgccgttcggtgtcggcgctgaacatcccaatgaaagtcgtggcgagtgccaacgccacgccaaacgcagcagcggggggtgccaacaacaacagcaacaattgtggccaatttggaacgccatctccggtacggcacttgcgagcggaggaaaatgagcaaatgtccaaaaacgggaattcttaaatgccaatattcttaactatgaatcactatttttgaactttccgccactaaaataggtaattacgttcattattttggcattttgtcatttagtattttttagaaattccttaataaaaacgcaagaatcaacaatatcccttagaattgaattccgtcaaaaattcaagaattgttccctaaatatttaaaaatttgaatttggaaaatgagtttgaacatgtaaaagagcatcttatcgagaagaaaaacgcagggtttgggagagaggcaagaaaagtactggtttccgtttctgctggtagcaaggggaatttttgttgctaaaacttgattttctaagactttttaattgagttcagcgatttttccgtgaatctttgttttttacgtcggttttcgaacttttagcgcaaattaaaatcaatgaaataaatattaaattttaattgccccccgagtttagcaaccatcccaacaataccttacggctggcactgccaattttggacggcccggtccaagtccaccacaacaacagcaccaacaactttcgtatggccaagtgcaacaacagcgagacggcggccaatggttgagcagcgcaacaaataatggcggcacatcgcccgaatctccgctgtcaaatcatcaagcccaacaaacgcaacaacagtcaccagcaacaggtggttatcggagtcgatcggcgtcgatgaacgtgttgaccacgccgacaatggaaagtcagcagcaattgatgttcaacacgtcaatgggttccagcactaataataacaacaacaacatctttgggcacagcatgcaaagactggtgattaacttatgcccaagggttttaatacgttttttcctgacaaatgagttcccagatacatgaaaagcgtgaaaatttgttttagcgactgatgttaagctattactttttattattttaacattataaagaattctttaaaaataatttttaaaaatattacatataaggagaaagataaaataaaattttattctaaaccccaacccattgatcagcagacttcgccggatgagagtccgttggatcatgtaaatgtgcatcaacagtatgcagtttcaacatatgcaaataatgagcaacaacagcaacaattgcttttatctccgtcaccaccaaaacgcagcgcatccttcacagatatgtgcgcttcctatcagcagatgaacattcagggtgggataaatttaaattaaatttaaaaatatatttttttatgtaatatatagcatttatatgggttctgattccagaattttttggataattttttgatgtttttaaaaagatttttaccaaaaagataaaaaatcaatttatcataataatttatttatgttaaagtaattaaaaagaaatctcgcttttatggatattaaaaatttaaaagggttcattatttaaaaaatataatctaattattttaattcaattaagaaaatatgcaaacaaatgtgcaagtgactgaaatgcaacagcaatatcagcagcaacaacaatttcaaattcaacagcagcagcagcagcaacaacaccttgaagggttttttgcgcctccttttgcatatggtaattttttaaaaatttattttagattttattaaatcaatttatataaataattggttaattttatgcattgaacttgatccggatggaccacagccaaaaatatctttggcaaatcagcagcagtcggcagcacattttgccgcatttaaaggcataaattaatttagaattttttaattttttaaaattttaaggaaatgaacttactccaataaatgaagacacgccacgcttatatttggaacattagttggcctggcatattgaaaaaaggacattttgtcaaattaattttaatgagaaaatgtttcaaacagtacaattaacattaatttaaatattaataaatataattaattttaattacaaataatattgtatctctctcttctgtctacaattaatgatgattatgatcattcttcgttggcattttgctcatctattttttgttaaggtcattataacaaataaaaaagcgcattatcctttttatggcttttgttgttggtcaaaatgatttctaattattaaaattaataaatattctgaaatgctttgtcagtcgttttagaaattttagcaaaaattggaaattaaaatataattttttttctttcgaattgtgaatttggaaaattcgttcaaaaagacaccaaaactccctaattttttgctattacattttatattttacagacttttttatttaatattttcatatgatagaaatatgtatttttagttttaattaatttttacagttgggcaaagggtttgagaaaaacgttttaaattgtaacacaatgggacataaatgaggggaaagaaaaaaagagattttttgagtaatttaatattttaaaaatttttaatctcttcaggttcaagagtttcttcctgttccattttttccatcaaatttttacatgaaaaaatgaagacaaacaaaaagaacagtaaaatttatttgttaacaaatacgcatgataaataatataaaaaactgaaaataaatgtgaaaaataaagtgaaaaatggataatgaattaattaattaaatgagtaatcgcccttccgttggttcttcagctttcttcaaagagtggccaaattgaatttgaaacttggcccaaagttcgcctcaattttgtcgccagtccacagagaaacgctatttcattctgattgattgtcgttgaagaattttccatttaattcactgatttgtgaggataacacttggtcgcttaaatcaaaaatggacaattgatagggcggtgagttttaagaaaattcgacgagcagcagggagattaatatttttcattgcatatgaaaacatttttacgcgtccttgggtttcacgaatttttcccgttgtgtccttggaaatcagtatacctatcgttcattggaaagcgaatttttccaatggcagttcgaactaaattaaattcttgaattactcgaaagaaagctgaatttcgtcttttctcaatgccagagtatttactttttttttatatctataaaattgatgcccgaatgttggtctgtaccgtttttcggtggccccgtttcggcgccagcccaagttttcggattataaattttttttgttgttaaccattcgaaagcttttcatgctttcgctctctctagccattctacgcgaatagacaattaattacccaacaagttataacatgtaaattgcaaaaaaaatcgtttataacttttttgcttgacaagaactttcgaataataccagaattgttttggttgaaaataaaaaaaagttaaagctaaaaaactatggctggcaccgaaacctgggcgccgaaaaaccctttccctcactgggggtggcaaaacgaaaattaaccaaaatgccaaacaatccctccctattaattcggaaaacaagaatggcccagaattaaatgctaaaatgcgagaattgagtagaaaattattgtagaagaaaaaggtaaactaaactataacaatatttttttgcgaaaacgacctaaaaagccaattaaccatttagctgatagggccgttctaggtaaatattgatcatagtccccaaactcaaaaatgcttaaaaacggttagaatcgatgtaatagtggggcgagacggagggcggaggaaaaagtctgacgagcgccacaggcggttggctgccttcggggccctttttggaacaaaagttttttgaaaatggaaccgatggatttgcggagaccgaaatagtcagacaaattcgaaatctgttggaaaattttattacggaaccgcagcagaatggcggaaaggaggacaatgcaattgcactgatatttgttagaattggcttcagcctcaaaaattgcccaatattagcaggcgaataacgcaattgaaaaggtgaaaattataaggtaagagcaatgaaaacgaaagaaagagcaaatgagcatctttttgttgttactttttaagttactgttgagaaagaaaattttcaacaatttcattttccatattttatgataaaataaatttctttcaagggaatgattaatttaaaaatggaaaaatattcataaatttattttattaaaaatggtagataaattttggggttgggcccgggcagaagacacctttgtcggtggaaaatttttctaaagtcagaaaaaaa

SEQ ID NO: 590 - DNA, 2715 bp, Heterodera glycines
atcaataaaatataagatttatgacaaaatttggttatttttttaataaaaatctgttaacaaatcgattaaaaatcacaaaaaattttcccggcggcgcctatcggcaccgccggaccccctgtccatcctccaaaattttttgaaaaaatgcgacgcaaaaaaagcgtttttaaagcaaaaaagtcgtcgcttgacttttaatcggaagggacagaaaaattttggcataaaatgaccgattggaagaggaagaaaaagggaacgcaacagaggaggacccaccaaagaggagaatattttgctaaatgatgaccatttgccgggcgttttaccctaccctccaccaacaaatcaatcaaataaataatcaatttgacggataatttttatccaattcatttgtaaaagttaaatccacatttttcaaaatttgaaaattgactaacgtaatgataaaagtcaaattcctaaatgattaaaatggaaaaacgtaactcgtgcgcctgcatgaattatttcaggatttttatgagcattttgaaatagtttttcaagtttggtaaaagactttgacattatgccagggcacccatcgtccatgctccgtttccaaggacggtgtgccgatttgcaaggacaagtgggaaaaattcatgaaatccaagaacatttaaattttttattttctacaatgaaaaacggttaatatttattcattcaaatggcttgtagttttcatttttccaacatatttttgttttcacgggtcattttcctcatttgcgacgacttttattctgctttaaaacgttttttgtggtgcgctttttccaaaatatttccgggaaacagataaaggggtcggcggtgccaataggcgccgccggggaaaaatttgttaactgattttcaccaaaaaatgcggattttgcgattttgagataatggcgatgaccacattttacttttcacaacacttcttgcgggcgctttttgcgaaaaactttttttggggatgggagtggagaaattattaacacttttccaaaattgatcatttttaagcgtcaaaatttaaaaatagaaagaaaggccctggcggtgccaatatgcgccgccgggaaaaaaattgggaatttttgtgcaatttaggaccagattttgcaccaaatatgttataaattaaaaatttatcaaatttctttgaatcttgttaaaagttttccaagtgctcattttcaaggacgtcattgccattcaaggacgaatgggaggccctgcattaccgtaaatatttcataggaatggctgagatccaaccctttgttatttgagaaattcgttgattaattttcttttacctttggtaaaagacttttttgggtgagtataaatatgtaatataagcaataaaatttcaaaggaataaaaagatacacacagaacaaaaacaacacatcgtcctaatttgaaaatttggtagcaattttatataaaaacggctatttttgaggatttttttccaaaaatcagcatttcatcaaaaaatcagctttgacccctagaaatgagcaaaatgcttacaaaatcagcagagttgggaaccctgtacatacccaagggatgcgaagacattcacaatgagaaatgcacgagtccaaacaaaggagaagcagaagctaattaaattttaaattatattttagaataaaaaacggtaaataaataaaataaataggggagcaaaatagaatttagtgctaatttggattttggtgatgaatggatttggcatctttcatttgtgcttttatatgccatgatttccctgcccatctctgctgttcccattttgtttctcttctctcagattaattgccattgattaatctgtccattgattttccttgggttaatttgagtggcttaatgccctcctctgccagtgaatgggaacggacggcattttctttgctcgcacaacggcactttgggaaaagcaacctaatcctcaaccaaaaaatgaaaagcaaaatgaattgatttgatttatgctcttctgaggccgaaagtgatcagaatcagctaaagcttataaaatcttttgagaaattatttttttatgttttaaaattggtaattccaggcaaaatatctgctaataaatctcaaaatttttctcaattttatttaccttttttcttaatcactttttcacatttaatcggaaattttagtcagttagacaaaacgaaaacaatttaagtttaaccattttatttttccattaagaaatttctttaataaaaaaattcaaaattatttattctaacaattcaattaggtaatccagaaattgacaaaatgtgaaatatgcgtcaaaatccaaaaatactctaatgacctccctaattggttccgcgattcggtgataattaatcttccatcatatactatttgctttggcaccaaaagtgccatatttgtttgtcttttgcttttctccttttggccatccctattcgtttttacatatcagctgaccgaaaaatgagttcaaaaaagctcgataaatttctcattcgggaatttcagcagtatttgtttcggaatcatttgatggacaaattgcacattttgacaacggcattaatgccgtcgtccacctgctgctgaatatctctggtgaatggcgctggtcctccccccccc

SEQ ID NO: 591 - DNA, 2296 bp, Heterodera glycines
  unsure (1)..(2296): unsure at all n locations
caactttttcaaaacagggtcctcgaaattccatcaaatttggggagtggggccaacaatgaatattaggaggggcatgccatacatagatagatagcttttgtggaattagagccaaaattaaaaatttttgtccaaaaattagggggaaaaattaattatttttttatttataatgttttaatcataaaataatttattttgagtcggcacgacggtcaatcacatcactttgctcggcggtaaattgctgtggttcagttttatagatccagatgtaagtggtgaaagtgataagaatataattgtttttcatttctttttatgttctattttctaggctgtattttaaatttttaaaaaaagtatattttaaaattttattttcacctattttggcgttttgcacaaatttccttaacaaaaaagcaattcacccataataatggttcgaattttgaaaaatttattttttgtaaaattccttataattttgattcctttttctaacagcaaaaaaataagttaggttaaaatttaaattgaaattatttattttttccatgaaattggtgaatggactaaaaatgataataaaaaaaaacttcgaaaaaatcaaccattttgcagacataaatttgtgactttttagagcatagtttcccgcttttggtcataatttgctttttttagattatactttttactagaaatagaggccctagcaataaacaaaacaacgagaattgaaaaaaacgcattttaaaaaacttttagttttaaaaattaattaaaaaattttagacttaagggcactaaattaaattcaatttttcttaaattttttgcccatgtaatattctgaattgtagaagaacgaatggcggatgaaagtaaaatatactctgggcaccgtaatcgacgaacatcatcccaatatggtgacacaaaattcggctaatcagcgcgccaatcataaagcggctgatgatcatgaaccactggacaaacagattcaactcaaattcaagatcacgatggattcgagaaacggaaagattggcgtagaatttcgactgaacggtcaacacattacaaaagacataaatggcactgtgcttacgtgctgtccagcagaattggtgccgtttgaagacatccaatacattacggtaattgagtacacattactgtaatgcaatacaggatggtaaatttattgcatacatcaagtaatcaaatacatatttgtaatccatcatattacggtaatcgaatacttttctataatccaatacaatatggtaatcaaatgcatactgtaacccagcaccttacggtattcgagctataaacataacaaacgaataccacattgcttttgatgatattgatgaatggagcccttttcccctctttttatttggcgctaaatcctaaccgattttgggtgatttttggggtccataaaaattcgcttttacatcccttttattataattgttttaggcgaaaagttttgacatggaattgtcccctgacacggatgtgcagatatattgtataccaccagagaaatgcattttaaagacttaatttatatggatggatggatatcaatcacactgtatttagataattggcatatgaattttcaaataaaaatttaaaaaatgatccgaaattattctaaattattacgttcaaaagaatatttcatagtataaaattaaataaattttggatttcatagcctattacattattaaataaaaatttattttccaacaatttctttatcatttattttatgtcttcaattaaaatgtcgtgtgcactttttttccgccaccaaaaacattaattttaggaatatattacatccattcacttataaggtagccatataaaaaatatataattagcatagcctgaattatttccactttttaaattaaataaaaattttaatcatgtgacataaaattttgtgttcttcctcatcatgcggctgccattaaatttaaaaaaatctaattggtaatctgtgggaatttgtctacttttctgtactcaaccatttcccacccaaattatgaaaatgtacttttgttttatgggcattaatagccaattatttcctgtctaatggcctttgatccgctattttaccgtccgacgatataaaaggcgtgaaacattgtgattattattaaatttgtgtcccagttcatttaatanacatttaataataatttnnataattaaaaaatgtgcgtcattaaaaaactcgcgc

SEQ ID NO: 592 - DNA, 2137 bp, Heterodera glycines
cacatcttcaaaattaacaacaacgacaactactgtcttttttatgccttggaactgatgcgctactattctctctacaaacgtgggatcattaccgaagacagatggaggtggattaaagaccgacagactactgttctccaacaaaaagtactacttttactccgagaggcagggatcccgacaactgaaccggaatacgacgcggaaatttacatccatcaagtgcaaggattgtggagcacaaaatatcccggtgattatttttaaaaaggcatttataaaaatttatttattttcaaatgaaaaatagatttatatttttacaaattttcaggcgaatataaaatttttattttcaatgattaccaaactcgtccaatcacaaaatcagacgtcaccgattaccaattccctattctgctctaccaccatgacaaacattttgacggcattaagacaatatcaaaattttggaacaaacgttactactgcctctcctgtgaatcagcattcagcaataaatcacaacactcaatgaactgcacatcactctgccacggttgccgggaggtgggcgtcgactatccatgcgaatcccaacaaggatacttcaaaaaatgcaaacattgtaacaataatttctacaacaacgactgctatgaacgacacctccacaaggatttgtgctcgaaatttcagcgctgcgaagattgtggagttatttacaacatcaaatatcacggaacaacaggtcaccaatgcggagaaaggttttgtcgtctatgtaagcagtttcatgtaaaagaggaagatggcgagaacccctgcaaaagctgcttcatacaaccgctgaaactacacaaaataaaaccataccgcattattgcatacgactttgaggcgacacaggacaagaaagtgggcaatcgtttcgaacacgaggttaactttgcagcggctaccatcatctgcaccgactgcatcaacaatggggaatggaaaaattcactgcttggaaaaaagtgtcaaatttgcggtccaaaccgcacaatcacattctcgccatttgactacacgaatacaaaagttgaccaaaaaatcatcactcaaaacccactgcgtgattttgttggatggctactcttcgatcacaacaaaaagttctcaacagttgcctttgcacactttgggggccgctacgacatgacgatgatcatcaaggaggttttagcgcaaggtataaacttaattttaaatttaaattaattctttttaaataaaggtattcacaaccctgaaatcatcaagcaaggaaatcgtctctacgagttaaaaatcaaggacaatgaacattgcccactcacaactctccacgacagctataatttaatgcccatcaaattatcagccctcataaaatcctttggtctcaaaattcaagttagttttatttttatcaattcttgttttaattattttacaaatttactttttaggacaaacaacattttccccacatgtttaataaagaggccaactacgacaacgtcctaccgcaccttccacctcgtgatgactactgccctaaacaaatgaaaaaacccgacctacaaaattttaacaactggtacaataacaactatgaacaaaaattcgacctcaaagaaaaactccccgaatactgctgcaatgacgtccatatcctcacccacgccctcatcgaactgcgccgggaattcaaacaactaacgcaacggaacggaaaacacggaggaatcgacattctttggcaagccatgaccatagccagcgcctgcgtcaaaaactatgcactcaaccatttgaaaccaaactcgcttgccatcgtccccgaaaagggctacactcctcaacaaaatcaaagtgcattggccatcaaatatctcgactggtactctcacaccaacaacgtcaacattcaaactgctcactcccggtacggcgaatatgtgttcaagcgcgaagggcaggtatatcaagtagacggttacattaagggaataaatgggaggagggataaaataattgaagtaaatggttgtctgtggcacgggtgcgaggaatgttttgatgagatggacgaagaaacgaggat

SEQ ID NO: 593 - DNA, 5360 bp, Heterodera glycines
aggatacttcaaaaaatgcaaacattgtaacaataatttctacaacaacgactgctatgaacgacacctccacaaggatttgtgctctaaatttcagcgctgcgaagattgtggagttatttacaacatcaaatatcacggaacaacaggtcaccaatgcggagaaaggttttgtcgtctatgtaaacagtttcatgtaaaagaggaagatggcgagaacccctgcaaaagctgcttcatacaaccgctgaaactacacaaaataaaaccataccgcatcattgcatacgactttgaggcgacacaggacaagaaagtgggcaatcgtttcgaacacgaggttaactttgcagcggctaccatcatctgcaccgactgcatcaacaatggggaatggaaaaattcactgcttggaaaaaagtgtcaaatttgcggtccaaaccgcacaatcacattctcgccatttgactacacgaatacaaaagttgaccaaaaaatcatcactcaaaacccactgcgtgattttgttggatggctactcttcgatcacaacaaaaagttctcaacagttgcctttgcacactttgggggccgctacgacatgacgatgatcatcaaggaggttttagcgcaaggtataaacttaattttaaatttaaattaattctttttaaataaaggtattcacaaccctgaaatcatcaagcaaggaaatcgtctctacgagttaaaaatcaaggacaatgaacattgcccactcacaactctccacgacagctataatttaatgcccatcaaattatcaggcctcataaaatcctttggtctcaaaattcaagttagttttatttttatcaattcttgttttaattattttacaaatttactttttaggacaaacaacattttccccacatgtttaataaagaggccaactacgacaacgtcctaccgcaccttccacctcgtgatgactactgccctaaacaaatgaaaaaacccgacctacaaaattttaacaactggtacaataacaactatgaacaaaaattcgacctcaaagaaaaactccccgaatactgctgcaatgacgtcaaaattctcacccacgccctcgtcgaattacgccgagaattcaaacaactaacacaacggaacggaaaacacggaggaatcgacattttgtggcaagcaatgaccatagccagcgcctgcgtcaaaaactatgcactcaaccatttgaaaccgaactcgcttgccatcgtccccgaaaagggctacactcctcaacagaatcaaagcgctctggctatcaaatacctcgactggtactcccacatcaacaacgtcaacatccaaacggctcactcacgatacggcgaatatgtgttcaagcgcgaagggcaggtatatcaagtggacggctacatcaaaggcacaaatgggaggagggataaaataattgaagtaaatggttgtctgtggcacggctgcgaggagtgttttgatgagatggacgaataaacgaggatgccgaatggaaagacgctaggacaattaagagagagggaagtgaggaaacacgatatattgagccgttacgtcgacttggaggtggtatgggagcacgaaataaatgaacaactaaagaaggacaagcagatgagggaatattttgaaaactggaaggaccgctcaccaataaaaatcagagacgcttttcacggaggacgcactggaccgatgaagttactccacacagcaaagtcaggccagaaaatcagctacaaggacttcaccagcctctatccgtggaccaatttttcgaccgactatccccttggccaccctaaaatcatcagttttccagtaaatgagcagacggtcaactggcgctctccatccgacaacccctacaaaggacttctcaaagtgttgcttctacctccaaacaacaacataaacgtcactgttatgccaatcaaatttgatgagcgccttctcttccctctctgtgagaagtgcgccaaacacatcaccgcaaaatatcccaatggtctcaaggacgacaactactcctgcccgcatttcaaccccaacgaccgagcctttgtatcaacctgcacccatcttgaactaaacgccgctttggaggccggttacaccgcccgcaaagtcttccacgtcctccaatacgaccagtggagtaacaatgtcttcaagtcctacgtgagtgaaatgatggccctaaaaatccacgccactggcttcccgtcatggtgcgagagcgaagagcagaagagtgaatacattgaggagtgctgggggaaatttgcaattaaacttgacaaagaaaagatgaaagctgaaccggggaagcggtacatcgccaagctctgcctcaactcactctggggccgcttctccatgcggaaccttctctcaaaagcaataattgacaacgacgaaagccttattcatcagtataccgaagacaaaaagattgagctaatcgacttggaaatgatggatgaggacaacgatgtattcatgctcacttacaaaccaaaggaggagtttgtcgacgaaaataagtactccaatgtagtcatctccctcttcacaacatcaatggcgcgtctctacctctacgaagctctgaaaaaagtggccgacactcccggatgtgaaattctctactttgacacggacagcatcatctacgttcatcccgaggacaacgacccactcccaacaggaaagggacacctcggtgagctgacggacgaaaatccagaccacgacattttggaattcatcagtgctggctgcaaaaactacggactgaaacttcaacggaaagacaatggtgaaatttgcttcgacttgaaaataagggggttcactctcgacgaacagactgtacaaaaaatacactacgacacagtaaaagagcaaattttacgttatggttccgatgaccccgctgaccccataattgttacatatccccattttattcgtcctaatcttatccaaggcaaagtgtttactcattccctcacaaagcattatcaacccatattcacaaaaggtattattaatgattcattccaagtcctcgaatttggttatcgaaaatgattgtataatttttttctgtgtatattagttttcttattgttcccttcttttataaaacccatgttgggacggaatgacccctggttgatcctctctaacactccaggccatccatctgagatgaaggtggacgagctgttcattattgtaatgcgcagcctggtgagtgagtgtttgattggggaccgaagggtgaagccgttccctgggtgtatttgctcacttttaagggaactctaaaaattctgatatgccttcaaatctatcaaaagagtctttcattttatcatttttctatcctcaattttacatttgtatttttcatttgaatatttattcagaaataaatttgaaaaatatggcattattaatattaaaaggtataaattaaccaaacaaaaagatatttaaggagagaaatagtcagggttttgtaactaaatttggtaaattataatgtcttcaaattcttcaaagaagactctccaatctgtagtggagcaagtaattcaacaagacgcagaaataaaaagcagtgagaaaccactaaaacagaatgagttggaaaagagtgaacggaaatcaacccacaccgtatataacttacttgaccaccaacgatccttttggaaattggcccggccaaagtttgcagtgatcaactttctctgtccagggtgtcgtcgaatcaactataagcacaaggaccagttcaagttgatgggagaagatgagttccactttacccaagtgatgtgtcccggttgtgtaaagtacaatatgatgcagactgatatctataacaaacacacaaagaacccccactaattgtatttaagattaaaacttaacattatatttataattaataaagatgattgatgaaaaattttttcacttgaacgatttgaaattaaaattgccttttggtatggtaattagtggaccatcgagtagcggtaaaacaacatttttactaaaatttttgagagaaagagatgagttaattagcccacaaccaaaatcagtgctttattgttatggtcaatttaatgatagtattcctgtactacaaaaaatgggagtgcatgtgcacaaaggacctcctagggacgaattgctgagctctctaaagaagcctctcttattaattctagatgaccttttaacaataattgatgagaaatacctatctgaattattcattaaaaaagctcatcatcttaatatgggtgtgattttcataacccaaaatttatttgaaaaaaagatgaaggtagcccgaattaattcacaatatattgttttaatgtctgctccgaatgccgcgctacaaatacgtaatttgggtgttcaactgtttccaaaaaatcttgcatttttcctaagtgcgtataaagatgccactttatcaccttatgggtatttatttttggatttacacccggcatcgacccctttactgagaatacggacgaggatatttaaagaagatgaagaaaaagcattgtatattcaaaatgattaatttacctaaaaatgttattcaaaacttggattttttaaagaaattggtaaaaacaaagtcttttaaaaagagacaacaaatatttaaagaagcgactagtgagcaaattggattattaattgaaattagttataatatattaaaggggtactttccgctcacgaagagacaaaaatatagacttttaccatacgcaaattttgtaagaaaattagcaaaagttagaactgagacgggtgcaaagaaagtttttcaacaaaacggtggtggttttttcgttaatttgactcctttattattaccagtcattattgccgccttaaaatatggagaataaatttatactcgttccatctgacttgtataacaatttattaaagcctgacactggggagattaatgttgaaaatgctaaaaataaattgaactcacttttgaagcagcgaaaattagattcgggtacaaaaaatttactttataatcaggaattgaggcgtttcttgaaactaaggaaggaaattgaagacaaacccgtaaaggttgagctttcagatggctcattaatggtgtttaaaccaaaacagcgtgaaagagatagcaaaattcctactcaaattgttaatgatgaagaattggatgaaacaggctctattccaacacttgaagacccttacactactgctgaaga

SEQ ID NO: 594 - DNA, 3670 bp, Heterodera glycines
  unsure (1)..(3670): unsure at all n locations
tttttgccaattcagggaaaaagttattcgtgccatttataggattgtcggttgacacagttagcaaaaagaacacaaaactaacattttttgtctgtttgatctgctgaaatgatcctaattttggaaaatatcaccgacaatcctatcgattggaactgttagtggagcagagaaagaagaggaaatgaacagagattgttagaggaaatgtaaaatatatttattaaaacgaagaattaatttgtaaaagaaatgtgctaaattgagggggggggggaaaagattggccaaataattaaacccagaacaatctcttggctcttggccacatcacgtggataatgattgtttcgcggccgcattggcattggcactcgagattggagaggacaacagtttgacacatccatttctcgagacaatggctctgtttttcttttatccaagatcatgatcaaagccctgtgatccattttcaggttctacgggtgttcgatttttttatgggtccgtatcgttttggcgccgacgttttggcgccagcccaagttttcggactataagtgttttctttttcaaccaaatccaacattgttggtatcattcgaaagcttaacatgttttgaagctatttataagctattgattagtgattagacaattaccaaaaaagttataacatgaaattccaaaaaagtcgaaaattttgagttttttcctaataacttttttagaagctaaatttttttttttttttgtaaggctaatagagcttgtgaagggctttcgaatgataccaagattgttagatttggtcaacaataaaaagttataatcaaaaaactgaggctggcgtcaaaacgacccagtccctttttaatttgttagtttttattggccaacgaaaacatttttgaaatttacatttgtttaaaaatgaccattttgttaagtattattattattttaattattgtatattattacaatattattatttatgtgttgcacatttaacaatctgtgaaattaatttgtaaaagaaaaaaacagagggaaagaaaagggaaaagaaaagaaaggacagaaggtaacacaagaaaacaaaagacaaaaacaaaacagtgatcatcggttcaaatcagaaaaagttacggggagcacagagaaaaaaataggggggaacaaatcaactgatcagaaaggaaaaaagcagggacagagacacagagagagtgatcagcaaggaaggatcgatcagaattgccggcttttcaacaaaagtgccaaaaaatgttagttcaaaatatgtacaaattgtgattttccgacaaccctataaatgtgtgtgtgttattttgatcagtttgaatgatcgatctgtcggtccgccgtatgtccgtcgaccaacaaatcaatcagcggttaatcagtgatcagaatcaatagccatcaccatcaccaccattcgatcaccacgtcacttgccttacgcgccgtgtgccctcctccccctcctcctcctcccgatcagtgccgaagaatatttcgtcaatgtcggccggtacagtgttttccagccgctcgatcagtgccgccaacatgcacaactgccgactccaatacgcttggcggttgtccagcactggccaccgggagtagctcagctcaagcagtgccaaattgtccacacgtgcgatttgttcaatttctgcgcgagacgcaacgctaaaacataacacaatgtgatcatcgaattgatcatggtaaattttggcaagtcctatcctaattaatacataataatgatgctctttggcaccaattgccattatcgttgttgtcccaaactttgccaacttactcgattttgtgccggtggattagcatcaccattttgttcgctgtcggctccgattcggtgagcatttgctgcgcactgcgcatacccatcacggcattggcagcaccgcccacaaagtgcatgttctgtgtacacacaatgtatattcacaaaagccataaacgatgccaaaattatggaaaattgcctttgatcataattttgatcggcattttccataccattagcatttggttggcattttccatagtttatgcttttgatcaatcggctttttccatcgttctccccaccctccttctctcacttgcagcgtctcttccaactcgtgccaactgccgtagtgggccaaatcgacgcccacctccaccgagtcgccgtagaaaatgatgccaattttggtatcgctgtgctgcacgtactcgcgcacaaaatggaccaatgattgtctcaactcctcgcgtttttccgcggtcgcttccgaagtctcaaccagcaaaacgaggcgagtgcggcgctgcaactcggcacagtcttgtgccgacttcggcgacacttctgaagatgggaagcattgttatgtgccaaaactggaaggataaatatttgttgtgcctgagaaagcggttgtgccgcgttggacagatggagtcggtctgcctgtcatcgaaatgtgtttttcgctgacaaatttggcacgcgacttgggcagcgccaaagtgccggcgcggcattgggactccaaaaagtcggccaactgagcaccgctcaattgggcccactaaatggcaatttttaaggaccttttaagtggaaaagtagtgaataattggccaaatgaaaaggaagtgactttgctcaacaccgctaacagtggtggaatgactcatcagcagaggtgccattttactccttttttcccatcacattttttacggccataaaatgaccgatcagaccaaatcaggcaaactgccagacactggcttacattttcaaccaaaagatatgcgcgaggtgccgattcttctgcaatttccgattcatagctggacgggccgacgagcactggggtaatgccggccgcagtgagtgccgaccgaggactgttcggtactctgttgaaaatgtttcaatttcagttcaactttttctgatctcgtccaagaatctcgactctcagcagaagggttagttccggcgccatgccaaaaggcgcagccaaaattgttttaatgaaatttccaataaaaaacattggatttgattttggagagggatggacccccggccaagggcgcaggcaggggggggggctgaggaaaaatgatttttttggaaaattttctggactttggggaatccaagaggctatttaggtgattgggttcgtgtaatagaggtaaatcacaaaatatggacataaaatttgaacaaaaatgcaaaaatatggaaatatatcgcgaaatatggaaaatatggatatagaaatccatcctagaagcttcaaaccatgctataaacatgtttttcgtgtgtttcaggcgataaaaacccaactcgtactgttttttggcaaaaaatcgtcataacttttgttaaagtctaccaccttgaacattcttggtatcattcgatagcccttcaaattctctatctacccactaagtttcaaaaagttttgtcatgtttgaacaaagatatggatgaattgtttttaccatatttgttcataactttcttcttttgaaatgcaataaaattttcttgcattttaccgncccctgaatgataccaagaatg

SEQ ID NO: 595 - DNA, 11289 bp, Heterodera glycines
  unsure (1)..(11289): unsure at all n locations
ccccccccccgaaacccaaaaagtaaaaaattttcactaaattttttgaaattttaagtaattttcttaacaaaattgcattaaaatactcaaaaattttcccggcggcgcctatcggcaccgccggcccaaatggagactaaaatggcaaaaaatattaattttttggcgaaaaacggtgaagaattttgtaaaatacacccccataattcgggatttcaaaaaaacaaaaaatacacccctaaaaatcgattttttgacttcagccccccccccccaaagccaagggtctggctacgcccttgccccggccttatccgagacctatcctccctaattatacctttgccccccccccnctctaaaatccctttgcccaaacactcacatatcctccccgctggaaaccaccagcaacacttttggtacatttccgccccggccgaaactttcgaactgttgtaagctcgcttcgtaggcggccgacaagtcgggcagtcccaacgagttggaggcagtggagcgcagttggccgagttggtcgagcagttggtcacgctcgtggtaaccgcccagactgaccggaaccgccacacttttgccgtattggagcagtgccacgcgggtggcatccgccgccaggtccaaatgctggtccaaaaggtcgtccaacgcctggcgcaagcggtccccatgcgcttggagcagttcgtcgttgactgccaccaccaggtcaatgaccgcctcctgcacgcggcactcgcccttctctacacgcgtcggcacgcggtcatccggaagtgccgccaccggaccgccttcatcagacggcacaagttcagccccgtccacggcgtgatcgtcgtgaagtgtggcagtggtcgcttcggcaccgattcggccgcccgccgtccgtgccggaagcccgtccggactcacaagaccgacatccagccacacgtattcgtcataaatgtttttggacagtacgttgccgctacggtccaacggtcgtccctgatcatcaaccgcaattggtgtgccatccgctgggtccaagtaacgtccgctggccgggtcgcgtgccaacggcgtcccttccgcatcaaccaccggcatcagcagatgtccactcgagtcggtcaccggtgccaatttccgctcctgctcctgctcagcggaccatgcgtagacgaattggccctccgcgttggtgggcaacggcgagccgtccgggcccagcagcagtccgtccgcactagtcgccaacggtttgcgctcgcctcctacgcgcacccaaccgccttgctcgtcccggtccagcggttgtccggcactgtcaaccaccacaatttggccccgggcggtcgcggccggttccaatgtgccgccgccgccaacgacgccaccaccggcaccctccggacgcgtgtaaatgaattgtccttgctcgccctggggcaagaggtggccggccgagtccactgggcgaccaaactcgtccgtctcaatttgtgcaccacccgcgtccacgtagtgtccagacgcgtcggttggcatcgcgatgccgaactgatccaccatcgggtgaatgtcgtgcccgtagtcgtcggtaggcagcgtttgcggcaccgtttcctccccgtcaccggcgccgcccggcggcacagtgacatgtataaaacggcccagcgaatcggttggcaacggttgcccgtccgcgccgatcagcagcccgtccccgcgcgttggcagtggactgcccgcacggtccagcacgagtccttcccgcgtggtcgacaacggcagtccgtccggcccaatcacttccacaacggttggacgcgctgtcgacgttgtcgtcgccttcggcactgacgttgggggtggaggcgcttcggaagaggtcgtcaaaatgggcggagcagtcgtttgggcggccgcggcaccctccgcctccggcacaaattccgacggtggccgggggaatacgaacattccctcctcattctttggcagcgttttaccctgaattttacaaatcctttggtctaagctaaacaaattttaattaaaaaattccaatttgttcccagacggcgtttatcggcaccgccgtcccctcccctctttaaatgttgtgaaaaccaagaaaaaaaaagagttcgttgatttacatggcttgaactccttcacaatatgttggttgccttccccccccccgtgccattcattttgtccttttttgccaatgctttacatcggtgtccaccggaatgccctgctcgtcccgttgcacttcgtcccctcgttccgagtccaggaaaagcccggaactggcagtgggcagcaattgtccgtccggataaacgattgggtaaattgggaagcccattgtgtcggtgggcaacactttgtcctcctcctccagccgttggccaagcacaaattggccatagaaattggtcggcaatggcgaactgtcgggccccatcggttggccgtaagcgtcggtcggcaacggtttcccctcgtggtcgagaattttcccctgagtaattgtaaaatattaggcaattaaagaaaaattatcaattaatgccacaaaaaatgacgataaaaattaaattatgccgctcagaattaaagttaatttgcatgtgcaacggaaaaagtatgccgtaaaaaatgagaatgtgctgctatttggagaatccccaaatccgcacctcttcgtctcgtctcattgaaacgccgtcgtcgtccaccaccgagtaaatggggtacatgttggcaccagtgggcatcggctgtccatatctgatcagtgggtacggtacccaaatcactattctctctccgtttctttctcttcccctctccctttttctctctttatgctttctccgccccttttcgtgccgtactcacttgtccaacggcgggtacacccaatttccgtccgagttcatcttcagcacctgtccgtccggcccgagtgcccgctgctcttcgtccctttccaccttccgttccatggcgtcgtaataattgccgtgcccgtccgtccgcagcggagtgccgttgaacatcaccactggccgaatttctcggcccaacgagtccgttggcaacacgtgcactgttgcgcccaggtcatcgccggcctcagttttgaacgtatcggtcggcctcagtgaggggtacggctccgcttcgacagggcccgccggcgttggcggcggcactctgccggttggcctcggcttcaacagatcgaactctttgggacgttgttgctcaagttcgaatgttggcgacacctgaatgggccgggttagtttccgatgcattcattgattggtttttagggagcgtttgatcagcataattaactcttatgctctaattgtctccaatttgtcacattttttgtttaatgggcattatgaaatgtttgtttgttttaattatcaggttttaagttttctgaacctgacggaaagaagcctgatcaattattgatcatttttctgatcaaagtttgcgtctccagcgaattaatgatcactttttatgtatttctaattggtttatttcatgcgctatttttgcttattttctgctgatcagttagttacttcgattgctctattgtttctcacctcgaccactgtgccggccccgccggttggctccacttggctgcacgtcttctcgtcctcgtccaacaaccacccgtccggacagtaacactccacgcgcacctgaagcgggatttaattatgcgctttaacagatgtttgcaaatgaattattcagctcattttgttctcccccgcgggggagatgcgccgttcccgtagttaagtgcaataacgggccaacgctcggtcgagcgggagcaagcccccgacaacgaccattttccaaaaattggttaatctcttggaccccggtgggggtcgttacggagattaagccgtaaagaactgtaactacactttgatcttagccaaaaggccgagaagcgatgccggaacagcaaaatggtacgtgaaaggggaaaagaacgaaacgaaaatatatggggagcattttcctggtcaatggtgtgcagagatacgcatgaagggagggaaaatagtgtgcgaaatgtgaggaaaagaaacgagagaggaaagatgagagagttagtggataaaaagggcgaaatcgttatttaaaaaaaccataaatcaattatgtattttcatcaaaattaatttatgtacattaaaatattcatattaaattaaattttaaaataattgtttttgtaatgattttgattaaataaatatataatcgatttatggttttttattttattttattaataatatgtttccctttttatttatttcattttccagtgccaaattcagttccggtccttccctcccccccccctttttttcacctgcacagagtccgtctccaacagtttgcacgcgtgcgaacagtcgcagcgaatttctttggccggcgttcggatgcgcaccggtggcccggccaactcttggccatcgctcagctcggccaccgcttggaaatagaactcgacatcgcggggcagatcgggcacgcgaatgccgacggtgcggttgccctccacgcggattgtgctcatttgtgccgcgtcggcggcagcagcggcggccgcttcgtcccctgccgctggtgccgcttcgtcctccttggccgcttccgcgggccaatagcgtaccgaatactcgcgcaccggctgctggggaccgctgatggccggacggaagtccaccacctgagaaagtgagttgttaagtgccggatcaaacactcctatttaaaaggcgcctaacggcaccgtcggacacccattttgccatatttttgaaaatggaccccaaaatggcacaaaaaaatagtatggcataaatgaaagaattgcggagaccaacatcagcacaaacaccgaccatttcgtcattgatgttcgacccgacgcggagatcgccgggtgccttgggcaccaaaatggtgaacacgggcgagcgcactccctcgttggcattctccaccacgaggtaataagtgacgcccggctccatcggcgctgccggcgcgcgaattgggatctccttaacgaagaatggcatgatttaatttttgacaattttgtatgccaaagatttgtcttggattgactcatcccttggacttgatcataaattgacaaatttgggttttccagggtatgccaaagattcggaggatagaaccgatggggcaatgaagttggcatcaattttgagagttggccgacggattaagcaaaacatggcatttcccccgagagtatgccatcaattggggtcgatatgcttcggctgatcagggattaccctccccccccccggttcacctccaacgttcggtcttcgctctccaacacactccacagaatgcgctctttgttcgggtcgtccgtgtagcgaagtgtccattggttggcacggcgcaacgaattgggcaaagtgtcggcaaagtgcaggtaaatttggccccgtctgctttccactcggaccagctgatcgcgccagtcggcggacagatcagacatcatttccagccgaatggtccaattggcgacgcccagcggattgcgagccacgcagttgaacgtggacggctcagtgatgttggagacgaacagtgaccttaaaaacaaaagcatagagaagggggagagagggagaaagagaaaaaagtgatcggaaagagaaaaaggaagagaggaaatagtgagaaacaaagagagagagaaaaaaagaagagatgaatgagagagagagagaaagggagagagaaacaaagacaaaaatattcggctaacgggatgatcagctaatgccatgtctgtaccatttggtgcccgtgtggtcctccttcactgtggacggatcaatcggaatgtctccgccgcggatccatcgcaccgccggctgaggtcttccgctggcacggcagaatacagtgtaatcacttccctgtgggcgggaggaggtgatttcggatattaattaatccctatttaagccgtctccaaacttccggacgtatttttttagatcattgggatttgcccacccctcctattttcacttttgagttttaatgcttaatattgacttttcccttgctttttgctttgcttttccccagttttcctacgggcagcagctgaatgacgctttcgcccgcagtgcctctgctcccggaggacacgacaatgaacggcgcgtcaccctccggcaacgttttggcaatgcacggctccgagaaaatgccgggtccactcggatatctgatcaaaaaaatcagtgtaaaacgtgggataagttagacaaaaagaagaaacaaagactcacaatgcccggattttgaagacgtattccgtgtccggctccaacgcgttccaaatgatgtgactgtttttgctcgggtcgggcacttcaactttcgaccattttggcaagctcagcagctcgtcctcttcaatcttcttctcggctggcacgtaataaatctagaaggttttcgttggttttgaaattaatttgatcagattttttaattttttatttttggggcccctaaaaataaataaatttttagtggaaaatgattaaatgtttttaaaatttttaaaattaattttccacctcataactgagcggcgactcctccagcacttcggccggtttccaatgtacttccaccgacgtttgattgatcggctccacctgcagctgtgttggcggggcggcacgcgctcgagacattgtccggatactgtaaatagacggaatacttactgtacatggatgagagaaaacggtatcgaaatgggaaagccgagattaatgtcaacggcactcacttgtgctggttggagtaggggccaggcccgtcttggttcgctgcttgtaccaccacagcgtatgcctataaaaagcaaataaaaaatgccatccgaaatcagacaataacttcttctctaactctctcccctctctctctctctctatctctctctctcttctctctccccacctcttgtgttcttaccgtgtccgcctccacaaagtcagtgatcagtgcctgcttctcgcccactcccaagtccttgcccatcacgtggttactcatccattcgctgatcggtttgctcggcacttgaccgaccagcaaatcgcggctctggtcatcaagcgcaatgtagtaaatgctgaatggggaacattgtggtcaactgatcatagtttttgtgatcgactattacgcaacagaatctcttcctagccgtttggcactaattgtgccaaacttgttgactcattagttaactgttttgctctcacatgtatcgtgtgatgtttccgttggcaatttgcggtggatcccaagtgactgaaatgctttttggcctcgtcgccgccagtcggatgttctccggcgcactgcccgggccggccacaaaaattgtgaatccgttctccgtgcgtccgccctcattctccgccacacacacaaagtcctttgcctggcgaatgtccgacacgcgaagcattccgccctcactgatctgtcaaaggaattaagaaagtgatcggatatgacaagctgatcatgagtgatctgatcagattgacaatcaaaaaagaaccgccaggatgatcaaagtgatcggtgtaactagtggaatttaatccctttttattatcctcaccaaattgccctccttgtccacccattttatttgcggtgccggaaatccgttagcagtgctaaaaagcattattttacccattgtgccatttttgagcttgccatgccacggtgtaatcggtgccggccggcactcggagaatgttgtcctccacgtccacgtggatcatcggtttgtctggtgccacaacgcccaattttgtgtcaaagtctttgggttgcgacggcggtccttcaatctgcaatggataaatttggctatcacaaccactgctttggtatatccaattaaggtataaaattttttattttaacgaaatactaaaacgattagaatttgagaaaaaaaattcaagctcattttgttctcccccgcgggggagatgcgccgttcccgtagttaagtgcaataacgggccaacgctcggtcgagcgggagcaagcccccgacaacgaccattttccaaaaattggttaatctcttggaccccggtgggggtcgttacggagattaagccgtaaagaactgtaactacactttgatcttagccaaaaggccgagaagcgatgccggaacagcaaaatggtacgtgaaaggggaaaagaacgaaacgaaaatatatggggagcattttcctggtcaatggtgtgcagagatacgcatgaagtgaggaaaaatagtgtgcgaaatgtgaggaaaagaaacgagagaggaaaggtgagagagtgtgtggttagagagtctgcctaagtaacagaaaaaaaatgggagaggattgtcccattcttctatgaccaacccttttctattgtgagcgtaaaatgttatgtttctctcttttcttccttttctcgtgtcttctcatttggttttttaaaagtcaattttttttctgggtaacccccctttggcttttttctcgtcacaatttcgagactctcttttatttacaataatttaatcccgagaatagattgatcttcaaagccaaaactgagatttggtttcaagcttggggcagtgatggctttgaatggttctattaatccccgtgagcttaccacgccaattgggatgactcgcacgtggtattttgtctccggctcgaaattctcgccgtccaaaaacacattcatttcttttgttgtgtccgcgcccgggggaattgaccaagtcatctattaaaaaaaacgttttttagctattttggcacaatttatgatttttggactcaatttaactccgccgaatattttatcatcaattcaaatcaactttgattgattaattatcagtgataaattgactttcccaattgatcagttctttctccatcagtcaattttcattagaattcttaaaatcaatgctcttctctttggcttataatgagtcaacaattcacccctaattgcgatggccaaactgatcaaatttagctttaatgggttctaagctaaatatcctctccccctgatcactcttctctgatccctttttcattcccctcttctccaattcttttctccctcccccgatcacttctctctgatcacctcattccattgggcatcctccaacgacgggtcgcctttggtgtagtgtattctgtacgtctgcaccttcttgccgacctcctccggatcgtcagacggcaaaaattggaccatcacagtgttgttgtcatgcaccatcaccggcatcactgaacagagagtgccaacaaatcatttgctcctcccagtcaattgggcaatttactctcgagaaagcataattaacgaccttcgggcgcctttggtgccaatggcaatgtgcgtgccatcaccggatctgacagtacacccgggccacggtcggagaccgcttgaagccgtatggtataaatggtctaaacagacaatggcattcaatgagtgggataattaaagaaaggtctcttccgatcaacagtacccacttttggtctcaattctgtcagtcggtgtctgttcacgtcggcgcccacgcgaatttgttgccaagcgtccgacggcggctccaattgtccgtccgccagttcggcataatgaataatgtagccgaccagctgaatggtcaaagcaaatcacaaatgcttgatcgggactcaacatttaataaattgtacgagagtcaagagcggaattacaatcacaagtggaccgtctttcaaagatttcacctcctttacccaagaatttgttggattacagaaatctcttgctttatgaaataatatcgagactgaaatctcccgttagtcgagaattggtggttttggcttccaagactctcgaccatcacccgtcattgctaatttgtctgcccccacctttccgtttggttcgtccggcgctgtccactcgacgtttagcacttggtcgggcatcggcagcaccaccaattcgttgggcggtgtgccggggccgaggacgcgcaactgaattttgtaatttcgaaatcagactaaaaagttaaaatactaatagaatttccatgattttgttgttattttactataaacaacaaagtccaagctgttattgttcacctccagcaccagctgcgctttccccgcattgttttccgcgtgacacgtcgcctaatgaggggcggtgctttttgtaattagcaattgataaaattaattaattaccgttgtatctttgcgcaatttgcgcaacaaaaggtgcgcgccgcccggctgccgttcctcgtcggtgcccaaagtccaccaaagggtgggcggcggaatgccaccggtggcatcgcaatggacctaatatgatcacttatcacttcaatggtgcctaaacgcctttttctgaaacccggccggcttccgatcaatcctaattcatcgactgatcacttttgtgtcagttccctaaccaattgaatcgatcgactgccaatcacgtttcttttcctccaaatcgcaccgaatagtcatctaatggttgcacttcggccgggttgtccgccggcacaatggccactgtcggtggcgtttcgcctgtgccggtggtaaagcgtgccaccgcggaaggcggcccctcgttcatgtcgtttgctgcggtcacacgaagccgatattcacgttgcgcgagaatgttgtacgtctcacggtccaacaccacctgaaaaatccgattttgtgccaatctgttgcccctttaattggcctaattagtaaatgattaatccatgattggatatcccatttctatcaggaaccattaggtttcgtcgaattgggccaactcagcgcccgaggactgagtcaggcaaatgccagtcatcctcctcgcccgtgatcacctgtccgcctccgtccgcccgcaatggcactgtgagccgagtccaccgcttgtaactgtcgtcatcggccgcttcgtcgtccaacgcgaagtacaccgtgtaatggtgcagcggaccgttgggctgtgttggcg

SEQ ID NO: 596 - DNA, 2305 bp, Heterodera glycines
tgacgcggttgtccccatccacctcagcggacacgtcgcgcggggcaccgcccggcttcagcacctgagcaccgggacaattggcaaatgatcagaaagaataacgagggcatttgccaatttggcaaaagaatggcattttccaaaagtgaatgaaagttataaagaaatggttaggaaaagggaggacaaagtcaaacgttggttcgaaataagagtctagacttttttgtggccatagatcccaaattggaggccaagtcatagttccgagccttgagcccaagtcacagtctcaatttttcaagatttgtctttttatccattattccctgcggttatcatccctccctaattacccccactgtcaaattcatttttgtgtcatattacgacacagtcggccaagcacaacatgcctggaacagctgttccgcctggacttggccttggtcattgcgcgcttcgcacaacagtctccgctttgtattcgtccgcgtctccgtctccgcgctcacatagcgatgggcttcgccattcgagtccggctccgtgcttagttggaccggcccttcgcccggctcagcgctggctgcctcaaatggcacccaggagaaggagaccagcggcttcggtcgtccgaccgccacgcattggaagcgaatggggccgcccggctccaccagtgtgccctccggcgcaacggagggcggcggagacagcacgcggattgtgaccgcgagcggaatgtgccgtaggccggtgaccacctcgtagctgggcgagatgatgccgggcccggccgagccaatggcttgcacacggaacaccttcagagggaggggaggggaaaggtttgacaaatgtacggataaagggggagggattattgagtgatcagtcccattgttgatcagcttgagcattgattaatcggtttctgtgatcagtatcactgtcacgcaatcaatttaaagtttttgacaaaccgatttaaattgccactgatagtctaatgagcaatccttggcttattggtgataaactaattaacccaatttcgataatttccgaactggttattgataaatttatttgatcattaattatatcattgattaacccctaaggaaattgttggctttaaacttacgtaaggcgtctgctcctgctggtcactgatcagcacattgtccaactcggcgcccacagttttttgggactgaaatattgtaaattttttcaattagaaaatcaagcggacaattcagtcccacccaatcggccaaatcagcttccgcatctttgttccagtagatcacgtaattgatcacatcgccgttggggaccagcggaggcagccaattaacactgatcggggacaggaaaatggggtgatgaaaattgctattttgggtctcaaatggcccaacctgaacccgtcttggaccgggctggaactgatctgggacggtggcgagccggggcccaaaatacgcacttccaactccttttcagcagtgcctttctcattgattgcctagagaatgagagaggaaaacgaatttgaaatctctgaccgatgaagcaattatggcagggggaattacggtaaagggaattactgtggaatgggaccggtgagggaattactgttggggcaatacggtagatcaggcggaacagcagcagtatatacggtaatcattttttgagtggaaacttctcgagaccaatgaacgagtcagtcccgtgcgttgttttttggcactctctttgctcacctggcacttcagcgtgccggaccgcgtggtggactggaacaacaggcgttgccgcgtgcgcactttctcgtccagcgctgtgctgtcgataatccgcatttcgtcctgtccgtccgccaccggtcgtccgtcccaccaccacaaaattcgtggccgtggcacgccgtccgcgtcacagaacacttccatttcgtccggacttggccgacgctccaggcgctgctcaggcgacatggacacttgtggcacacgcggggcgagccaagtgcggacctaagggaagatgatcaactgatcggagaaaatgaggagcaaacttatcagaaggatggataaagtgatcaaattgaaacaaaaggaaaggtaaaaaggtgccaaaaaatgccaagaaatattcaaatgaatcaaataaatgaggaacggtaatagatttcaaaacaactgatcagattggttcaaaatgacagataaaatccaattacaaagcgtgaaaggcagactgaacaggccaggtccgttca

SEQ ID NO: 597 - DNA, 879 bp, Heterodera glycines
ggggccatttgggcttcaattatcggttaaaaaatatggtcccccgtttaccaattttttttggttagagagattccctttttatacctctcacacccccgcccccattctcggcttacattacgctgagccaagacaccaccactgccgccgccgtccacatttggcaaagctccatccacgggcgtgccatgagacgccgaattgaccgccttaaacccaatgatttaaaagacaaaattaattttgttttccgaaaattattcaaatttttttgccaaaaatttcagaaaatgccaaaaatatatttaacagagtgccaaaatgacttttattttaacgagtcccccccccccccaatttgaactcaccagcatttgtcgtccattctccgtgccagttggtcgctgaaccgtctgagcatgctgcggttgcggtgccgtactgtttccgtcttcagtgccgccgatcaacagcagctccaagtcgttgtaattgttgtgttgctgcggttgccgagaacggcttgatacggcgcgcacggttgaagaagtgtcgccgcccacaaaaatgttggcgctgttgctgccgccgccgccgctgctgttctcgtgcagccgcttccgaccggtccgggatgggggcggttttcgtccaccgttattgctgccaccgccattgttactgttgttgttgtggttgtccatattgttggtcgacgcactttttgctgttgatgaacaaatcgggttgaagtgaactgcttaaaaatgtgggaaataaataatttaatatttatttaaaatgtgtaaaaaattgaaggcaaatgaatgaatgatcagaggggatggaacagaacggggttggggaggggggggg

SEQ ID NO: 598 - DNA, 8601 bp, Heterodera glycines
catggaagttgacccgacaccttcaacatcagccgcaagcagcagtggacttataaacacgctgatggtcatcagcatgttcgcgctgatatccttcagccaacagcagcggcaccgttacgcattcatcgagcctcattgagccaaaatgcacaaagattccttcaaatggtttccgcccactacagcacactcacaaccgcaccgccatttgaatcgacgagcactttgagcaccgcagtcccatcagtaacttcgtcatggtacagcacaataactcgaactgaaacgatgacaaccacgaagacaaatccatggacaacaacaacatgggcaccaatgacgaccaccaagcaaagatggactccaacaatgtcaaacagcgcatcaacttggacgacaagacgaacccgaatccaatacgtcacgaaagcaagaagccaacaaacggatgcaacgacacctcccaacacaattaaatcggcaaaatcagcgaaaagagacttgggaacgaatcgtgacggcgcggacgttttctggtgttccgacagaggcagcacgatctgggagctcaagggccccgagaattcaccattctgtcgtcctccaccatcactcaccgcggaatggcacaatctcgcaattgaactctacgccaaaagcatcaggccagagcagattgattccgcgtggcattgctccgtcaaacgaactacggagaattattataccaatttgttgggcgacaagtttgtgaccatcgtaaaagaattcccaccggtcaacaagcgcatctgcaagcaaatggcactgcaccaggaatgcccatacgccaagtccgaaatgatcaaccacgagggacagctgtggtcaactaatgacgaactgaacgtcaatttcccaggacccatttccggactcttcaagggtgaacagacaagcacagctacgaactgttttgtgcaaccagcaaccatattcgtcaaacggcagactctacaaatgctttcgccagtccaccaagtccaaaactgtcaatactctgcggaattctgtcagttgccagacaacacgactctgatatggaaatcaacgtgctctggagatgaatgcaaaatgtgcgactacgatcgagcggaaatcatcagcggaaaatttaccgcagcttatggagaaacagtagccacgtggatatccgacgatcaccagaaggccttgacattcgccaaaaaggctcccgaactcatcgcctgcgacggcgtacgcatcgtcctatctgaacagaactttgggattgccaaagatcaatacgacgacataacttcatccgttgatcttccacgcatggcaactcgacaatgagtctgacgcgacacgcttcccgcacatcaacgaattcatcaactcggagcagttcaaggacaagctggaacagcacattacggcaaggactgaagctttgggcgcgttgaagggcggaatagaaggattcaccatgcgctggctaaaaggcctgatcgacgaagcaatcacatggtggattcgagtcgcctgcgtttattcaaccttcctcatgctgcgcgacattgtactcccatgcactctggcgtatttgctcaatcctaccgagtgactcttctcagcctcgttggagtacgcccgcagtcgacattccgacccaccgttagcaaaccactcgggatcgaagagggaatgccgctgcgtgaactgccacgaacccccaaaccaccagcgcgcagggcagagcaccgatccatgtcaccaatcaaattggacatgattgccagaacggctcggtaccaacaaccacgaacacagtgccatctcgacctcacagaagactcgccctttgggaggccgagacgaaaagaattctgacgggccccatcctttttcgcgccggaatgtcggaattttttattcctatcgccgatcaatgatcggcggaattaagagggaggaggcccttcaccaatcccccgtccgccgcgcgacatgttttcgccgttccattcctctatcccccatttcccttcaaattgtcaattgtttttgtgtgttcctcccccgccccgcgcacaaattaatgaccaatttgtcaaaccgcaacttttcgccgccgtccccaattcggcgaatgagactccaaagaacgatgaacccccaatttcccgttttcctcccaatttgttcattcgttcatttttgtgccctctttttcaattcatgcccaattttcggcccattttcgttctgctcaatttcgccactttttgttcaattttgctcgtatttaatgcgacaaatccccaccaattcctacaatcagaagcaccagcaaaggcaagcaatgcctcttccgtccctctctcagtccccctcatttcattgtccttttcccccggcccaattgtccgttccatttctgtcattcacccggtccccctcattcaatgatcagtgattggcccttcacttctatcccatttcgctgtgatttgccccaattgtgataatttccagacccccggttttggtctttgttctgtggcgccggtggtccccttcaattctttcccatcccggtccccaaatcatttgtgattaatcccccggtgatggcttttttcctgtgatcaatttgtgataatttcgttcaccatttcaaatatttggtttaattacccaagttcgaggtcatttcccggaataaattttttattcattctgtgtctcgtccctgcctgcccctgaaccccgcaccgtggaattcatttggcccgaccccagagcaagtcgggacaaattggcgctcctgggtggattggctgtgaaccacggactgaaatcgacggatcccggtgacaaagggggaagggaaaagcaaattagagagcctagacaagaccctctgaggcttgtctagtgttcatagtttcgtgtagttattgtcctccgaggcataacttcacgagggacgtagcggacttagtgtttaccctctgaggaagcacttcgtccgaacagagggttggaaggtgttgtgtagtggacgaagtacttgccctccgaggaatacttcgtacaaaagggtgttcaagcgcgcacaaggccattgacaaataaggaaaaaaggcaaactaacagtcctccgaggctttagtttagccataaggcaaaaggcaaactaacagtcctccgaggctttagtttagccataaggcaaaaggcaaactaacagtcctccgaggctttagtttagccataaggcaaaaggcaaacaccttgtcctccgaggcaggtgtttagtcacaaaaggtccaggaccaaggccagactgatctcggaaaaagacacaaaacaacaagtgcaccacaacacacacacacgcacaaccaaactgcacgcaatgtctgggccaatacaaaaagggatcatcaatgcactcaaaactctggacaatgccaaaagcgccacctcactccttcaacaccccgacccggacctgtcaaactgggaaaatgccatcaacttggaggctcaatttgatcgcgtcgtcaaggaaatccgtacaacggaaatgcagatggacagtctacgagacttatccaacgcttggattgaacttctcgcccgcctgaccggagacgacaaagacaacgacgaaaaagaatacatcaaattcgacaaaaatgagaaaatcgccgaacgatacgacgcagcatcaaccaaacttcgggatttgcgagatctcgaagcaacactcagtgccgcagccaaactgcacagaggcagagccgacagggaagcaaaggcggatcaattggccaatccgcagcaacaaccgcccatgccaccagcaatggcagcaccaatgacaatgccaacattcacagcaccgctctaccaattccagccaattcaactggataaatttttcggccaaaagcgaaaatggcccgaattctacgaatccttcaaatcggcaatcggcagtcaatcaatcagtaaagcgcagaagctgaacttactccgcaatctactgggcggagaagcgcgagaactcatagcgggcttccgactggaagacgcaaactacgagacggtccttcagctgttaaaggacacgtacggagctccggaggaacacatcagaagtcttcacttcgaactggccaatctcaagccgtgccgaagcctccgtgagaccaaagactttctgcttcaacttgagcggcttacaagggagctgaacaatgccggagaggacatcgaaggtcctcaagtgttcacttccactgctgctgctgctgctgcccaaatttgacaccggcggatctctgctgtcgcgcatcggcggcgctccgctgacgtgctgttgatggtcggagcgattggtgctgctgctgtcgtgatcagactgatcggtgaacgagggccggcctcgcccaatttgacgccaggcattacactataaatgcaaaaagccatttttgcgcatgtccctattttccaattttgtgaaagcccttccaatataatggcaccatttctctcccccaaagctctagcgcttctcattttctacaagcccccccccccccggccttaatcacatcaaaacacacacacacacacacaaagaaaaatgaataaatttactgaattttgaaatataaaaatgaataagttctattaaaaatggcagaaaaaatatataaaaattggcaacaatataaaatatgatagaaagaatggaatgaatgagaaatgatgaacaaaaaaaagcaaaaatgcgaaatgaagaaaaaattaaaatgttttttattttttaattaatttattttgagcggtcattgacgtcctccacccgaaatttggccctaacgactcattctttttccacttataaaatgggcagaacaaatggggcacactcgccgcaattttgcctcacgctcaaaacagcaagcatggaggaaatgtccacatgacgggcgcaccacccgttggccaccgccgaccatccattcttgacatatacaacacatcagatttctgcgccccgcttcgtcgtgctcgacaatgcccttgaccgatgagggcagcgtgctcatctcaaatgcggtcccgatcatccagacgcggtcggcggcagccagcgggtggttgcccatcatcaccacttcgttggctgcccctcgacgagcccttgcgcaatttggtcttcaatcaacagcatctcgtcgtcgtagaaatgctggtcttcgtccgcaagcggctgttgttgcgccacgcccagcgcctcttcttcggcatccgactcaatggtgatgacgttgtggggcgggcgcggtgacaacgtgttgcgcccgcgtgaagagcggggcgtcgagagtcggcgaccctggcgcggctgggcattgagttgacgaagacggcgacggtcgcgcgaacggctctcgtcccgagcaaccgccgcagcgtttgtattcatttggcgaacaattgccgaaatggagcgttgtgcggtgattgaacaaacacggacgggaggcggcgaagagcgaggctgctgctgcatgttgtggcgcgcgtgggcatttgttgatgatgacgatggaccaggagtgggcgggcgcgttgcggaaagccatggctaaaaaatttggaatcatttttttaaatttttgtaccgaaaaatgcatgactttccgcaaaaaacacgcccgcagacactcaaatcccccccactatgtaacaacacaaaaacaacgacacaacaaaagaacaaacaacattgtattttcaaattcaatgaacaaatgtatgtgtgcatttatttgtgtgtgtatatgtgtatgtgtatgatgatggtatgcgagcgcgttttttctttctttgctttttctttctgtttttgtctttcttttctttctttttcttcacttcctcaccgttgacgaaacgccggtctcggttcgcggcgcaacagtgcccgcagatgtcaatgcaaaattcgctgccggtcccccgtcgctgccgccactcccgcggatttgttcgtcctgctgctcctcgccgtcataatcgtcatcgctttgcatgatcaggcggtgctgttcgcttcctgctaaaagcgggggtggggaatgatcagatgatcatttttgcggggtggggaatcgcttcacataccatttgcactcatgccggactgctgatcagtttgatgaggtgccgccatcacattgctgccgccaccgccaaacaagccgtttccgccctgctggcttatcgagccgctgatgacaccgcttggaatggaaatggcattgctgttgctgtcatttgcttcaacaattattggcgtgtttgttgacggcggattgaacacttaaaatgggaaaaaattattattttttaaaatcaaaaatgtttttctcaaaaaaaaaaaaaatagggaaaaaattattatttttaaaaattaaaatgttttttttccacctgtagtggccaccgccgaagagctctgtccaacaatgcggtgccgcgactccgcattgtagagcagggtgaacggaaagctgcccttcgcattgtgaccttgggcgcgcactttgaggcgtgtgaattccacaatttgaccggcacaaatgttgctcatgcgcggcacacactcctgccagccgtgcatcgccatttcgtgctccaaatcgtggtggtcgaagatgatgcgcacgtcgtagccgctgatgtcggtttgggttgtgaacgggccggccaggacgacaaggcccacgacgcggctgaaaagcgggaaaatggaaatgctgaaaatgaaatttaaaaaagcactcacttcatcaccatatctggttgccactccaagtaaatccaccacaggtttgagaaaccattctcaccaattgccggcacaacagacgcaaattcgggctgaatgttgttgttaaccatcttctgccgctgccgtgcatgcacaagtgcaaccgcttcacgcacactgggcgggagcgcctttaaaagaaattaattttgaaattttaaatttttattgccacctcccttccctcaacattggcacaaaaattttaaaaaaacgccacctcaagtccgcctccaacagtaccgcgcaccatcgaaggcatcccaccaccgggacgggctgcacatgaaccgtcacccccgccggccgtcatcagagcggcaaaagtagcagcagactgcaaaaaataaaaaaataaaaaccattaaataagatatattgttcgaatttgtgccgttttacaatggcaaaaatcaagggccacccgaaatgctagtaaaagccctgctaccctttgacattcccccctccccaaaaaacgtacattgttcaaactccacatgggcacatttgcgcccgaaacagcaccattcggttgctgcacaatgccgccgccgttgtccaacgaatttgagacctgtgttttgaaaaaaacatgaaaaagcataaaataaatttcctcctccaactcccagcaaacttacggtcaatgccaatggctgttgtgcgggcagagcgacggcatgcaaagcaccggttgcatcagcaacaccaccgctgccgccattattgttcaaattacgcaccttaaaggattaaaaaatgtaaacaccatttttttgcactcaaataagaagggggacatttggtgcttcatttatcggttaaaaaatatggtcacccgtttaccaagtttttttggctagagagatcccattattatccctcacacacacccgcccccactcccggcttacattacgctgagccaagacaccaccactgccgccgccgtccacatttggcaaagctccatccacgggcgtgccatgagacgccgaattgaccgccttaaacccaatgatttaaaagacaaaattaattttgttttccgaaaattattcaaatttttttgccaaaaatttcagaaaatgccaaaaatatatttaacagagtgccaaaatgacttttattttaacgagtccccccccccaatttgaactcaccagcatttgtcgtccattctccgtgccagttggtcgctgaaccgtctgagcatgctgcggttgcggtgccgtactgtttccgtcttcagtgccgccgatcaacagcagctctaagtcgttgtaattgttgtgttgctgcggttgccgagaacggcttgatacggcgcgcacggttgaagaggtgtcgccgcccacaaaaatgttggcgctgttgctgccgccgccgccgctgctgttctcgtgcagccgcttccgaccggtccgggatgggggcggttttcgtccaccgttattgctgccaccgccattgttactgttgttgttgtggttgtccatattgttggtcgacgcactttttgctgttgatgaacaaatcgggttgaagtgaactgcttaaaaatgtgggaaataaataatttaatatttatttaaaatgtgtaaaaaattgaaggcaaatgaatgaatgatcagaggggatggaacagaacggggtggggaggggggggg

SEQ ID NO: 599 - DNA, 6429 bp, Heterodera glycines
  unsure (1)..(6429): unsure at all n locations
cggcacaattaatgagcaatgccgttaaaagcagtgacacccgagctctgctgatgacaacaatggccacgattttcaacccgtcgaggccatgccatagcatgatggcaaccatcttcattgatccgggaagccaccggtcattcatttcaaacacggcagccaaacaacttgaactgaccgtgctcagaacggaagaatgcttccttacgagctttggagaacgcgaaccaaagcgttacgtcagcgaccgagtcgcaatcggctttttatgtcccaacggggaccgactcattttcaacttgaacgcactcaagtttctgctcaacaatttgcctgtcctacaactgaacacattggacaagcagcagcttcaacagaagaagctttttccgccgcatgagtcacgacaaccggacgtcatgctcggaatggacgtctggcatgacttgcacgttcagccaattgaacaattgccgagtggatttacgatttgtcagtcgaaaattggcaaaatcatcagcggcactggacgaattgaactcagtcaaccgtcaaatgtgacattcgtccttacggtcacagacgaaaatgtcttcacagcggaagaagacttgaaggccaacgaagaactcaacaagttctacggcctcaacatcattggcatggacgactcttcaacgctaatcgaccgggatgaagtgatgaaaaatttcaaggaaaacttgtcgttcgtcaacaacaaataccaaatcgcattgccatggaacgacagagtggcacaattgccaacgaattatcatcaagcaaaggcaaggctcataagcctcatcagaaagcttcggacaataaacttggtcgacgaataccaagcaattctggatgaacaacagcagaattccatcatcgaactggtcaattctgatcattcttgtggtccagtccactacctgccacacagggcagtcatccgaaccgacaaatccacaaccaaaatccgcatcgtgatggatgcctctgcaaaacccaaatccactccgtcggcaccatcactcaacgaatgcctgcacacaggcccgctacttttgaaagacctgaccggcattctccttcggttcagacgcatggaaaaagtcatccttgctgacattgaaaaggcattcctacaattgggcgtcagagaacaagaccgcgatgccacacgattcctttggcttgctaacccaaaggaagcaaatctcgaacagctgaaacgagaagacttccgcgttttccgattttgccgagtcagtttcggattaaccgtgtcaccatttctgctcaatgccacaatcagggagcacctggcacttcacgacacggatgttgcacaacgcatcagtgacaatctttatgtggacaacatcatggtggaaatcaaaccaagtgaaaacagcaatcaactggtcacagaagcaaaaatcatttttgaatcagccggaatgcggatccgcgaatttttcgggagtcacatcgacgagctaaaagagcttgactcatccgaattggcccaagacctcgaaaacacaaaggtgttaggcatcgaatggaagccaagacacgatcaactgatcttcaaaatgccaatcttcagcagtccaaccacaaaacggaagattctgtcacacatcgcaaaagtgtatgacccacttggacttatttctccagcactgttgcccgccaagcattttttgcaaatcgtccaaaatttgaatttcaaatgggacgatcctctgccggaaaaaatggcacttgactggatcaaactaatgcatgcgtgggacggattcggcttcaacttcagggtggaattccctcgtcacatcgcgacaagtcccaacgaagaatttcattgcttctgcgatgccagcaaaacgggactcggtgtcgcgctttatcagctcgcggacagttcttacggaaaaaaggaaagcaacttgatttttggcaaaagccttgtcaaaccgctcaaagtggccgaccacgattcaacaattcctaaattggaactgcaagcgttaactttgggagtcaaagtgacaaagttcgtccaaactcaactcaacttcgatgaccaacaagtcatactttggacggacagccaatgctctatcgaacgtctcaaggaggaacggaaatacgacagattcgtcaacaatcggctgaagaaaatcagagaagcacgtttcaaagtcagacacattcgaacggatgaaaatccggcagacatcgcttcacgtggaacagatccacagagtctccaatcatcattgctttggcgatttggcccagtgtggctaaccaaagttagccaatggccagaatcaaacgtcacttacaaccccggcgaagaaataaaggaagtgacggaacctcccattgtcgaatggagtaatgccgtccaacagcgcgaagaattcgttcctgcgatccaatttgagcgcttctcaaattggaatcgtctcagagcaacagctgctcacgtcatccgattcacagtggccatgcttcaaaagagacaaaattccgagccgacgagcagtccgcttctcacacatggacacccattggaaaaagggccattaacagcaaaggaattggaaatggccgacgaatggattctgatcgaaactcaacggcaaaattggccctcagaatccgtcatcactaatttgaaactcttcaagacaaagcctctggaaacattgaagtgccaaggacggctaggaaatgccaacctgcccatccatagcaaaaatccgatatttttgccggctgaggcatggacaaccaaactcatcattgtccacaacgatcggattcacaatcattgtggaccgaggattcttctatccaaaattcgcgagaaattttggattccacgaggcagacaaacggtccaaaatgccctttactcaagtcgaattggatgtttggaatgcaaaagggaaaaactgaaaccatacgcttatcccgaggctcctaatttgccaaaggagcgagtcaacgagacacgaccctttaacaacaccggcattgactactttggtccactaaaagtgaagagaggactcgaaacggtgaaagtgtatgtcgcactttttacctgcctcaccatccgagcaatccacctggaagtggcagaagactattccgccgaagcctttctccgcgtgttccggagatttgccgcacgacgcggcgtaccaagagtcatcttgtccgaccaagggacaaatttcatcgctggagccaaggtcatcaaggaaaattggaccacagacttactcacactcgaagtgcaagaacagctggctcatcaaggaatcacatggaatttcaacacagcccatgcaccatggaaaggcggcacttgggaacgactgatcggcattactaaaaatgccttgaggagaagcattggacgcagacttctcactttcgatgaattcggcacgctcgtcgttgaaatcgaagcaattgtgaaccatcgtccgttgacttttgagtcagaccgcgaaccagacccggtactcagaccggtcaattttttgatcccgtacggatcaacggaaaccaattttccgtcaatggcaacggatccggaagatccagaatatacgccgaatcccaacaagctgaaaacgatgcttcagaaggctgattcaagactgaacagcttttgggaaatttggagatccgactatctcctttcactgcgtgaacgtgcaaaccaacggttaaacaacgaacgacaaactcctaacgaaggagacattgtgcttgtggaagaagaagcaaatccgcgatcagtctggagcttggcccgggtccttaaagtccaaataggacgggataacaaatcccgttctgcattaatttcccacaagggaaaagaaaaatggagagctgtaaatcagctctacaatttggaaattcaacccgaatttccagaaatccactccaccgctttcgtcatgagcaacttggacaacgacatcgacagcgtctctctcgccggcagtgaagatgaaatgccgcagccgaaaaataaattccgcattccgaaacgcaaacgggcatttcttcggccaatcccgcagcagcacagtcctcttcaaggaccgcgtcgcaaaagaagggagttacaagactccggattacgcaagctgttttgcgcaatatcagagccagaaggcgggagcaaggcaactactgaagctgtcaacgaaagccgcgccatggaaaaagcgccgcaaccgatccaaaaagaattcaacgaaaaaatggcgaagaaacagagagagaaggcacggataaaaacatcggatcgattaaagcaaaaactcgccgatttgtcaagtgtatctgcacaaacggaagcggaaaaagatgaacaacagaaggagagagaaatccacgatcagcagcgagctgaaaggcgaaatgaagtaaaagaagcattcgaaaaaccatcgcgcaaagaaagagaagaagcacgctcattttggagtgcgaagaaggccgaatcaatgaaagaaaaaacaaaaggccgaccaatcgaggacatgccaaaaaacaacgaagttttactcacgtactgtcaacggatttacggcaatgataattggcagtttctctggaaaaatggacgcacttccagggagcttcatcagctcgaaacgcaaggatggacacttcatgaccagaaaggaaaaatggtcgaaccatccgaattcctcggtggtactcgaccatccgtgaacgtccgattcaaagaaggccactacaccaatctgacaccggaagaaatggtcttccatggcccaccggttagtgagagcgaacctgaaccggaaatcgtagtcacggaggaagtatcgtcctcagagcttcaagaagaaaacgagcgacgagtccgagagagcgggacacactcccccaccgagcaccgcacgttccgagaaccggaagagttgcgcgattgaatgttaccgaacgagagctggccgaaaggagaacgatacgtcggttgataacgattttaaccgagatgttctggtgaacgacacgagagctgtgccggagtgcacgtatcggcgaaattgcttcgactcgcgaaaagagcgattgagatggattcgaagattgcgagagcaatttctctgatgaacgcgaatgcttttcgacttggtccagcgacttttaaatcttcgcggcgaaacggtcgtcctccacgaagaatacgtaatgccgtccaccttgacaccgaagcagttggctgagaaattttggaaagaacaattcgtcaccaaaaatcggcaactcgttaagcaagaatcgctcattgatctgctgaagcaatggagcacttcgtgtgatcactttggagcattaatgcagctgaaccaatttgagccaataaagctcaggccaatctcaatcaagggaaagaagcatcagaattcgagaattggctcgaaaacctcaacaaattcaccgcaaatgtcgcttctcgaacaaaggcagccatagcaaaccagccctacagcaaccacgaaatcatttgcgttggcgatctggcggcagaagaattggcgaacgcctcgaggactcaatggttcacgcactacgcctcggacaaacttcatctatcccctgggcccgatgtacagcacatcattttctgctacttggccaatgaaagctacttagcaaaggcatcactccgtacgtccgagaactcgcaaagacggacattcaactaaccatagtgttagcaaaaacggacgacaaatcctggctcaaaaacaagaatgaatgctaccagttggctaaagcggccaaggcaggctttttcgtctaccaccggcgaaccggtgaatcaagacaattaaccaacatgatcttggcgcgagaagaagacgaaatcatggaagttgatccgacaccttcaacatcagccgcaagcagcagtggacttatgtccagaaacacaataaacacgctgatggtcatcagcatgttcgcgctgatgttccttcagccaacagcagcggcaccgttacgcattcatcgagcctcattaagccaaaatgcacaaagattcctccaaatggtatctgcacactacagcatactcacaactgcaccgccgtctgaattaacaatcactttgagcaccgcactcccaccagtaacttcgtgtggtacagcacaagcacaataactcgaagtgaaatgatgaccaccacgaagacaaatccatggacaacgacaacatgggcaccgatgaccactgccnaacacagatggactccaacgatgtcaaccagcgcatncactcgaacgacaaacgaacccgaatccatacgtcacaaagaaagaagc

SEQ ID NO: 600 - DNA, 4828 bp, Heterodera glycines
ttggtgcttggggatgacggaaggtcaattggactcctcccgggggtcttttcttttgtcctttttgagtgtacgacggaggtcaaaaggcgtgaacgaatacagatacaaattcatccgacaaataattattcggacttatttgttagggaaaagggcaaaataaaattgaacaatcggaggaacggcaaaagcaaatcagccaaaagggagtaaatcagcggataaattaatcaacctcaaccgaacaggaaaacatgaattaataaagaaatgaaaatgagaggaaacaacagccaaaaattgattatattaaattgtcattgcctttttaaacgctttttcaaaaaaaaaaaataataatttaaatattaaaggaacgaagctcccttggcaaatgtctctgctccctcttttctcaccattcttcacccaatggcatataaatttcccaacccaaacatctgtaggacctctgccgttgtaaattggtcataaaaaccattgacggattagttggttttattagaatttggcgacttggacttttaaaaatcagttgttttgtaagtagaagagatttttttatgaaattgggcaagaaattaactgaatgcattactgaaagtgtatttacgtattaaaattaacaaaaatgaagcagcaacaatactttcttaaagcaaaaactcggcaatgagttctgtgactgtgctgattaagccatcccagtgtcatcgtcgtcgtcgtcctgccctttgggtgcccttggctttatgccgcccatcggtttggccatgattatctaaatagaatgaatggccattaattgacaaagcgatgctcccgcaaatgtttgtcacctgatcaatcttcagcacagaaatggccgcgttcgtcgccaattttaatgccaacgatttcccggagtaaaggtcgaaaatgcccgcttccatcgcgttgcacaactttccactgaccgcgtccactccctcccatttcgaccccttttggtgcgctgcgtgtaaatcggtgagtgtttcagttggctaaaattccttttaaacgatttgtcacttttaaaaaatgttcaccttaagccctgcattttcggccaattgttttggcaaaatgtccaaagcagtagcgtattttttgatcgcatattgtcgaagtcccgattccttctcgccaataatttcaatttggtggcttaattccacttcagttgcaccagcacccggcaacagctgaacaaacaaatgataatgtttcattcgagccatcaaataaagataaatcgaatatttaaatccatttacaaatatagaatgaagacccccccccccctctcgattaattaggcggaattggctcactttgttgtctcgagtcagcgctttgtaagtgttcaccgcgtcgtcgattgccctctcaatgtcatccaccaacgactgggaagacccacggacaacaattgtggcaactttcccaacttcgcttttcttatcgaaaaccacaacctataaatttgttatggtctcctcgaactttttgcccatctttccacctgagtgtcgccaatttccttaagaaacacttcgtcacaatggccaattgcttcttctgacggtgcacaaatgcgcgcctgcgcctgggcacccaaagttcggcaaagtcttcgcaaatcgaatttcgaagtcaatcttaaatcattgaatggcttccgaaaacttctatcgtcacaccttacggccataattccatatttgttcaaaaaatgcacgtaaaggtctccaaatttgccggcagcgaccacaacattaacgccgacatccgaaagacttttcacttgggcttccacttcggactcctctgtcctgctgaattgcaacaaatcatccgccgtgttcatcaaaatagtcccctaaaaggaatccgatgcttttaattaaatgcaaaataatttgtttttttttttcatttttgcccaaaagcgaacctttgtttcggtttgcgtaaggtcaaatggacacgcgaaaacgaccacacgcgcatttgacgcgcctttaacttcgccttcagcaccacggcgaaaaagcattccatttgtcacgtacgaactggccactccggcgccaagaattttgcagattcgaatgttatcgacattgaacgcagtggtattgttttttggcattatttgaactaaaacaacgagaaatggagatagaaaaattgtaatactttaaagtttattaaataagtattaatttaccacaagctttcgcaacaagatcagaaattaactcgtaatggtccgtttgttttgagataagcgacgatttgagataggatcgaactttgacaatgtcatataaatcctcagcagtggaaacaaccaatcccggcaagagctcctcgactttttgaagcgcgaattcgtaacccgacgcaatttctactgcggtgattccctgaaagcgatacaacttaaattgtttaattaatcagcagaaaataacaaaccatgtcaagcaattgcagtgcgtgctccagaaacgatgcagccaaaatgaccacagtgttagtgttgtcgccaatttgcttttcctgcatttgtgcagccatcaccaaaattcgggctgccggatgctgcacttcgagttcattgagaatcgaaacggcgtcgttggtgacgaaaagtttctccaaacgattgatcaccattttgttcatcccttagagagtcaattaaaacttttaaatgaatttaaataccatttggtccataagcagaacgcgtctgaagtgcaagttgcatgcaagcttcaatatttcttttcactgcttcttccaaccctttgaagtgctaggaataaacacgcctcatagttttgttagaaaatcaaaataacaaaccatggccccctccttcataaagcgggaataccctgactttggaattgaaagcgccatattcctcaataacaatacgaagcaaaaagttttatcctgaacaagcaaaaattagagaccggaatttccaaaaatgccgggccgggccgggctgatttttccagaatcaaccgggttccgggcccgcctctcaaaacccggtcaacccggttagcccggtcaacccgggtttccccaaaaatcgccgggccgggttgccgggcccgggaaaacccggtaccgggcccggcccggtccggtctctagcaaaaattatgatttattgaaacagaaaaaaacttcctttcaaatttaaacaagcaagcggagaatttcaacttgaaatgtacatgggcaaaaacgaaaagcctatttaaatttattttgctggtgatatgtctgtctagctcttctttaacttatttgttagagttaaagcaaaaagagagacaagaaaaagagatgaacgatggatggacggacggatgacttgagaaggagtccgccgaggtgacttaagctcaaacgaagcattggaggaacgagcaatggacggagaaaggaagcgaagagcaaaggcaaagcagcggttgtagggaaaatatgttttaactgggctatgctatgccttcctttctgtttattgaaggtacataaggaagggaaatgttgtgttaagaaacggaaagaggattacggggtgatggcgagggccgggcccctgggggaggggcgattggatattgtgggtgaagaggaagacccaattttctatttacctactttccttgctgttgcccacattctcacaaatataatttgcccttgagataaattttcccattgcctgtgcctgtcaatttgccttttgccatacataaatattattgactttcaattttaggttttcactttttcaatttttatcaattacaaagttggaagtgaatatgcctaaacaaaagcctaaaaatgatatcaacgaactcaagcaggaagtgtccatggatgagcataaaattccacttgaggaattgtttcgacgatttggaagctccaaggataaggtaactttaaatgacctagtcttttcaattgttactatttcattcaaatggttactgttgcttatgccagggattgaccaaagcgaaggcgaaggaggtgtacgaccgcgatggtcccaatgcgctttctcccccacgaacaaccccagaatggatcaaattctgcaaaaatttgtttggcggctttgctcttctgctttggattggtgctatcctctgttacattgcgtattctgtcgattgctttaccatggaacgaccaagcaaggacaatgtgagttcatgtccaatttagttttaaccaatacatttccagctttatctgggcattgtgctgatgtctgttgttatcatcactggctgcttccaatattttcaagagcgcaaaagttcgaagattatggaatcattcaaaaatttggtgcccacttacgcattggtcattcgtgatggggagaagacgcaaattccgtcgagtatgttggtggcaggcgacgtcgtggaagtgaagggaggcgaccgcgtgccagcggacattcgaattgtgtcggggcacggcttcaaagtggagtgagtgctgtgtttgtctaattgctaatggttttggtgcttttcacttgaagcaattcttcactgaccggagagtctgagcctcaatcgcgttcggcagagtgcacaaatgagaacccactcgagaccaaaaacattgcatttttctcgactaatgctgttgagggaaccgcgaccggagtggtcatttacactggggacagaacggtaaggcaacttgggaagtattgata

SEQ ID NO: 601 - DNA, 2265 bp, Heterodera glycines
  unsure (1)..(2265): unsure at all n locations
tttgtttaaggtcatgggacgcattgcacattggcttcggattttggatgccgggatgacgccaattgcacgtgaaattgagcattttatccatttgatcaccggcgttgctgtctttcttggcgttacctttttcttcattgcttttgtcctcggatatcattggctcactgctgttgtttttctcatcggaattatcgttgccaatgttccggaaggtatttttttaaattcattaaatccaatcattttaatattttttcaaataggtctgattgccactgtgacagtctgtttgactttgacggcaaaacgcatggcctcgaagaattgtttggtgaaaaatttggaggcagtggaaacacttgggtcaacttcgacgatttgctctgacaagacgggcactttgacccaaaatcgagtcatcatcattttccattgaattttttattcaaattccttcagatgaccgtcgctcacacttggttcgaccagcaaatcgaaacttgcgacaccactgagaatttcacgggcgacagacacaaggctcgcgagacggagacggcactgttgcgagtcgcctctttgtgcaacagggccgagttcaagcctggacaggtcggaatcggcgttaaacggaggccctggaattgtttgtttaggattcggttccgattctcaaaagggaatgcaccggcgatggttagacttttgccttatgattaaattaatcattgacaatattccgttccaattttagcttcggaagttgctctgctgaaattcacagaaataaccgttgggaatgttgttgaatatcgtcaaaagtatcactttaatagcatttttgtgtaacaatacaaattttagacatcgaaaaattgccgaaattccattcaattcgactaacaaataccaagtttttcttttattacatcgcataactctgtttatttgctttcagttgtccatccatgaaaccgacgacggccaccccggttatttggttgtgatgaaaggcgcacccgaacgcattttgcaacgctgcagtcacatgctgcttaaaggacaggtgggaaatggtaccgacggaacagattgacacatttttaattaaggatgtggagatgacccaccaaatgcgcgaagacttcgaacgtgcctatttggagttgggcggaatgggcgaaagagtgctcgggttttgcgactttcgcttggaccacgacaaatttcccaaggtttttggagtcttaaggttctcccattgctttttatgttttttagggatttgagttcgatgttgaaggccccaactttccgatcgaagggttccgttttgtcggtttgatttcaatgattgacccgcctcgtgctgctgttccggacgccgttgcgaagtgccgtagtgcaggcatcaaagtggtgatggtcaccggggatcatccgaccacggccaaagcaattgccaaatcggtgggcatcatttcggagggcatggaaactgtcgaagatatcgccgttcggaaagaaatttctgtggaccaagtcgacccgaggtcggtgttaacggaaaacggtttgagattcgaaattcagagaagccaaggcgattgtaatccatgggagtgatttgcgcgagatgtaaataattgacccataattgcaattcttccttttttgttttttaggaatgaggaccaattggccgaagtcatcaataaccacgatgaaattgtgttcgccaggacttcgccacagcaaaaactgatgatcgtcgagggatttcagcgtcagggacaaattgtggcagtcaccggcgacggagtgaacgattcgccggcactgaaaaaggctgacatcggagtggcaatgggtgggcaaaaagtcggagaacgtaatgaaataaatttgtaggaattgccgggtcggacgtgtcaaaacaagcggcggatatgattcttctggacgacaactttgctgtgatttattattataattatttgtttgttattttttaattctttgaacattcagtcaattgtgaccggcgtggaggaaggccgtctcattttcgataatttaaaaaagtccattgcttatacgatcagctctaacattccggaggttgtggtttttangtttcctaaaaacttccattttanagatcttacctttcctgatgtatgttctgttcggcattccacttccctctcgcactgtgaccattctttgcatcgatcttggcaccgacatggtcaaaat

SEQ ID NO: 602 - DNA, 3725 bp, Heterodera glycines
ttcattgacctacggacaaattggggatgattcaagcctcggctggtttctttacggtttgatgatcaaacttattgttagtttataacccccaatatttcagtacttttggataatggctgacaacggtttttttccaaaggacctttaccaattgcgtgcgcaatgggattctcgtgggattaacaatctcgtggacagttacggacaagaatgggtagatgattaatgatcaacaaaacttcctttttatccttatcatcaagataatttaagacttacacggaccgaaagattctcgaacacacttgtcaaaccgccttcttcgttagcattggtacgattttttgtgccaaatcaaaaatttaaagaattccttcaaaacgacaaaccgagctatctaattgtattccgtttaagtgattgtccaatgggccgaattggttatttcgaagactcgtcggaattccattgtccagcaaggcatgtccaattgggtgttgaacttcggcttggtctttgagactttgttggctgttttcctctgctactatccgggtttggacacaagtctccgtatgtatggacttcggtaaatcgctttttatcattttgtccacatttttatcacgtttcctaaggttctcttggtggttccctgcactgcccttcgctattctgattttcatttacgatgaaattaggcgctttttaatccgtcgtttccctggcggatgggtggagagagagacgtactactgaagaatgatgacggtttaatgtgaagaagttctgcaaaacataaaccaaagcgttttttcagatcaaatgtaattggtatgtgtgtatgttattgtataatttggctgttattctgtaaataaattgttgttcttttcatggtgttttgtttgtttggttctgtccattattacttttgcctttcttccgattagtcccccgtcgttcgttacgcctgcacattgcccccctgggatgactttcggtttcgcagtccctcctccgcccgtccgttcgcatcgttcagaagtcgcagcattccgttggccgtcggcgttggcactgcggcggaatgcgtcggtcgcttcggctgctcctccccgacgtgttcgttcagccagtaggtgttcacctcgcccttgcccttcaccttcacaatgcctctcttcgtcagtttgtaccgtcccacgcccatcagtttaagcgccgttggctcggacatttgaatttggtttggcgcagcgttgctttgcatgcgcgaggcgaagttcacctgcgaatggcggcacatacacttacaattaaccaaccatcagttttggatactgtcatcataccgtatctccgaacagacagtagcgcggggctttgatcccgatcactccggctgcgattgggccgcaatggtagccaattcggagttgcaacttccactcgggaaagttggccgccttatatgtgtaggaagcttctcggaattccagcgccacttcactgatttcgaacacgtgacggttgtcattttcattgggcacgccggaggctaccatataagtctaaagaagggggaatggtcacggaattcgggaggacacaatcaatcaatgatccccccccccccctttttttttgctgatcagtccatccgcgggtcatcgctcacctctcccgtcgtctccactttgtaagcgtcgtggttgcggatgatgttgttgaaagtggagaacacttggttgagaaagtcgaccacttgggtcggtgggaatttgctgagcactgttgagaagtcgacctgatcagaaggaactgatttgtgtgctttgtgttggtcggcctcaccaactgacagaacagcaccgtggccgagtcgtacgagcgcggctccaccgactgttgctccttcacaaatgccattcggcggtgcctttgtcccttccgtccctccccccccccccaaccacacgcaccttcaactgtttggcaatcgacgggggtaacatttcatgcagcagccgttccgtctcttctcgtgccaccgcgagttccgcgtttcgttgcgccaccaaattttccaaattcagcgcgtgcttttcgttcatccgtcgcatttgatcgattaaattgccctgcgatgcctaaattgtcagcagttttcatctttgagttcgttctgtctttcctcccccaccccctctcatttttttgcctggaacacgttggaaaacacttgggccaaatgacggagtttgggcctcagttcggggttcctctgccagcactgttccatcgcgtccactaactgtcaaaaaacaatcatttcgccttttgccgtttttctctccaattgccggcttctcttctggcgaagtgttctccaggattggcttcagacttcttcgcttcacctcctcaatgatctctttcgggctcaaagttgtgcgatcaaacggggcgagacgaaacaaaatgtggtaaagagccatgccaaaactgaaagtggcatttaattgggcattaaataaatgaatttggacctgtacacgtcgcctaagggcgtgccgcggggatattccctgccataggcaatttcactaagattttccggagcgatggttaaataagctgaaaggaaagcatcgttttgagcagtgaaatgctttcaaacttgtcattggaataatctcgactaatttgagctgttcgcgttgaatacagcagtttagcaaattgcaaatgccaaaattggtcaatttgagcacccaattggagtcgatcagcacattttgcaggttcagcaggccgtggtatccgacggaggatttgtgcaaatattggatgccctttttgtgaaggaggggagggggagaaagaatcatcagcaaattgaaactttgagaatgtcgcggagaaaggcagagcggaaagtgttgtccaattggaagtcaaagtcgttgatgtaatcctagcaaataattgagaagcttttccgtgccgtcctcactctctctctctcttctctcgccccctctctttctcttctctctctctcacttcctctctctctcgctcacctcgagagtgccgcgttcgaccagcgaatggcacatgtaaaagcggtccccttcgttgtaggagatgcccatgaatgtggtctatcaatgacaattattataaagagccaatgaattggtccgatttttaaattctcttttatttgaccaaattgtcgtggtttagccgcttcagttcgaaaatgaaatgcaggtccgtcttttcccaacttatgcttttcatctgccgcaacacaatgaattcggctttgttcgtgccaatcaaagcgtacgcttgcaattgtcgccgtttgctccacgcgccttcttggccaagtccggtgccctttccctttgactgaaaccgttttattttacgtaaatgtgccataatttacgatgataacgacctattgggtcctttaattatccttaatttgtcatgccgagtggaaatggatgaatgaaatgacctgtttgttctcgatgactttcaactgatttcgcgtaattcgccaatgcattcggaaaacatccaatcgctttctgcaattaattaattacccccaataattatccttcaaaaccactttctctgcactccgtagccaattactgccaaaaggattagcaaagcgatggctaccgccgctg

SEQ ID NO: 603 - DNA, 4512 bp, Heterodera glycines
  unsure (1)..(4512): unsure at all n locations
aatgggacagtgccaaaaggtgggggagtgagaggccgaagtaccgtcgaaggtttgtctccgcatattcgaagagaaaagcggttgagaggggtcggaggtccacgaggagggcgaggagagtgccgatgcggcacagaaggcgaagcagccgttgtaagcggacagagcggggagaaggaagttctgcaatgggatttcccctcggtaggcaatgcgcggcaatgtcagtgggccctttgcccaccgtgttaaagccacgcgtgccgtaggcggacgccaatttttgttgttgctgctctcgctgggagtcgaatggcgacatcacaaccacactcccagcggcaatttgcattctgagcagcgaactctgctgactgtccgtgccattgatgcacgcctcgagttgcactgggcacacgagcagaaccatatacgactgtgagccgaggtcgtcaatttggagggaattcagcatggagccaaggcggacgaaagtgccgtcgatgaggaccactgaatgccaacactttctatagtgggcggtggtgatgctcgagagtgcgactcccgagtctccgctattgtcgttttttgtctcagtctcgagttcgatgcaaaattcatactttctctgcgttagtttacctttggtggcggaacggagtcgaagccgtgcctttgtccaactgtccacgctgttctggtcgacttcgacagtgtccgtcacattcagtctttgctggattccgttaaagcgttccgcaaatacttgtgacaaactcttccacaaaggcggcttttcaatgtccgtattgatcggaccgaccaaaacaatctgagcggaagaattcgattaaacaaatatggcctaaaacatttaacttcgctttggttcatcgcgccaatgaattgggccaccgcttgggccattccgtacacatttgtgtctgtgacttgtacgacagtggggaaaagctctcgacgaagtaaagcaatgctggtgccgacgcggttaattaccggcactaatgagttaaaatattttcaacaattagacagatggttttgcctcgccagaaacgggcaagtcggcccaactcgcgcgcctcctccgcacagcgactgcccacaaaagcttgcacattttggtagaaatacaactcgccaacgtggacagtgccaaaggaggcgcttttgttttggttttcactgatggacgaaaagtcggacaaagtgccacagccgcaagagacattcatcattctgtggggggggggggtgaacagtccgagggctgtcgttgtttctcctccgttggtttgccttcgcattgtttccccccccccccccctaattttttgccatttattttttcaatttttccaaatattcactcactgaatctcttccgtcgtgcattttccctgcgcgcgcgcgtcggtcaaagcctggagacagagggcgacgagcaaagggtcagattctacgaggccgactttgagcaaggacagaacataagggaggagaaggagaagttggagcagtaccacggaaaagggcatttggtgaggaaaaattcaacgggagaatggacaattggggggggggggggggcttgagcgcggaaaaggtaaaataagtcggaaaagtgggggggggggattacagcacaattcgcggttaattgccacgcagggggacggacgaaagggtgccaattagtgagctcatttgcgcaaaagccatctccacaatggcaaacaatgcttcatcaaagtttattttgcattggcttcattttttggttttaaatcactttttcactgattccattcacaaaatcattattttatttaactgcccttttctgttttattttttcccctttttcatttcgacatttttgccactttttcactcgttaatttcttttcgttgctaggcaaaaattgtgccattttcatttccatttatcgttgaatacaattgttcttttcaatgcgctttgcttctgattaatgcccgtgtttggactcgttttgttctcgtcgttaacaaaagtgcttttgccactttttccctgtttttctgtgtccgttgccgcttttcctctcatttttaaatcagtgacttcgtcccattgttcgttctgctgctgcttttggcaatgattggcctttgattcttccgatttccctcccaaaatgccattatcccctgtcctcattctcttccgcttccttccgcttttccttctcctcctccttcccccagccgttgttccgcttcagtgttttcaaactcagcattcgctttccgcttctctgcagggcaatgccctcagctgtccctcctcctccctctcttgcaccaaatccaccgatttcaacatgcaaatcatcgcgcgcacctgtcaaagcacaaattgcacggtgagaaactaaaaatacaaaaagaaataattaatttctttgcggttggccattgattgattaataattacgtttagttccccaacggcactctctcctccgtgccgttgtgcttcaattcgtcctcaaatacccagtcgtattgctgctgctacggcgacagttgcaacggaatggcgaaggaacacaaaaatggactaatgaccttcttattgttgttcttttgcattttaatgggagcgatggcaatgaaaaacaaaatttgaaggaaaaaggcaaatattaacagagataaaaatgataatagacaattcaaatcagtagggaaaagtaaaactgatcagaaagagaaatgtacatgatcaatcgatccaaactagaattgaatggtcactgatcaaaataaaaatcaccgataagtcttcaaatgaaaatgagctaaattagtaacgacagaaaaggaccgaaaaaagcaaattaattggtggtgccctaatattgtcgtgttatacttcaaccatatatcgggtgctttcatgctcttatctcattttggcactcaataacaagtaatggctctcaagtaataccagacatctcgcccccagcggatggcgaagtgngcgaaggtggaacactttcggaattggacatttgcagactttccaaaatatcattaaaaggaagcaaaagaaaatcaaaaaaataaattatagaagaataacagcagtgaaaggaatgaagaaaaacagtgtttatcattctgcaggcaacaaaatcaacaaaagaacgccgcatccctgtgaagaatcaacgttcacaaattttgcggaattattccatccctctgagccaagcgcagaatgcaatcatccgactcgccctgcgaaaccgaatttttttaatataaatcccttccaattacgaacgactgaccatgaagcgcaactttccacaaatggcgtacttcgtcgttttgccggtaatcattcgcccagtcgcctggtccacctcgacaacctccaattgaatagaagcgtggtctttagccgaaatgattcgagaagacgacgaactgacaagaaagaaaaataaaagtaaacaaaagattcaagaaagcatttaccatttcctcgggacatataaatcaacgaaatctcccgcgtcgttttgcattttgatagaagtaagtaaagctaacaagataaaaatggtaccgtataaaaataaacaaatatagtacgtcataaaatcataatgacaataaagcagaaggaaatattcgtttatactttttaatcattgtatttaaactgacaatgagtttctaataacttggtttctattatattgatacaaattacggttttttggaagcatcatcaagctttttggcctcaattttgcctgccttttgaatgacattgtatccggaggttatcgattcgtcacgaaatgcagggaaaacctcccacggtgtgttcaagtcaaacttccggaactcttgtgtcatttcggttggctcataaatcactcggttcagctcgtggtcccaacgcagttcgacgtatccggacaatgggaagtcttttcgctggggatgactaaaagtgacaacgccataaacaaatataaatacaaaaaggaaaatgaataaaataaacttgcccttcaaacccgtaatcggtcaaaatacgtcttaagtctgggtggttgttgaaccaaaccccgtacatgtcgtagatttcacgttcataccattcagcaccggaaaagactggagtgatggaatcgattggagcaacctggacaatgaatcgaatttgttatggtgaaaaaccaattagaaaaacgcacttcgtcagtgtatgtccgaactctaatcctcgcattgaatcgatgcgacaaaagagcgtaaattacttcaaaacggttcttacgcgtaggaacgtccaagccacaagcgaaaataaaatttgtgaattcgggcgagtgatgccctttgagggaggccataacgggcaagacacccagtgggtggatcagaacttccaattcatccccaccaagcaaactt

SEQ ID NO: 604 - DNA, 2347 bp, Heterodera glycines
aagagagtcagcttctccccgcttttgttcatcaatcacgtattttgtgcctattttacttttttttaaacattcagcaaaaaagttgcgtacttgtctgtttttttacttcctgtgcttgtgcttcagtaccaggcgcagcataacctccggtctgaaaacggaatgctgttctggcgttatatatcggttgaagtgtttttatggttttcctgagcatattcggtcgctattcaaacatctaaaattgaagtaaagtgaaagaaatactcctctccctctagatgaaaagtgacgttcaaaattgaaaaggattggagacgaaaatgttattcatccacttaaccctcagattccaaaagctgtgcatcagtgtatttgatttatagtacaaacataatgccaataaaggaaaataaatttttaattctttttttttccttagctagtgtataaaaggtggaccatttttgagttcttcatactaacattttatgcaactacctattttcttttgccgaaaagtgaggggcgccatcggtattattgttattatttcgaccacttcatttaatcgcttcatatattcgtttaatcattttttaatgaccattcctaatttagccaaatattcaaatataaataaaaccaatggctgtcaaagacgacccaccggaaattaggggtaagttgtgggcaatcatgaagattatttgtcccacaaaaaaaaaaggaataaaaattcaaaaaacacttttttaggggttatttggtgcgctgagcacgaatttgaccttcttttgacttaatttcgaaccccgaacccggattcgaacatttgaaaaaattcaaattttcaatttttgcaaatattgctgatgcattgccattggtggcaacttttttcagttggtatgaaaaccgggacatgatcaggggactttgtaagattttcattgtttaaaaccaggataaagagaggagttaggatgttacccctgaaatttagtaacctaatgttttcgaaagggtgaatttaggaagttccatttagaagctgaagagacttttcaatctggcaaaccatttctactcccatcgtctaattacctctggaaaaattttcgcgaattccgtttccatcctttggacaaaatccaaagaaaaatggcgtttggccagctccaattctttcagatcattatcgactaaatttggacaaaacttgcttttgtgaaacttttgtgtgacttacacttcactttcgtctcactgatcaatttgtccaattcggccattttctcagctgaaaagttgtgcttctggcgcaccatttgacttaaattgcgttcaatttttttactaaacagacaagagaaaatatatatgaatttgtttttggaagggataaacaattatgtttaggatttaacctttttagggatcgtattaagaagcgggcaaggatttcttgggaaccatattccccttttcgggaaaaactggaatgttgtcgcaaaaaatctgcttatcaattctcgatacacggtttttaaagtttaaatttaaatttaacttcgatattattttggcgtaatgttttccttccatttaaatttttttcttcgttcctttcctcaagactatagagttgtacgggatcgggaattttggacaaaccgggaccgggaccaaacgcatgaaaatcagcaaaattaaacggagaattgctaattttcaaattcagaccccccccccttactttttcccaattttgtcggattggggcggcgagtgacgacgaaatcccaataaaaatgattgaaacggaaagcatcgacgagttggaggaggctgcatttggggagcatagtgaacgcgcggagggacaacgccctggcggacggtcggacgacgccaatttttacggtccctccgcgcggcgttcgccttcctcaatgaccagcggtggcagaggcacaacaacagtccacacacgcaatttgctcgctttttggtgagttatttgttcttgcattttcaaaatggaaatttagcgattccaccgtcaattttagtgtacaaaaaatcgcattcttcacaaattcgatacaaagcaatgtagaaaaatccaaattttaggctcttaggcctttgcaacaatttcggttacgtggtgatgctcagcgctgcccaaggacattttggaacggtcggcaacgctgcaaaacgacacggttctatgcattataaaacgaatcaaacttttgaatttttataaactttttttttgcacttttggcccctctacgcgttctcgaaaaagaaatctgattttgcgataaaa

SEQ ID NO: 605 - DNA, 492 bp, Heterodera glycines
aacatattctgtatcaaaataaacaaaaaaaaaaaaattttcaaaaaggccactttccatatagcgccgcaattttttttattcgccactcgattcgtttcctaatacttcattcttctgcaggtaaccagcttcataattgtcgcattttccacttctttctccgtcggattgcttggttcgaaatagcaaaaaaacttcaattttttattttttgcaattttaggcgtaatttttgccagctttggtgccggacttggcgaagtcacttacctgtcgctttcgtcccattttcatgggtaaggaaattttgacatcgtccaatcaccaatttcttatgaaaaaaagatcaccgaatttatgtttgaacctaaaatctcgccgcctgaaactttttcataaaaaaaggtaaaggcccttttttcggcgttttatgatgtgttgctaccttaaggaaaaaaaaattttcttataaacttttttttctttcgg

SEQ ID NO: 606 - DNA, 1465 bp, Heterodera glycines
aaaaggaagacggaccggaagacaaacgccaccagaagagggagagaaacgactgggggtggggaggggggtaattagtgggggggggatcaaattctgttggttgactgataatccatttgctgacggacaagtcctttatcgcccgcacccccgcccattcgcgcatttttgtcattcctctctccatctctcctctctctctctctccatctctctctctcctccccccctcactctctctctgctgatcattccatcccatccgtccttttgcgtgtgcattatcttcctctctcccccaccctccggcgttaattcgattatcccatcgcctcgtgttagcgttgatcaaagatgctcgccgacaccgtccaataattgtcgattgctgaaggcgttgagttgaaagagcaaagaaagaaagaaaacggaggggcgatcattgggcatgctaaattgagcgcaaatgcattaatccgattcaaagatttggagaaaggacgggggataatttgacgaagggatttgtggggcagaaaaattgggtgattttggattaacgccatggcattccttccaaatttggcgttttgttttcattaattttttcttcctctgcttacgccattgcatctgtctttcctttttctgttctgtgtctctgctcgttcactacaaccacacaataatccactcaatcgccaattagtgagtaattaatgtccccgtggagtcactgaattgactgatgactgatcgaatggtccgtccgtcctccgccgatcactctttcctttcgtcttcccatcgttttatgtgtaaagtgtttaacggggaacacacacacaaacgatgacaaaatgcaggtgctgtgagagaggggggggaagcgctaaaattgtttgagaagctttttgagcgtaattacgatttttacttagaccattttttctaggcttagatcacatgcgattttcggcactctgataattttagcgctcataatgggatgtataaaggcgattgtagaaggaattggaagcgctaaaattgtttgagaagctttttgagcgtaattacgatttttacttagaccattttttctaggcttagatcaaatgcgattttcggcactctgataattttagcgctcataatgggatgtataaaggcgattgtagaaggaattggaagcgctaaatttgtttgagaagctttttgagcgtaattacgatttttacttacaccattttttgctaggcttagatcacatgcgattttcggcactctgataattttagcgctcataatgggatgtataaaggcgattgtagaaggaattggaagcgctaaaattgattgagaagctttttgagcgtaattacgatttttacttagaccatttttttctaggcttagatcacatgcgattttcggcactctgataattttagcgctcata

SEQ ID NO: 607 - DNA, 2723 bp, Heterodera glycines
gttttgattggtcaaaagcgatcgactgctcaaatgccgaccgaatcggccgacaatggcattccgctgaccaaaagacagtgccgggcagaaacgtaaaagccaatcgcacggctttcattcggccgacgtcccttgtgatttgatcgcccttctcatccattcctcctcaattctgtccatttgagtcagttttcagatgctttttttcaatcctcacaaattatttttgttttcaaattcgtttttaaacatttattgaagtagaaagaaattaaattgaataattttcttctaatttatcaataaaagttttttatttcttcgaaattaaagcagatagggcgtattgtccgttggtgatatggggtcaatggcaactcgtacaacattgaactcatatcttacaaaaaaaaagacggattcggactattgaaagccaaaattccgggaatccgagaccgggctctgattccacaggttcgaattaaaaagtttggcgatttgcccagcctctggatcctgttcaaaaactatcaaatttgatcggtcattttccgaaggctcgaaccaatttatagcataatgtcattattttatcctaaaatttttaaagtttgacgcaaaatttgattatttttggataaattctgttagcaaattgcactaaaattttccccggcggcgcctaccggcaccaccggacccaatcgccagcccattttagagtttctttgcattgtattgtttttttattgtcttatcgtaaggtacacttttaagtattttttgattgattgcgcatgatgagaaagagcgtaaaaaacgaagccaatgtgagcgaatactatgaacaaaatgaaatggatggcatccataaaattaatgtgaataaaaatgtggcacaaataattaagtgaactgaagaaaagtgacgaatggagcaaatcaaaatccgaaatagaggcaaatgactgcgaatggaatggaagtaaaatgaaagaatgagaaagaaagaacagcaaaacattaacggatggtaccggtgtgttattatcgtatcatgggaatacagaaagaaggtagatgatcagcgaaaggcaacgattaattctttctcatcttacgcactttatccgcctgttttgtctccgtcttcaccaccaaatgacgtggcaattccatctgactgatcgcgcgtctctccgccaattggggcatctgcgaacggaaggaacactcggctccggaacagttttgctgccgctgttgcggcaggtcggcagaagggcgcgggatggggccggcgccgcaataggtattgctgatacgccttgaaattgtgggtggatgagttctgtcacgggtgtcatcaatcctcccatcccataatcccaaccctcccccccccctctccctccacacacatcggactgttcgtcgtcgcttttgtcggcggtgtccgcactgtctgtgggtcgtcctccgcctccttcggttggtactttgcgcttcgttctaccgccgcttctctttcgcgcttcagtttctccaactccgctctcatccgggcgaattcgtccgcccgttccctcagctcgtcttccatcgtccgcagtttcgtctctctccccgcacatttcgctcggaattcctcttccctccgcttgcactctgtcagaaatgctttcttttccgcttgtaattcctcctgtttttgtcgcaatgattccaatctttcgggcgtttcccccgacggacttttgcgcgaacgtaaactgaccaattgcaagtctttgctgaaaagagagagtggaaccattgtcagttcgattggttttgacaattatgtccttacagtgccgattccttcttcagccggtcgttctgcgaacggagccgaacattgtcccgaatgatctcagtcgcggcttttctcgagattggattcattttttgctaaattaataagtttccattcattatgttaatgactctctttcggtaacattcgttttgcactctctactctttgattttttaatttttcgtattttaaaaatagataaaatgccattctgagacaaacggatcatccgcctctttcattcccaccggaagtttccggatttcgttgtccatttctccgtcctcttcctccgaactttccacgtgatggcccccggcgggcactgtcgtgtgccttcggatgggatggactcctccggtggaggaagccgaagagccggacaaactttctgtaagaataaaaatactaacaaattctgccttaggaaggggtgggccccgctcgactttcgtttcaattttcataaaaattagccgaccgtttttctaccactaatttactcactttgttcggccgacccatgcccatggtaagtgcggactctgcgcggttttttcttccctccgccttcagcgattttcgtctgattttcgcaactgtccgatgaaccgacaatttggttaaattggtcgtctgagccggacgaactaaaggtaaaaagcattcattggcattaagaaatcaaatggacaaaataagagttcaatctaaggccaacgacctctgtgacggagtgtcccccgccgccccgaggtcgtaaaggtcgtcaaaaaaggagggcaaatccgcgtcccgcgctttctgcgccctctccaccaaattggcgagtgcaccgttgcgtttccgggccaat

SEQ ID NO: 608 - DNA, 3249 bp, Heterodera glycines
  unsure (1)..(3249): unsure at all n locations
cgtctggtctggtctcttacaaccccttttcctttctcctcctgcttttcctctgtcgtctaatttctctccctccctcaccattttctctctctctctctctctccccttctccttttgtctctatgtgtcccacgcctctctctttcgctgtttctctctcatctttccccgttgtgttttcctttaccgaatattttctccaactctctctgccaattgtccattttggtttggtattccttctcagctacggaagtgccttccccgattgaacgttggctcagctcgaaaatgcgtcgcttggacaatcggacgaacttcggagcattcgttttcgcctgttttatcgcgtggacgcactgttccatttcgggggaagttggaaaagcgagttggattctgaacgtaaggaaataatcattggaagaattggtaaacgaagcgcacaagtcgggctgttccttgtcagtgacaatcagcagcaaactcttcctgaattggtcggatgtttctctcgataacaaaaaaagagtgaacctgcgcagattctcgccctttacgagagtattgaacaacggaataacgcccgagtgactgttgtgacgaaagaattggaggggaaactgaagggaaaacgtcaaaaccgagcaaatcgccaatccatccgcaaggacggataaaaagggagcgagatacattgttggggggggggattaactcaatttattacaatgcgattttaagggttttgccacatgaaaagagcgtaccccctatgggacaaccaatcgcccgctccttctcctgctgatcactcacttccttcctttccattcctacgccgcccattccgcccgttgccccactggtgccaatcgaagtgcctttgggtcgcagaaacacaatgatatcgtcacagagaagcaaacgcactgacagtgaatagaattacagtaacaccgcaataattggataagtttgccaaatacggggggaaggggggggggtgggaaataatccaaattccgtaaaattcgaacatcgtaagcgcgttaaaagtgacccccgcgccccacccccttctattgtttcccgtacattccacgtcgggcgaagtcatcgtctccctccaaaaaactctctgcaccaaatggaccttccgtccccactcattctcagcgaacgcttcttcgatgggttcgacaaggtcggcgtaggtgaagtcctgcttggccttggggtcgatctgtcaaagggccgtggttattccgtttttttcacttcgcccaccaatttgcctgtgcttcccttctccagtgcctttttcaccgcctcccattggattttgcgttcgtggcgcaaaagttcgtcgttaatttccgaggcgaacgatttgacagcaaaatgagccttttgcattttcaatttttggtcggacagcgattcgtattttaaaatctgaagtgaacgtattggaaaggaatgaatgaatgtgtgcgccacctgctcaatgagaattgggtatttggtgagtcgttgggccaccaaaagcatgcaatctttgaaggagcggtctttgtgctcactttcgtggaattcgaagaactgaacgggaaattaagcgtttagtaacctgttcaacttgattaattgggttggaattcaaatgcacgggaaatgaatgctcaaatgctttttccccgtctccgctgcttaccttccgaacgatcgctttttgggccaaaagcgcggcgaacaaagcgtggctgtgctcccgggccaaacagaaagtcgtgtaggagtgaataacggcggaccggaaaaagaaaagattagtaattatgcattaatcactcaccgaatttgactgtcgacgaatacttcgcaaataacgtcggaaatgtcaggcacaacagcttcacccgaggagagaattagaaaacgacggagcaaattcagatggaagtcgaggagagtgtcaaggacttccggaacaagctgaacacaacccgtanataatgtcaaaggacggacaaacgcaacaaatcggttaaataaaattcctccggacaccaactccattttaagtacctaacctatcgcaaaaagcctcaaaaaaatcattgtgcttggttcggcaaatgcttgcctttctgacagtgcctttgtccaaaattccgttgcggatgagtccctcctggtacacctgacgaagcagtacaagcacttggcagtggttcttctccgtcatcatcagctcgtaaatgatgttttgcctgattaagcgggaacagcaaacctaacaattaggacaacacaacacgcaactgcccttcacctttttctttcgccattttccaatttcagtgactccgtggggaatttggctgcccaactcgtttcctcctcttcccaaatgttcaggtcgtcccaaagaggatcgtttctaaaaacaggccgaacatagaaaaaagggacgaacaacacgaacagttgggaacgcgaaaaaatggcgggagaaagcatagagacgaagtcggggatttgttcaaatgaaaaggccgccgaactcggcgactgtgccaatgtgagctttttggggctgtcggacagatgaacatccaggggacctgagaaaatggaatcagtaccaacaaatggctaataaaaattataaagttaaaggctggatgagcaaattttttaaaaatgaactttgaccttccaccggctttacggtcggtgccaccgaaaatcgccgatggaaagactcaacaggcgaagaacacggagacgtcaggccttcttctggcgttctactttcgcccttctttttcaaaaagcgaaccaaatgacgcattttctgttcgacgttttgaagcccatccaattgtgagattgaagattttcgtcgttttttggagggtgatttaggcagcggtaaataactcatcattttgtcactgctcgtcctgtggggcaaccgccaaccctcaaaggcacttccgtccccctcaattccctccgcttcttcatcgtaaaaacattttctctccaatgccctcaaatccgtttgtgaagtccaatttggtctcccaatttggtggagctgctgcaactgatgttgcgcacttcctcttctctgagctgtttgttgttttcgtctcataaatttcatttctcgtggcgaaggtgaacgacaacttccgcattgtaaagagtcgcgctgaggggacagtaaactcg

SEQ ID NO: 609 - DNA, 1567 bp, Heterodera glycines
cgagggccgaactgttcagcttcggctccccatcttcgctcatcatctcaagcatattgagcagttcgatttcctcctcttcatgttccgtgtcgcctaattggccgctctcttctctcagtgtgtgcagaagcgaaatgcatgagccgggttgagaaggcaagtccgactccaccgaccgtgcagcaatgacactcgttggcaaactgggacgacggaagtcgaaatagaggccgggttttgacctagcagcagaattaaaggatcgttgtgtcatggagggagacaacaaagcaaatgaactaaggaatatttaaaatgaagtgggcggtgcggtgaggaaaggagaaaagcaatgactaaacacactcatttatcgatggggagtcatcgtttgaatgggcggtcgagaacgccctgcccactgttccgtgggtattatttctcgagagtagtcgagcatttgcctcatcatcgtcgaggtttgttccgcattttgtcagtccccgttttttctttgagaggtcgtttctctcaaattcttccaccagctcggctactctgttcagtaacggcactgattcgcccttaagccgtgctattttcactcgtgatgcttttcctgccgattgaatttcacgtttaaaggcaacttcgcaacatttgttcatcctttctctctgcagctgccattgctcacaaaatccgctgcttaaactcctattgtgttgtggtgaaaactttcgggagggggtggaattggagatgagttgatgaacaggaagaggagaacgaacagcgcttggtggctgatcgggaaacattttgacataattattctaaacacgaaaaaacttacaaataaagctttgagtgctattatttgacaatacaaatgcaaatgaatgaatgatagagaagggggagggagagaatgaatcggtggccgactaaacgaatataccttaatggttagcaaatatctaacgtgatcatttgtattttatttttttgcaattcaccgattcaaatggcaacattttgataagtttggaatgtgacaatgcgtgctccgctcgttgctttattgagaaaggaatggcactgattcaaactgttcacaaccaaaaaggcgaggagaacagagcgggtgaaaaagccaatcgatcccaattgtcaccctcaaaaaatgtttgtcagcttattcgtaataccattcgtcaatcaaaccaatcacaaaatggaatattgtaccaaatggcggaatgtaaaaagagaggagaaatgaaacggaatatgataatgaggaggaggcaatgacacagcaaaggcaaaaagatgacatcacgcaaaagcatttggtatccgataactcttacagaataaaatttgctcatccagacaaattgattttcattatcacgacccgcaaatttaaaaaagcaaaaacccaccgctgtcatcgtttgacttctcctctttgccaaatttggagtcgctttgctgacaaaaaagattggccaagcttctgttgccttccttctaaattgatttgatacagtttcag

SEQ ID NO: 610 - DNA, 1756 bp, Heterodera glycines
aatggtgccgagaagtgccgagttcgcctttgactccctctttttgtccttttctgttcttaaaatttttctgcttatttgaaaaaattgagagggatcaatgagcagcatttttaggccatttcatttattcacaatgaaacaacccttcctgacaaaaagctgaagcaaaagcagtttcagcgaaacggtgccgtctctgtccgtcccacctttccttttcggcattcgcatccttcggaccgttgtcggtgttgtcgttcgtcttcggtgccactttgctccccctactggccttgcgttcgcttccaaccagcaattgccttagagatgagctgctcacactcgccccacgctgtttggccaaaagtttggcaccttctctcagtgtcaccgtttccgttttggcaatgtccgattgtctttttccattgccgtttttcttcgtcactcccttctctttcgcttcatcttttgtgtttccattcttttgctcaccgtcctgctgcattttgcttttcgccataagaatttgagcttttgtcacatatgagcttcttctccgggctaattgtgcctttccaatgcctttttttcgctttaaagttccgttggtttggaaactaatcgaagatttacgcggtatattgcaatgattcttttttctgggcatagtcaatgttgttgatgttgtttttatgatattcaattgcgatgagatcacttttttggagttttgggataaattatgcaaattttgctgctgattttgagggccttctccacttgtgattgatacgaaatgaagcgcatccaaattgttgcccaagtgcaattggacgtcgtcactttgttccccgtcttcctgctgttcaactgtccttgacattcgtttttctttcaagaacatgtccaacttcagactgtcctcctccctgactctgtacttctccttcagcgatgtcgttcttctcactccaccagacgtggccatctctccttccgcagcctcttccaacttggtcaaatcgcatgctccaatcagagaaaagcgctgtgttgcgacaattttggggacagttgggcttttgatgggatagcttctttcggcctcttgtcccgatcccagcgaattgttgttccgaattcgcactgtctgcgtattgctgtgtgtttcttcttcgtgcacagacaaaactgcctttggctgggctccgttcccgaactgtcgcttcttcttgtccctgtcctcccccatctcttccattagtgtgcccagccgtaagctctttctctgctgaacactctttttccgatagtctctcattgcttcatctttgtcttcttcgcttttcctccttgaactttggagttcgtcaaccaaatcattcttttccgtgcacttatcgctgttctcatctttccgtccccaaaataaattccatttaaagctcctccggcagaaattttcaccaaacgtcgacttattcatattatgcttgagcaggttgctgtcggaatattgcctttttgtgacgaatcgatcgaccaaattcaataaaacgttggatgacgtgggaattgaatgtgcacatggcgcggaaagtgttgacacggaagagttcctgcgcttacaattgcttttcgttttcctctcatggcgttgttgctgttgttgttggttaacttttgagctgcaaacgaagaaagtgaaggggaaaaagccaaaagcataagaaaagcgcaacgatggaaa

SEQ ID NO: 611 - DNA, 1714 bp, Heterodera glycines
tggatgaaagcacaacgaacttcagcagacggtgtaaaagaagaacaaatcgaggggcgacccttaaaggatggaagaatgagtcaacaaaaagccatttcataaaggaactcctcaaacagacattgtcattgcacaggtgccgctgcttctcaatttgtgtcaaaaggtgtggccttagagaaacggccgccgtacgtttggccaaatgagacgcgtccggtaagtcccgtccgcctttcttcccccattcctcctctcctgcgactttctccacctcaatgtgccgttgctgtccaattgtattgtcgtcgacaggaacggcatgtggagaagggctacgcatcttaaaacaaacagatcaggtacaatatgcacaactccatttttatccatcacttttatttgaatcgcatcggcaaactccgcttgatcggtgtccagcaaaagcatttctctcctcaaaccaatgccatgcaaaagatggtccgccgaaattgaacgacggtgttccaaggaattttgaagaagtgcattctgaagaagaaaagatggacaaatcagttattgccggttgaactgactttatctaagttcgcttctgtccttcttccataaaatttctccgccgtttccccattcagccgacttataaaatcaaactctctgaaaatgcttttacattattacaaaagagcggaaaacccacgcactcgtcaacttcgtcttcatcgcccggggcatgtacggatggttctgggggttcgtgtaaattggcctcgtcgttttcagtctccgagtagtcgggaatgggcgaaaaaggttgacaatgaacaaggcacgggtccaagcttttgtcgttttcatgtttctgtttttgttgtggcaaacctgaaaaagctattagagttaaaatcaaaaggcgttgatcaacaggcattctctcgacccaccgttcaacactttggccaaatgaaccgcgtccttcacaacggcactcgatcgtcgccgatgactttcccgtctctctgcggcggatcgcctttttctacgctggcgcggtgtcgaatttcccgaagtattgtcactcggtgtgggttctttggtcggttgacattcagccgcgtcactcgtcgatattatcattttgtcctctccgcctaaaaaacgaaaatttgaatgactaattataagggaatactataatcaaaaatctatttcctaatgagtgctaaaagatggatggtttggggataaattcatcgacaaagaagaaatgcattttccaataaaaagggtgcggtgttttgtgagaacgttggaatgtttggcgtctgttttttaactgggctttggttttccttttccctttgctcctcaattcctttcccaccttctctctcttcagattcctttccttcctccaatccactgactgtgtacgctctccccttcaaatcaaacaaagtttgctgctcatactccgtgaaatgatccaacgaagaccgagaaactcgtcgattctcttgcagaaacttaatttttttacaattcaaataaccaaagaaaaactgtgttgaatttaaaactaagatgagaatggtaaaaaaaaattcaaaaaacgtttaaacggttttttcggcgctatatgcaaagtggtgaattttggattttatcaagaagtaaaaacaaaaaggcgggaccctattgatat

SEQ ID NO: 612 - DNA, 1442 bp, Heterodera glycines
ctcgaattagatgtcagattggtgatcagcaacctctaaaacctcggatagcacaatgttcatggttttttatcacaaaaaaatttcgcataacaaaagggcccccctttactttttgataaaattcaaaattgaccactttgcatataacgccgttttttcaatatttgtgcaacgctaaatttaaatttaaaataattgcataattcttccatcttacaattagcgtgggattaattaatttaaaatagccattgatcttaatcccattatttaaagtagggtagcgtccccgactccgaaaatttaggcaattttcgggtaaactccaatatgctccgcatcccgactccgaaccgtcaccccgagtttttatgggaccaataaaatacatgattaccaatagaatttaataaacggtttacctcagttgggcgcgcacagttgggcgctcacgtttgggcgccaacatgtttttccacttaaactttctataacttttttctttgtcacccaaatccaacttttaggtatcatttgaaagcttaacatgtttcgaagctttttctaagctattgcttcgcgattagacaattatcaaaaaagttattcatgaaaattgcgaaaaagtcaaaattttgaagtttttacttaataaaattttttataagcaagaaaattttttgttttttgtaaggctaatagagcatgttaagagctttcgaatgataccaagattgttggattttggatgacaaataaaaaagctatagtagaaaaacttgctggcacccaaccgtgcgcgcccaaccgagcgagtccgtttaataaatgatagaaagtttgtgtccgataatttgatcatcaactacataataaaccaaaagaatgtgttttctctattttaatgctctttattctatttatggggttttcagggtcgctgatcacgaatctgacattcatttggaccaatttcgaatcccggacccgaattcgaacaaaaaatcgaaaattttaaaatgcatttttatgttcgtatctttaatttgattcagcccacctcgaactagctgaccctgacttttctcaccccgaaggtcaacaataaaaaaaaattttcataatttttattgcattttaataataaaaaaatcggtaatagttaagaatgttccccacctttttctgaaaaaaattttcaaaatgttttttcgagaaaatggcgtttttagggttttcagggtcgaggaatccgattctgacgctcaattcgacccattccgaaccacgaacccggattcgaacaaaaatcgaaaattcgatttttcaaaaaattaccatttactcaacaaaattgaacggaaatgcatgaatgtgtgaatgaatcaattattgccacggataaaattgggaaacatgcaaccaaaaattataaaaca

SEQ ID NO: 613 - DNA, 860 bp, Heterodera glycines
accccgacccccgacatttttgggcattttcggggaaaaccccgactcccaaccccgacgcttccaaccccgacccttaaccccgatcggggtcggggttaaatatacacccataagaatggcatttttgtgggggaaaaggcaaaacatttatacaaaaattgatttttttaaccatcttgacaaatttttatgaaatatatatagacgtattgaacccaattttattttctttgaataaaaattcaattttttgactaattcatgaaaatttacaaaaaaaagaaataaaaataaaaatttaccagaaattcataaatttttggtgaaaatatgttacaaaatagaccttaaatttcaaaattcacccggtgctgcctatcggcatcgccggcgccacaaaaaaaaacctattttttcttaaaaaaatttggcccaaaatcgaaaaaatcatcatttttttggacaaaatctgttgacaggcccatccaaattttcaaaatttttcacggcagcgcctatcggcaccgccgaacccatttctcctaaacgtctttagaaaaagagcgccgcaaaaaaaaagaccaaaaaaagagttatacagattttcgctgaaaattggccattttaaatgccttaggtatgtgtttttaattaattctatacaaaatatttgataaagaaaataataaaaagcacataaaattattattacgaaatttaaatatttttaagtaaaaatttataaagttttttgactatttggcataaggcaaaaattgaaaaaccccgaccccgaaccccgaacgatttggcaaccccgaccccgaacgccgacacttccaaccccgacgtcgggg

SEQ ID NO: 614 - DNA, 2106 bp, Heterodera glycines
cttttaatttcacattttgttcacttttgtttacacacacggaaacgaactgaaagtcatccctgatactcatcagtgcttcaataaaatcgtttaaaccattttagattaaaaatcaaaatcgaaaaattccaatttcgactttattcgaattcaggccggtattataaataggttgaaatggagtgctcagtagagaccggaaatttcaaatttgcagatcccgctgcgggattggaactcaaaattctttgcgggacgggatcccgcgggattaatcccgcattttgcaaaaaatgtgtgattgcggactgggatcccgcaaaatcccgcgggggatcccgtcccgcgccggtctctagtgctcagcacctcaaaatacccaaagaaacttgttaaagaattcccagaaaaaatttaaaaaaaaaatttcgggaccaatgatcgacatgattgctctttaaatttggcggcgagttggccgcggcgagttaggcggttcccgggtcaatggcacccgtacaaaaggcaactcgtattttaaaataaagctgaatcataagcctaagcttaggcctagcctaaagcctaggcccaacctaagcaattgtacgagttgtcatgacacttccgatggtaccagggctggttcgcggacagaaaaatcccggggtgcggatctcaaattacctcggattcaaaatcgaattatctgggtacaaacatttcgcctactgtttttccggggatgactatctccgctggatcctaagtttgactcaaaagctgcaaaatttactcatttttgggcagaatctgttaggaattccactctgatttcaaagaagtttcgcatagtgcctattcgtcgggtcggagtcgtttcggtgttataaaatggtatctcaatgcgttcatttgtcttttgcgctgttttcaatggcggattcataagacgcagaggatgacacgcgaatctgtgggtcggcgacattgtcagtagaagagagagatgaggaaggggaagacacaatttgatggtcgactgaagacggactctgaaaaaatgaaaaagcattccgtaaccgaggaatgtccttcaaaattatcaactgagtgttaaagaaaactgttaacgatttgccaccctgagcaccgttttgacgacacgagagttactgtcggtagagaaacggtcagttacagtatccctgtcaccgatggctgacttaacacacgggtcatagatgttgatcctggaaaagaatgatggatttttgctacaaccgagggttgtagccagacaaaacacacattgatccgttttcagtctctgccatcacttccgattcgtcgtcactgtccatgtccgggtgaacaaaaatgacatccagcaccaaatgttcacttttacgcatctaatatttgtcggccacaaaaccgaaaaagcctgacaaaatctcacttccctgctgagcactttaacagcttcagaatgctggacggaccgcaaatcgatgccattgacacagagaatggcatcaccgacgaagagctgctcagtacgttcggctggttggccgggatggacttctgagatgagaatgggcactccatgctcacttccgccctaaacagccaaaacattctcaaaagggcatgtgccccactgtgatggaaattccgaggccttctccgcgacctttgcgcactttgactcgtctctgttggcttttgcttttgtaaagcgaatgctttcggtggtcaaacgaatgtcgaagatcatttttggatttgttttctcttccacggcatgctttgatcaccgttttgtgtcggtggaggtgaatttcggcctccaactgattccaaaggcggtcgtactctttgccacgcatttctttcccaagcaattggatttgttggattcttccaatgcgatttatttacataattacttttcattaactttcgaatgctttttctttaccttcccgccaattctttgtccaaatatttcgctgctaatcgagcgccgtacacttcgctttggagtagatttattgcagaacgcaaatgcaaattttcttcttgaatcaaacgtaa

SEQ ID NO: 615 - DNA, 2667 bp, Heterodera glycines
aattatgctcagcaaaatcagcacccaattttctaccgggagcaatcatttgcaaaaaaaaaggaaattaattaattatatatttaccgtatgtcatgtaaaaaggttgtccccgataccgtacaccgggatttttatgacataaaattttcgttatggtatcgacatttcgattctcgtattaacgtgctccgcattaattacatgaatgaaatttgacccggcgatggaataatttagtcgaaattttatttaaaaatttaaatgacaccgatgggagcggaattcttacacttttttggtctcaattagaagcacagaataaacccatgtgcttttttggttctttttggagaatgaattggtttgtttcttcccttttttgcgtctcattcgtcgaaattctttcacttctcattttgagtggctaaacgagttaattaccccattttgtttctttccacgcccccccccccccgtcgtccatttcttcgaagttaatccctcccattggcgatgcttattgaaaattgaaagtgggttttgaatccacaggccactcaaaaaacatttcccaaattctttcagcatattaaccgacattttttttgatgtcaaacgttcgaatgcaaaaattggaaaatgaagaacaatgttaatgaaagtggaaagaaaatgggagccaaattaagaaaaacggaatgaaagtgtaccctcaaaagaaaggggggggggggggataaattgggaaaagtccaagaaaacaaaggatgggagaaagctcataacgaaaagtgacaaaaagaaaaagagtgggtaaaatgaaaagggagaaaaggcacactcggcaagtgcttaaaccgacccaaaaaggaaaagcatgcatttgggagggaagcgcttgaaaagaccgtcagcagatggttggccaaatttcccagcccaacccatccaattttgggactgatgggcggtccccgggggatttccgtcgcccgtcttaacaaactctgtgccagcggaaagtaaaatatcgaaaattagaaaaatggaatttaagaattgttcatataatgtaacacctgagaaaataatttccaatgaaaatttagtcatccgttggattaattggaatatccgtcgcaatgaatctgaaagcattgtctgcatcgtccaatggcaccgcctttctccgctggttcggcacttcgacttgggacgccgcttttttggtaaaaagatggcagaaaagtgtagaggaggggaagaaagaaaaacagggcgaacacaaagcttaagcaacggcgaaaacagaattggcaatcatttgcaaaagacaccttatgaaactgcaaatgacgaggaacatggacacctttggacaaattgggattggttttcgtatttgtaagaaaatatttacctgaaaaaatgcatgggtttccgaaaaaagcataacaccgccggccagaatgcctgaaatgagttggtaaagcgggggattcagcccaaagccactggaaagtgcggccatgccgacgggtctaacggcgccacggacagccctttgcacgcggtgctgggcacatccgtcggaagcgaccaaagcgccgaagcgaagcgtataatcgaaggacagcccaaccgccaaaacgatgatcactccttccaaaacgccgatttcccagcctaaaacgacgcgaaattcaaatgaatgagagaaaattggactcaattgttacccataaacaccaaagctccaattgttgtgaggacaatacaaaaaatagtaaaagtggcacagaaagctttccatctgagaaaggggggaaatgagagaaaaaggaaaagcgaagggagagagagggaggcattgtaaaaccaaccgaaggatcaaagaggaaaagatgaagacgacggcgaatgaaacgcaaattgactgaaggggggggggaagggaaatggggaaaagcgaaggaaagagacggacggacaacggaaaacaaaggcacaagtgttctttaaaatttaaaataattatttttattaaaaaccaaaaacatggaaaataggctgataaaaatcccagaatttccatcaatttaaaattgaatgcctaattctctttgctttcacctaaacttggcttcttaaaaacaaaatcactggtgccattgtccgtccattccgttctcttttttgccgtgcctttttacagtcggaaataatcgccctttgcaagtcgaaccattgggacatcgctaaacatcaccgcaacacagaataaaactacaaagtgccaagctcagacctgtccattcggtggtgtaccttattttcataatttgtgaatcattaaaatgcacaaattaccatccgggaaggaaggacaactgctgagtgccaacagaaagccattggtcgaacagagcgaacgcggcggaaagattggcaaaacggtgggagtagcgcaaatgggtgggcaaaagtgcctggaaaaagcgaatgctttgtcgaattggtggccggcatcgcccacggtgtatccgatgagtcgatgggtgggattgtccaaaatgaggtgtcgttgtaattggtgagaagcacggatgtggaatggcggatgcaactgtcccactgtgcggctacaaagtgcggactctgcac

SEQ ID NO: 616 - DNA, 2185 bp, Heterodera glycines
tttggccagcttctgaacgacgtcaaaatcgaaatcagcagcatcgaccaactgacggaaaaattctggatggtgtgctacaaggcgaaggatgagcacgtggtggagcacgacaccagcaacgtcgccattgccctatggactacggcagcggccagagtgcacttcaattggtctacaggcagcaagatctggttcagcgctacgacacgcgcattttatacatggtaagagtgtgcaattaaaatgttcataataaaatattcgtttttcaggacaccgacagtatcttctatgacttcaagactgcactgggagacccgctgaagggtggcaaccagcttggggagctcgcggacgagtaccccaaccataccatcgtcgagttcatctgtggtaaggactttgtccaaaataatttgaataaatttctaatcggttttcagctggacccaaggcctacgccctttggcttcggaacaacgcaaccggcgaggacgagtacaagctgaagctgcgaggcatcacgctggactcgaacgcctgcacccgcatcaactttgagaagatgaaagaaatggtgctggagaagtggggcacgcccggcaaccatgtgcggttcgactaccctacgaagaacttccgcatcacgaagcagggcgacattctaactgtgccaatcaccaagcagttcaaccccaccgtgaataagggggtgctccgggaccgtggacttaaggttgtcccctttgggtatagctcatgggagtactgtaaggcccataaccccaacgaatgtcgctgtaagaaagaataatttgttcattttgtacttttatttttcaaaatcctcatctgtgacccaatattttttttctggaaaaccaatgaatttcaccaatatttccttttttccatccctcattcgttctttgtactttttctcgatcctatacattgtgttttcatcaatttgtacttttgttaactctggcaaataaaattttctcttcaactttgtgccataatagtccttgagcaaatagtgctgggggttggttgaccgagcctcatcaacggtgtacacatggtcagagtagttgggaatataaccttaagcacaaataaaaatacagaaaaaaaatggaggagtctctgtacctttctcgaatatgtgcttgggctctgggattctgaccgtttcccccgctttgatctttggtcttttttccgctggtacaagaccttcgccatagaccctcttccacacctccctcgcattgacgtcactgatttcgttaggcctaagtcccgtcgcacggcacacagagttattgatcgcagacaaaaacttgggcaagacatccacccacgcagaggtattcttggcagagaaatatttgtacagccgagtcttcagcgtgcgaatagctctctctgcgacggcagccttcttctttgagctggtctcatacttcttaatgccattttctgcgaagaactcctgcatgggtttggccacaaactccagccctcggtccgtgtacagtgtttccggaagttttggcatttggccaaacacctcctcaaatgcccttttaacgtccgccggcctcttactcttcacgggtgagccgaacatacgccgcgacaacacatccaccgccaacagcaggtaccgatagccgctgttctttcgcgaaagggcttggaagtctgccaagtccgcctgaacgtctgagccgatcacgtgaaaataacgtggacaaactcaccggtcatgaaccctccggggactgtgcgaaggcgtcggaacttctccctctttggcttaaacagcgtgtaggtggtgttccgctgcaaaaagtcatcaaagtcggtcctcttcagttttgggtgcttcttctttaccgctgcatagagtgcactcgcacccgcaaacccaccgggattggccgggtcggtgtatattttgtttattttttcgtccatttagagggaacaaatcctcccgtttgtttgacttgtccagacccaacgaatagtcgattaagtaggctactggcgagcggattctgtgcgagtttcctcatcaactctttggttccgcttggtgaaggggaattctccgggcgagggtccaccaggcgttcaatcgaccaggccaggtccgagtcgatgaact

SEQ ID NO: 617 - DNA, 2222 bp, Heterodera glycines
  unsure (1)..(2222): unsure at all n locations
gttccaccaaacaaaggctgattgattgattcattgtttgattcttctactgtcattggacgaactgacaaaagagaacagcggacgaagagcggacttcgacacgtggcgacccattggccattgcgaaccgaattttcaaaggtggacagattcaaatttttgttaaaatttgaaaaagctagttggctagcaaaaattttaaaatgagttcgccaatattggatataattcaagggctagtcaatcgattagaggttgagttaaccaaagaaattccgataaatcctggtcaaaatgccaccccaaatacaatccaaagacatttgtacagagcaaaaaatgcttgtgatgagttaagcgaaattttggaagaaattcagagaaagcgcgtagaaatggcagaaagtttgcaaaaaattgcagttgcagcgcgcgaaaataaggaaagagtttatgtagacttttgtacgcatcttgacattgaggcaaaaattaatcgagcagtaattaagaaaaatgaatggcaaaacaaaaaagaacaattggaagatatttttgacataaaccctcaaaattcgctaaatagcacaattcttactccaagaaatcagcccatcaaaagagtgaaaattccacaaatacaattgaaaaaatttgatgggtcagttgaaaaatggataccattttgggagacattcagagtacatgtccacgaggatgattcggttaccaaaattgaaaagcataatttattagagtcaaatttagaaggggaagctaaggagctaattgagggaataccaatttcggaagatggttatcaaattgcaattgatttacttttggaaaaatacggtaaaagtaccaaactaataagggcactcaatcaagaaattaatttattcccaccaagcacgagtcataaagaagtaaatcacaacaaatatgagtcagaggcaacaatgaattttgcagtaaaatttagagaggaatggaaaaaagtacaaaacgaacaaaaacacaaaaattttggaagcaaaaacgatcaaagacggaggtttagctcctccccagaatattcagtggatcataaaaattctcaaaattcaaataatcaaagattttcgagaccacaaaacagatgggaaagagggaagaaaaaagggtccccatacccaaacaaatttcgttcaagctcaaatagctcaaattattccaacggctcaaattattcaaataagagtcctcctaaatttccacgtcatttttgtgaacaaattcactcaccagtattttgcaaaacatatcagacagctgagaaaagaaaggaacaagcaataaagaaaaaattgtgtttaagatgtttaagaaggggtcattttgccaaagaatgcttttcaaaaaagagaaattgcttattttgcaaaagcgcaaatcatcactcggctttatgccgatggtcaaaaatgaatgattcaagcccaaaacgaaaagattttgttaatgcaagtacaaaagaagtaaatgatgaagttttggcttcaaaaataattgaaagtattaatgcagcatcatgcttaattacccaaccaaataaaatatcagtgttaaaatgtcgatatgtcacaatttataatccattaaataaaaaacttagaaaaagggttttagcatttttcgacgatggcagtcaaaaaacttatattgaagaagaattagcaagaagccttaaattaacagtgattggaagacaaaaattagaactttctggtttaggtggagcaaatttgggaaaattcgaaagcccagtagttgaatttggcttaaaagcgagagattttaatatgttaatgattggaagagcaattaaaaaagtcttaaaagaaattcccgttttggactatcaggaaataaataatgatgaattaaagaaaaacaatatttcagttccatatttactcgatgaaccaaaaattaccatcgggaagcgatttttacaattattttgacattcgacccattaaacttttaattccttgggtttttggatcagcaattctaaaattggtaaatttttgagtggtgaatggaaaagtaacttggactcttataaatgggcgaaaatgtgaacacaaaggacgaatataacgtatcagccataaactcaagtgcaatacaatgtngaactgaaataactgatcaaatgggattggacaaaa

SEQ ID NO: 618 - DNA, 9630 bp, Heterodera glycines
gggattggggagacttatcagaaaaggaagaaaatatcgtttgaaaaaatgattaaaaatatttctttcaatggcaaaaggtaccaatcaaaattactttggatagaagaagaagccgaaaaattgcccacaaattttgcaatggcttacagtcaattaaaatcaaatttgaaacggttacgcacaaacccaaaattactccaattatatcataacacaattttggaacagattaatgaccaaggatcagtggaaataactaatccgttggtggacccaaaccaaaaaggacaaaaaattcattatttaccccatcatggcgtagtgaaagaaactagtgaacacactaaattaaggattgtttacaatgcaagtgctaaaagcggtaaaaacccagctttaaatgaatgcatagaaaagggcacgaatgaatacaatgatttaaccggtattcaattacgcacgaggttaaaaaatatattgattggctctgatattgctaaagcatttcatcaaattgaattagcacctgaagaccgaaattgtgtacgttttttgtgggtggaagatccattcgacccaaacagtccattaattcattaccgttttaaaagagtgacttttggtgtcatttgtagccctgcccaattggcattaaccattaaattgcatttagaaaaatataaccaccccattattaagcaattggctcaaaatatttacgttgataatttactagtgggaattaaccataaaaaagattttcaaatggtttacgaattgattaaaaaggtgtttgctaaagcaggtatgaatgtgcgtgagtttgtgtcgaatgaattaagtgagcttcaaaaactcccaaaggaagaccgaatcgaaaaagaaactgtcaaattgttgggaatttggtggaatgtaaaaaatgacgaatattttataaaaatgccaaaattcgaaccaaataatgctgtaacaagaagaaaagtactatctcaaatagctaaaacatttgatccatgtgggatgacatctccaataatcttagctgctaaactttttcgtcaagaaatcgaaaatggaaaaaacctaaaatgggacagtaaattatccgattcagaagaacaaaaatggaaagaactcatgcttacatgggaaaataaagagatcaaatatccacgaaaattatttcaaaataatctttcagaacatactaaatttcaattacacgcttttactgatgcgtgttcaaaagcctttggcgcagcaatttatcttcgaattgaaaatgaccaacaaatttattgtaatttagtttttgctaaaagcttagtggtgcctgctaatatgccaaaaggcaaaaggacaattccaaatttagaattacatgcaacaatgctatgtggaaaatatttaaattttgtaaaaatcgaattcgaaaaagaaattaagattcaaaattgcactatttggtctgattcaaccgacgttctcgattttgtaagaagtgaacgcaaatttgacaaattcattagaaatagggtacaaaatataaaaaaatggcatttgaaacatattaatggcaaaaataatccagctgatttagcgtcaagaggaacatcagtggaagaattacaaaaaagtgaaatatggtggaaaggccccaattttctttcagaaagtgaaaactcttggcccaaaacaatacgggaatatgacccaataaatccaccagaaataaaggaaaaacaaaatgttatttttgagataaattcagcaattaaagaaaaggatttttgtgaatttgaaaaatatttcgaaagattttcaaaatgggaccgtttaaaaaattcaattgcttatgcacttcgagcctttaaaaaagaggaccaaaagaaagtttcccaaaatatggaaaaaatttcggatatcaaaaataaaaaaaatggaaatgacataacaaaagaaattattaaattaatcaggcctttagaggctaaagaaatccttaaagctgaaaagctaattttcaaattaatccaaacaaattcgtctccaaccaaatctattataagaaatttggatttgttcaaagatgacgatgatttatggcgcacaaaaggaagaattttaaaaagtggtttaaattatgacactattaatccaattttcattccaaataattcatatattgcgactttattgattagagatgcacatttgaagacaatgcatggcggtcgcgaattggtgaatagcaaattgagagaaaatttttggattcctaaaagcagaaggaaaatttatgaaatattaaaaagaaaaaacaaataaaaatgcgggatttgtgcaaaatttacaaataataaatatacatatcctaaaaaccctcctctaccagtgtttagagtaaaagggaaaagtgcatttgaacatgttggaattgattattttgggcccctctcagtaaaaacattggatggcaataaaaaatgttggggagcaatatttacatgtttaattgtaagagcaattcatttggagttagtttccgatgtaagtgccgaaaaatttcttttagcatttcggcgattcattaaaagaagaagagtgccaaaattaattatttccgataatggtacaaattttgtattagcaagtaaagcattaaaacaaatagcacttgaagaaaataaacaaaatagaatatggtcagaaatttatcgtgatcctatgatacaaaatttttcatcaaatttgggaattgattggcaatttaattcgccatatgcgagttggcgcgggggagcttacgagagaatgataggacttgttaagacacatttaattcggagtttaggaaaacggttattgagttttgaagaattaatgacatatttaatcgaagtcgagaggattgtaaacgaacgccctttaagctatataacccaagatgaagtgattgaaccattaaggccaatcgatatattaaatccgacggatggagaacctttctcattgaaattagatccgacatttgatcgggaagacataaatgaatattttgaaaagaaaactaaaagagaagaattatttgaaatttacaaaaaggcaatttttaaaagtgaaatattttggaaggaatggagtgaaaaatacttattatcgttaagagaaaagcacattaacaaaaataaagatggaaataaatacccaaaaatcggacaagtagtaatcgtgagagaccaggataattatccatgatcaatgtggaaattaggaaaaattttcgaaattctttctgatagaactgttaaattaaaaataggaaaccgaatggcggaaagacccacaaaattattatatcccttagaaatagaggatgaaggcgaagaatagctataattttagataatttaattaaatattatataatctattaataaaatcaaatttatttatttatttaaaatatatttttaaaaaaaatatattgatactttaattttaaataataatatttttactcattattcatatcattattctgacagaatgagcgacagccaaagcagtgatgatgaactgatgtattcggcggatgagaatttcgagatgaaagtctcggttcaaagcagcaaaaataatgacaaaatttcggaagccaaaaaacattcaaattgccaaaaagatccgttggaggatccaccaaatttcgaaaatttattagataacagtccaaattgccaaaaagatccgttggaggatcaacaaaattttggaaaagattcgttggaggatcagcaaaatttgctgaaaaatccgttggaggatgaacaaaattttggaaaaaatccgttggaggaaaaaagtaaaaaattcaaaattcctgaggatttgttggtggattctcaaaaaccaaaaattcggaattatgtgccagaaaacattccaaaagtggtggcacggtcaattttggtttttattgtggataatcaagtggaaatcgaactgaggcaaataatgaggaagaaggaaatgaaggcgatggtttttcgaccgagaaagtgggacaaaaatacaattggcacagaaatcgaaattggcacgattactcaatgcatagtgatatggagagaaaccatggacgctgaactgttggcagttctaacaaaagttgaagaaatatgttacgaactgctatgcatttggattgtccccaaaggagtgccaattcatgttatgaagaaaaggtttccggcaattgttcgagtaccggaagaagaaaatatcaacaatttattaacgaagttggagcaaattggaatgccaattgagaaaaggggcgaacaaaaatggcacgagacagtggcaacaaacgcacagaaagtgaattggaaccaattggggaatggacgcagagagaaggccgcgggaagccattcccacaattcatttgtgccgccacatttttcatcatatttgccaacaactaccaaaatgttcttcccaactccggaaatgccgaaaaaaggtgaaaattttggaaaaatccaatcagaaaattttgatccctttgtggtattgggagtaaaacgaaagtctcaatctccagaatcaaattatgaatatgaagacatttttgaaggccctttgtgcacaaaacgaacaaaattttgggtaaactcaaaatgtgaaactacaaaaacagaaccgttggaggttaaaacatttttcaaaaacgaaaataaggaaatttatcagcctcattggaagccaattgttttaagttcaccttcaggcaaaaaaggagctttctttttcgggaaaaattttgttttttcaaattttcatccgtcttcttttatgatggatggctttaaatgggacaatgtggaacaaaaatactgctttgaaaaggcctcgtattttggctattttaatttggcaaaaaaaattaaattcaaagatggaattactgaaccaagtgaatttaaaaagattactgacaaagagatggaccaatataagtcctttgaagaaaatcccaaattttttgatcagtatgaatggaatagggttcgagaaaatgtcattcgcccaattttatgggcaaaattcacacaaaatgaaaaatttggtcaaatgttgttggaaactggaaaccttccactgtatgaggcctcagtcaattttagctggggcatcggaattgacattagagaaagacagctaattttttcaaacatggaccaaggatttaaaggcaaaaatatgtgcggtcgtctgttagaagacattcgcgaaaaacttaacccaatgaatacaggaaaccaaaaagggcaaacaaacccaaaaaatgaaaaagatttagaccaaattttgaaaaagattgaaaacgacaggaaaatctgtgttttcaaaactgaaagtattttgagacaatgtactcggattaaagaagttgtcaaagaaaattgggacatgaatgtatttatccaagggagcatatacaatggccttggaagaaaagaaagtgatttggatttagttatgataaactcaaaaggaataccgaatgattggacaaaagatgacagttgccaattttttgacaaattgcgaaaaaagttaagagattctggaatggcattaacccggactctgataatcccttcccgaaatgtctccattttggaaatcacaattaattctgatgaccaagaaataaatgctcaaattagttgcaataatttgattggattgattaattcgaaatggtggcatgttgtgtacagttggatgtacgatttaaaactttatattttgccattttggaatgggctgacttttttgaaattcaccaaagtgctaatggaggcggcactttaaattcttatggttggacatcacttttaattttttatttgatgaaaattcctaaccccgttttaccaaatttgatcaaaattttaccagaaatttttgaaattcgaaatgttacatacacaaagaaacaaatttttgaagtactgaaacaaaaacttatttgggagacaaccaattcccagagcatttcttcactattcattggattttttgaattttatacaaaaatcaatttagaagagagccggttgaatatgaaagaaggaaaaacgatttttgggagaaaagtactcaggaaatgaaaatgcatttattcattttagagccgtttggggctttcaatgtcgcaaggagtgtgacacaaaatggatttatcaaaattaaaaatgcatttcatgtaacttgggaaaaattaaaattcggtattcataatccaaaaaagctgttagaagcaataaaaggaaaggaaaatgacgaaattatcgaagaaaaattgaatttgaacagaattttaatatctgatcaggaattagtccaaggacaagaggcaaacacaccaatggacagtgcgagtaagtcaagaaaatgggttcttaattcacaaaaatatttcttcaacgctttaatgattatcaatataataaatttctgtgtagccacccaaccaatgatttgccataatagagcccaaacaaaattggtccaattcaaaagggatacctcttcgtgcggaaaaatcagtagatttcttgaacaacccacccgagctttaatgctagatttatttcggccaaacccagacaattttcaatttgaggcctggagatgcataaaaactagacaaacacaaaaatacagaactgatttatttgggtacaaaattgaagaaatccctgatcaaattcttttaccaaccacttttgaagattgtcatcaaatggcaatttacaaaaaatgtgagtttggtgttttgtcaggagaaattggccaaaaacacaccaacaaaaaattaatcattgaacaatcatggtggaaaattgggttccaaaaaaccgagtccgaaaattgttttttgtcaaaaatcactttgtttggaaccccagggtcagacataatacattcaccagcagatgatacaaagaattgtaaatactcagatggacaatgccagttagaaaatggtgtttatcttttatgggagattaagaaaaacattaaaaatctttttgatgaaaaaacttgtgtttataaaagggaagaaaaaatcaatggcacttatgtcccaggtatttggatgtcaaatgataacaatcgggctttagtttttgatcaaaattcaaaaaaggtagagtcatgtggtgaaagattgcgtgttagtgcgcaaggatttgcaataattgaggaacaatttaaggaattaatgaaaaatgagaaaaattcgtttgatcaaaacataagaaacaaaagaaaaagattcaaacgttggaatactcctttctcaagtgaaatagagaatactcccttggacggagaagttcgagcaagccaattggcaatgcaattacaagccggtgctttttaccaaaacaaagaaattaagtcctctttccataaattaattgaaatggtttgtaaaacattggatgataatattttcaatgggtattctcatttaaacccttcattgtttataagacaaaaaactggtcaaacttttttagaagggcattggatttccgatgaaattttggaattttggggttgttcggcaattaatttctcctttgtcccgtctttagatggaaaatgttatgaatttattccattaaatttttctttagaccataccgaaaaacttttgataggatttttggatccaataacaatgattgtcaaagaaaatagtaaaatccaaacatgcactgagggacaatttaaaacaattttactgaacaataagctcataaaaataaaccaattaacaggcaaatatacttttattggagaaccaactatttataacatcaatcaaaaaatatggggtgaggaaaatttgcctatttttccggtacaaattttcaaacaattaattttaactaatttaacaaacaaacaaattgacatgttggaaatgcttcatgcattccgtactagccgaattattgataatagaccaaatgaagaccgaaaaatttggaattcaaaccaatttcgagcatttacctttcaaaatttaatcactgaaattgattggtggaaatatgtaattcgatcagtcattttagtcgttataattaattgggtctataaaatttataaatggaaacaaaaaatgctgatcagaaaagaaattaataagaggaatagtcaaaactttcagcaacaaactggtgccattcaaattccactggccgccctgaaacaacgtttcgttgggggagtgtcggcgcccacgaccgacgaagccgagatgccagagaatgccgaaagaattaaatgccaaaaacggaagagacggagaaaataatttttgaacaaatttgcatttaattatttattaatttaaatttcatttcatttctctattttattattcatccatatctttcatcctttgcttttgcgatcactttataagtcgttggagacaagaagaaaataagcgatagggaatttcacagtttaataaaaagcggaaaatgtccgtgagcggaaaaaagggggaaagatggaaaaattaaaaatctgttctcattcgcttaactttttaatccgttcaacatcttctctctccgattaaaaattatttattaatttcgaattttcgcaccgtaataaatatttgtcaccgggacattgtttgaaggttacggtaggggaaaatttggtactaaaaatcgtttcaccgggaaacgggaattggtccaccggggacttttgaaaacaaaatctgtcaaggggttggcccaccggaaattaaaagtgattggcaaactctaatttgttccaccaaacaaaggctgattgattgattcattgtttgattcttctactgtcattggacgaactgacaaaagagaacagcggacgaagagcggacttcgacacgtggcgacccattggccattgcgaaccgaattgtcaaaggtggacagattcaaatttttgttaaaatttgaaaaagctagttggctagcaaaaattttaaaatgagttcgccaatattggatataattcaagggctagtcaatcgattagaggttgagttaaccaaagaaattccgataaatcctggtcaaaatgccaccccaaatacaatccaaagacatttgtacagagcaaaaaatgcttgtgatgagttaagcgaaattttggaagaaattcagagaaagcgcgtagaaatggcagaaagtttgcaaaaaattgcagttgcagcgcgcgaaaataaggaaagagtttatgtagacttttgtacgcatcttgacattgaggcaaaaattaatcgagcagtaattaataaaaatgaatggcaaaacaaaaaagaacaattggaagatatttttgacataaaccctcaaaattcgctaaatagcacaattcttactccaagaatcagcccatcaaaagagtgaaaattccacaaatacaattgaaaaaatttgatgggtcagttgaaaaatggataccattttgggagacattaaaagtacatgtccacgaggatgattcggttaccaaaat

SEQ ID NO: 619 - DNA, 2383 bp, Heterodera glycines
  unsure (1)..(2383): unsure at all n locations
ttttctttagaccatacccgaaaaacttttgatagagattttggatccaatancaatgattgtcaaagaaaatagtaaaatccaaacatgcactgagggacaatntaaaacaattttactgaacaataagctcataaaaataaaccaattaacaggcaaatatacttttattggagaaccaactatttataacatcaatcaaaaaatatggggtgaggaaaatttacctatttttccggtacaaattttcaaacaattaattttaactaatttaacaaacaaacaaattgacatgttggaaatgcttcatgcattccgtactagccgaattattgacaatagaccaaatgaagaccgaaaaatttggaattcaaaccaatttcgagcatttacctttcaaaatttaatcactgaaattgattggtggaaatatgtaattcgatcagtcattttagtcgttataattaattgggtctacaaaatttataaatggaaacaaaaaatgctgatcagaaaagaaattaataagaggaatagtcaaaactttcagcaacaaactggtgccattcaaattccactggccgccctgaaacaacgtttcgttgggggagtgtcggcgcccacgaccgacgaagccgagatgccagagaatgccgaaagaattaaatgccaaaaacggaagagacggagaaaataatttttgaacaaatttgcatttaattatttattaatttaaatttcatttcatttctctattttattattcatccatatctttcatcctttgcttttgcgatcactttataagtcgttggagacaagaagaaaataagcgatagggaatttcacagtttaacaaaaagcggaaaatgtccgtgagcggaaaaaagggggaaagatggaaaaattaaaaatctgttctcattcgcttaactttttaatccgttcaacatcttctctctccgattaaaaattatttattaatttcgaattttcgcaccgtaataaatatttgtcaccgggacattatttgaaggttacggtaggggaaaatttggtgctaaaatttgtttcaccgggaaacgggagattggtccaccggggactttttgaaaacaaaatctgaaaaatcaaggggctcaccaggaattaagaagtgattggcaaactctaatttgttccaccaaacaaaggctgattgattgattcattgtttgattcttctactgtcattggacgaactgacaaaagagaacagcggacgaagagcggacttcgacacgtggcgacccattggccattgcgaaccgaattgtcaaaggtggacagattcaaatttttgttaaaatttgaaaaagctagttggctagcaaaaattttaaaatgagttcgccaatattggatataattcaagggctagtcaatcgattagaggttgagttaaccaaagaaattccgataaatcctggtcaaaatgccaccccaaatacaatccaaagacatttgtacagagcaaaaaatgcttgtgatgagttaagcgaaattttggaagaaattcagagaaagcgcgtaaaatggcagaaagtttgcaaaaaattgcagttgctgcgcgcgaaaataaggaaagagtttatgtagacttttgtacgcatcttgacattgaggcaaaaattaatcgagcagtaattaagaaaaatgaatggcaaaacaaaaaagaacaattggaagatatttttgacataaaccctcaaaattcgctaaatagcacaattcttactccaagaaatcagcccatcaaaagagtgaaaattccacaaatacaattgaaaaaatttgatgggtcagttgaaaaatggataccattttgggagacattcagagtacatgtccacgaggatgattcggttaccaaaattgaaaaaaacataatttattagagtcaaatttagaaggggaagctaaggagctaattgagggaataccaatttcggaagatggttatcaaattgcaattgatttacttttggaaaaatacggtaaaagtaccaaactaataagggcactcaatcaagaaattaatttattcccacaaagtgacactgtggaagaagatgaaaaattgtacattaaatttgaaaaaatttgcagacaattgtcaagtttaaatcaagacatggatctatcccctcattatttatcgctagaagggaaattatcaactttagttctggacaagtattttgttataaaagatgccgaagataatcaaaattggaatactacaaaatttagaaatgctctatcgagagcaattgagcaaattaaaaaaggcaagaagtgagacaaaaaacaagtacgagtcataaagaagtaaatcacaaca

SEQ ID NO: 620 - DNA, 1975 bp, Heterodera glycines
  unsure (1)..(1975): unsure at all n locations
ggaggtcttggaggggctatcactaaagaaaattggacgtttgaacnncagcagaaaatactatttatcccttaaccgtttgctatgtntagccaatctcttccggtggtttcggcacctccgaatgccccgctcatttcgtggtctcaatgggttcgtggcattttcctcatcccgtttcgctacctttacacaacggcaatggacgtgttcttcttcgtttgtacgtttgcaacttcacttttaaactatttgattaattaccaccgatatttagttgatttcttctttggagggcggccgccaagacgtccaatcaccggaaataatcgtcaaaagtgagcaccaagtttaattttttgtaattaaactgggtatttttgagacaccaaaattattatctgtcagtgttcattcgttaatttaaaaaacggcggtgttttaaaaatgaaagctaattttttttttgtggatttaaaagacgcaaaagtaaatttgggttctattgcacttaatgagtccaatggcattttatgagtccaaattcggagtttaaacaagctaaaatatacataaaacaaatttcatatcgaaaaaatgatgaattaagcaactgtactgctacataacatactgaatttgttgttgtcctttcagcaatgccaatccactggcacgagggcagcaggacgttttggcggatcgaatgtgaaaaatgattattttttccatatttttcgcaatttaattcaaaaattgcttccttttttcagcataatgcgtgaacaacaacaggtgtatgagtgtcatggacagaaattttgttgaatccatatataatcttgatcgtataaatttcgcttttccttaaaagatttggattgggaattttgccctagtcggacttttttaaaatatggggatcatcttcccacctaatccctgcgtttttcccatttttaaatatcttcgtggtcagtacgtagcgtaagccggtccttggtcatcaacaatttgccgaacgcccaactcaacggcccgcccatggatcagcttgtccgacggatggccgtataaaagaaagacgaaggaatgatgctcaccttcttccactacccttttccaaagtccaatttcttcccccaaaatttgcttttgctatccaattttcaaagatcgtattcaagtgatcatttttcatttcacatttcattttcttggtgtgtaataaaggttttgcgttgtaaaaccttgcgttcaaaagcaattgtgtgccatcccggccactcgaactccctgacattctcagggacggtcttaagccaatccggcaaattataataaaataaataaaaccaaaacaaaaactttttccaatcacttcattttcacataaaacattcatttcctaaaacgaatcaaaagttttggattcagccgcctcggttgacgtctgttctttaaaccgggtcagacgaagtcgaaacaaccgcagtcagcggccacagattaagagtctggtgctctcgattcgacttagcattttcaaaattccgccaaaaatcataaaaaaggtccaacgatcaatgtcggctgggattagatcagttttaggtcccgcaacggctagggttagaacgaatttgaatgagggactagcactcttacacaatcaaaatgttaccgccgaagcactcatccgtgcatctgaaaaaatcggccggagtgttaaattagtccagggatacatgcgggactgggacagaatcatggctgggttagacggggacgcaagaactgcggaggaagcggtttatcttgngtttcgcccaggcggtgaacagctcggagagctcattgttgaagcaaacgaagcggtgaccgaattggatctgcgaaccgatcaattgncgcattncagtcgcaccaatgcaacccgcacaacantcagcaggncagtccaagtgcaaccatt

SEQ ID NO: 621 - DNA, 13742 bp, Heterodera glycines
agggcttccctttttaggcacaaaaaatcgcgaaataggcacctaaaaaggcataaaaaaaatcgcaaaataggcacaaaaatcaccaaataggcaccaaaataggcaaataaaattttttattaacgatttttaggtaacaaaacacgttaaaacttaaatatttcatttttaaatgaaattattaaatagtttaaaggcttttttcaaataagaccaaatttctaaaccaaaaatttttattaagaaaaaaatattaaattttgggaccaatttctggaaaaaaattttcatttcttaagggtatattttctgaaatttttttggggcatttcttaggggtgtgtttttcgtttttattacatttttgttaaggagttttttcaaaaatcccaaataggcacattaggcacaaaaaccccgaaataggcaaaaataggcattataaaagtcatcgtagacagcccaaaccaagcggaaaacgcatttttcttgcttatctgaacgtattaagtgcgcaaaaattttaggcatttgcctaaaaaaaaagccctagtgatgaacatagatcaaaataatgtttggggaagctacatacaatttacgaagacgaacatgcaaaaattaaagaccatcagcaccagagagagagagagagaaaaacaaaacaaaaattgatttacaaatatcctttctatgtacatttaagatacgcgtaacaaagacaaagttaaaggaggcggtgccgagtttggtcatggtctatgacagacatcaccaattcaaatccccgacgattctttactgtcaattcacattcattactaacttctcttttttttttgctccccttttcccatttttgaattcctaagcgaaattttttttacattcgattagggtatcttaaattcctacataatttgttaaatacatatgtacatacataaacacacaaacaaatataattagctaattaaataattaaatttcatggtacttttctttttagacactccctgatgctttgtcatggacagaaattttgttgaatccatatgtaatcttgatcgtataaatttcgcttttccttaaaggatttggattgggaattttgccctagtcggacctttttaaaatatggggatcatcttcccacctaatccctgcgtttttcccattttttaaatatcttcgtggtcagtacgtagcgtaagccggtccttggtcatcaacaatttgccgaacgcccaactcaacggcccgcccatggatcagcttgtccgacggatggccgtataaaagaaagacgaatgaacgatgctcaccttcttccactaccattttccaaagtccaatttctttccccaaaatttccttctgctatccaattttcaaagatcgtattcaagtgatcattttcatttcacatttaattttcttggtgtgtaataaaggttttgcgttgtaaaaccttcttgcgttcaaagcaattgtgtgccatcccggccactcgaactccctgacattctcagggacggtcttaagccgatccggcaaattataataaaataaaaccaaaacaaaaaaaatatttttccaatcacttcattttcacataaaattttcatttcccaaaacgaatcaaaagttttggattcagccgcctcggttgacgtctgttctttaaaccgggtcagacgaagtcgaaacaaccgcagtcagcggccacagattaagagtctggtgctcttagattcgacagcattttcaaaattccgccaaaaatcataaaaaaggtccaacgatcaatgtcggctgggattagatcagttttaggtcccgcaacggctagggttagaacgaatttgaatgagggactagcgctcttacacaatcaaaatgttaccgccgaagcactcatccgtgcatctgaaaaaatcggccggagtgttaaattagtccagggatacatgcgggactgggacagaatcatggctgggttagacggggacgcaagaactgccgaggaagcggtttatcttgggtttcgcccaggcggtgaacagctcggagagctcattgttgaagccaacgaagcggtgaccgaattggatctgcgaaccgatcaattgcgcattcaagtcgcaccaatgcaaccgcaacaacatcagcaggcagtccaagtgcaaccattcgtcgcacatcgcccggtcgtcccattgcccaccatgggactcttggatttcgatgggaccccatcccgttggagttctttctgggccaattttcgggacaatgttgaccatagaaacgatttatccccggctcaaaaattgtgttatctcatgggacaattgaagggccccgcaaaagacattgttttggggtattccactacggacgctgattaccccatagtaaaggaagcccttgtcgggcggtacggagatgagacaaaacgtgcccacgaattacgggccgaactcatccgacttccaaaagcgaacgccgcaactccgtctctccgtttgttctcggaatccgtcgaacgtatttgtcggcaactcaattcgttggaagctggccttgacgatagtccatacctgattacggcattaatggaaaagttgccaggcgaaatccgtctaaaactgctcgagcaggagagagatggtggtgccaaatggacagcccgccaatggaggcttggtctttctggactagtgcagttaagggaagcggtgaatatggatcgcgaaaatatgcaccgccaaccaccgaataatggcggagtaggggagcggcgccaaaacagccatcaaacatttcagacgcagcctcgccgggctttcccggttgtcaagccggttagaccggaaattcgaaaccccacccctccgccacgaaaattttcaccaaattgctctttgtgcgagagtggcgatcacaagccgactaattgtccgcgttatttcaccgcgaaaaaacggcagcagcgattaacagaacaaggtcgctgtcatttgtgcattagaagtggccattccgcggccaattgcgcaactaatttcaaatgttcaaaatgtggtgatcggcatcacttaatcgtttgtccaaaatttcgttctgaacagtccaccactcaaaatcgggactctcgaagcgtccatttttctggtgaaaatagaggcggcatgcgccagggtcttttagcctcagcgccggtgtcagccaccgctttgtcgcaccctggaaaaaagagaaatccatcatatttaatggtaagaaccacgccggtgtataactatcgggaacccgccaatcccacaagagctccagttttttgggaccctgggagccaaacttcatttatcgccactgatttaactaatgaaataaaaccgcccagagtttcttcagaagaaatgattgttgggggttttatcggtaatcaaaaggaaacatattcccgtttccactccccgtgctactctgttatgcttggcagggaggacggtggttgggagcaaattctgcttaaccaaacagacagaatcacgccgcctattgagtgtttggtagaaccaagaaattcaaacgaatttttgagtggtgatgaccaggaagggcctatcccgtattttttggaaccaaaaatcatgatcggagttcgtgaattctggcgttttattctggatcgtagggaaattcgaccgggaatttttgaaatccagacagttttcggaacgatttatgggggcgaagaaatggcagttgcctcgaaccccgggaattcgctaacctgcacaatcattcaatcagcacacattcagcctgagtcggacgtcggccgcttctgggcattagagtcaattggcataactgactgtccaaaattgaatgatgatgaaaaggcactgaaaaaatttaatgagtcagtttctgctgaccctgaggggcgttacgaggtagctctcccatggaaggaggagggagagtacccggcggaaaatttcagattagcattttcaagactttctgcacttatacggagactgaaggaatcgccacaactttttagcggttgtaacgacattatacaggaatatttagagaaaggaataattgaaaaggcccatcgcgctaaaagtccacaacatttcttgccccaccatacagtgatgggcaaaaagcttcggatcgtttttgatgcttcatcccacgaaaagggtgcccaatcattaaacgaaatgttattttcggggccaaatctctatcctgatttagccggaaaactcattcagtttagggccacaaaataccctatttgggccgacatagaaaaggcttttctgatggtaagtctgaaagaatcggaccgtgaattttcaaaatttttgtgggtaaaaaatatatttgcaccactttctggggaaaatctcctcgttttccgctttcggaggataacatttggaatagtgtcttgcccttttctattggcagcgacactccaacatcatttggaagcatttcccagtgagttagcagaggaaatccgggaaaaatctctgctttacgttgataaccttctgcttttggctgattcgcctgaggaagcacgcagaaaggcagccgaagcacaaaaaattttcgccgcggctcaaatgcgtctgtgcgaattcattgcggctgatccgtcaagtttggacgaaatacctgaaaatgatcgcctccgaaatgaggcaccaacggttctcggactaaaatggactatttgtgaggacaatttgtctttgacttttcctacggttcctagtccggacggtttaacccggagaacggtcctaaaaacagttgcgtccttttttgaccccttagggttatgttcgccttgtttggttggggcgaaattgtttttccaaaaattatgggatggttcaaaaggctgggacgatccaatcccagcggaagagaccaaagaatgggatgaaattaaagccctctgggcagcaaaaacgatgcacatagcgcgcttcacgcctcgaattaacactggcggaattcaattacatgttttcaccgatgcatcacctaatgcgtttgcctgcacggtctatttgagagctgaaatgccgcagggaattctctcgtcgttggcttacgctcgttctcggctccgcccgaagaaaatggcggtggaccaggcggatggtctcactatcccacgattagagctacttggaatcctaatcggatctcgggcagtaaaatttgtgcataaacatttaaattatgagatcgaacaaattaatctttggtcagattcgcgcattgcgctttcgtggctagcgtccaccgataaaatgccgatgtttatagcgaatcgtgttcgagaaattcgcgccaatcggcacataatcttccgctatgttcgctccgcggacaatcccgcggacctcgccacgcggccagtgacacctgatgagttaaaattatcagaattatggtggagagggccaaattggctcggcaaaacacctgaaaattggccggacgaactcaccgtcagcctcccaccggaggaaagcgccatttcagagccaattgtctgcgctccgttgaccactccgccggcagtgttcgattttgatcggttcagttcatggcaaaaactgatcagaacggccatgtacgcgttgaaattcctgtcagaaacgggaaaaaagaggaaattgctccccgaatttagagaggctgaaaattttagcccagattgtaataaattcacacacaattggatcattagaatagtacaggggacttttagccccccaaaagaaacttatctggataatgacggcctgattcgtctcaaatcaaggctttgtggcactggaaacccgggattcgaacatccaattgtcatcccatcagagtcgtgggtctgcgcccttctcattaggcattcacatttgaatttgtgccacgccggtgttgactcaaccttgacagatttcttgcaaaattattggtgccataaggccaggcggacagtccgctcggtcatcttcagttgtaatatgtgcaaaagggatagggcaaggaaatttggactcccgcctatgccaccccttccgaaaaatcgcacatgtccctctgccgttttcgaaaatgtcggcatggattttttaggtccaacactttacaaaatacccaatgaacagcccgcaaaggcttgggtcctattgatcaccagtttggcatgcagggcggtacatctcgaattggtgtcgtccatgtcagcagagcattttttgcttgccttccgtcgctttgtcgcgcgaagaggacttccaaaatcgatcctttcagatcacggttctcaatttgtgttggccaaaacactttttgagaaaaacactgaagtgtccatcaaatggacgctaatccccgcatttagcccatggtcgggcggggtctatgaacgactaaattctctcataaagaattgttttcggagagttttaggccgacgactcttgagctgggaggaaataaacacatttttagcggaggctgaggcctcgatcaactcaaggccgatcacttttgtatcagatgagtctgacggtcctctgccgctcagaccaatcgattttattgctcctagagcaaaccttgaatttgaaggaacggatatggaagacgaaagttatcgtccatcggctgctgaaaaattagccaccagatggtgggcaacagctaaatccattagaaatttttgggaccgctggtccagcgaatatttgctcctcctccgggagcgtaatcaaacagcacataaaggaccgcaccttaattctaatgtccaacccgaacttgggcatattgttttagtggaacgcgacgaatatccacgaaacacatggccaatgggtagaattgtgggactgaatggtcccgaagggcatccccgtagtgccgaaattaaaatgccaaatggacatatttggacacgtccggtctcaaaattagttcccttagaggtaaatccggacaataaagacttaaaccaggccctgtcgccgcggggagattcccgggagggaaatgaggagtcaaatgaagaattaacgagaaatcagcgatcagaagaacccgttgaaatggggcctgaattgatcaatgagtcaattcggcccaaggccaaattcagatgggcgaaaaatccgcctattcaaattcaacgggctagcaagacgccccgagcattaacatcgtctccagcttatttgttgtccatggtggcgattttcattctccttggggtaccgattgccgacgctttcgccctttcaacagcaaatcagcagtcgaatcagtcatcgtggataacctgtaatatgaagggggtcaaaatagaggccccagaagggtctaaaaacatagaattatgctgtgatgggatatgtgggaccagaaattacataaaaccattcgttttcccattactggaggagagtctcctctccggcttttcatgtcgggccacttattggtcgccacctgataacaccattcaacaaaatatagaatgtgcaccaatagacgtatgcactttattggactgctatttatgtgaaagccgaattttaaacgcacattgctcacccgcaatttcagcaatcctgattggaattctggctcttctggccggtttcatatgctgtgcactttgctgcttgttcagatggagcgcctggtgctacaaatcgcttcgaatgattgtcaaatgcatttttcgatgccagaaacacaaaaacctaaaatacacacgactccgaagggaatcctatggggataatagtgccgaagagggctattcgccacgaaattactacaggacaacgggtaagcctttaaccaaattgggctatgcattggccatttcggtcatggtttcaaatgttggatggactcatggtgatccagtttcgatcacagccaaaactgaggagtgtgaaacgagtccaatcagtaccgaatgccgtttaaattcggtgactttgttaaatttactcccggctggtcaaccggtggatcttatagtccggacaacggacgctgcggttttaggcaaaatcacattcaaattaaagggattagtacaagaatgtattcccgagtcggtgggattcattaggtcgtaccaagttaaaaccctggcgagcaaaagatgcccagggatgggctcatgttccggcaaaacctgtgaaaacttgttgcccaacggaaccgtttcagaattggccgaaggtaactcattcccaggtaattccttctgcttagacagcagcagcttttggttccatggatgcggtggaactaattccgcttgcttgtttttccgtaactacgcaactccgaccctaactggggaaggttctgtttatgaaatgttcagatgcccggcatggcaattccgaattaaaacggaaattaaagttagcttcagtgggggcattactattagtgaagagacagagctttactcgggtcgtacttttcacataaaaggggctaatttgtcggtcactccagccgtttttggcaacccggcggctccaataatgtccgaaacattttttggcggatcggacagtgctgttctcgttccgaacattgaacccgctttacattgtagaaacgaattagatgcgttgttaatgaaatgcgccctttcgttggacgcatgcacaaaatgccgtcccgatcacagcgaaggtattgttcgatgccactgcaaggaagtggacatcgaaagatggcggaacgacccgtctaaacgattaccactctcggtcggccctttaactcttaattatcgtaaacctaggcaggtttgggcggagtcggaatatgtacccgttcaaatggccttaaaaatggagggtttgactctaagcattcggaaagatatggccaaatgcataatcacaccagggggcttagcaggctgctatggatgtcggatgggaagccgttttaacttcacttgtaaggcatccctcggtaatcccctggcagatataatttgtgataatggtgcccgttgggttacacattgtccagaaaattcaataaaaatgaatgtgtcattatccctaaatgaaggggaggtaaaaaccgtttgccatgtatcttgccccgggggcattaccaattttacgatggaaggacttttacattatttgcctattgttagaggcgaatggaagatttctggaaataaagtcgaaagaggttctcaattgcccgacttttcgatactagaacatttttatcgagttttgagttgggtcctaggcggacctcaacttttcattgttgtgtgcgttttttgtgcaggaatcttcgggttgtacatttgtttgaagtgtaatccaattttccgtgcctatcgccgattgattcgagtagtcactctgatcaccatcttgttgatcactgcaccattggtcacatgtgatgagggcaccaaagatgaagagacgatcatcaaccagtcatggtcacaattcaaatttttgctttccaaattcaaggcagaattagcatggggcacttttctcattctggcatcggcaaacgtatatgccatttacataatctataaggaatggaccatacggcacggtgagccgcagagaaatcccatacgaaaggacagagtccagccaaggggtgatagaattatgcccggctttcgcctttgagacattcggcatttttttaacccatgtacaaaagcaaaaattaccatttttctcacaataattaatccataaatctttgatagagagggaaaatgtaaatcactaagcccaagacgggcagaaaggtggagcctcattagtataaaaaggaacagttggcctacaaaaattattctcaattttactcatctctttgcttacctgttcctttccacacttttgttcccatgtctcaacaaaaccaaccccaattcaccgctcctcctcccgctcccctctatccatacggctatgcgccgcactatggctacatgccaccacatgccccaatgggctaccaaccagtgccaaccgcaccaccgcccagttttgtgccacaacagcaggaatccgttccacaggctcatccgcagggcaatgcgacggttcaggcaaccgccgcgcaggccattccgcaaaattcggcctctgttccaccagcaactgccgcaccaattcaccaggtgcagcagaacaacaatggtcagggggtcgtcccccaagcgggccgtcaagcccaggacatgcaccagagcggaagccgttcacaggtggaatccatcccctaatttttttcacatattcctttattacctgtttcttccctccacaaattttccttccactcacgaattttatcattaaccatttcccagcacggaccggctccgtacgcattccgtcgcaaaggaaaattcggcgttgccaaaccggtcaatttcgggccccctccggccccgattcctcgagtttctgaggtgctgctccaattggtgaccgagttcaccaacttcaccaccgaatacacgcgcaacttcaacgcttttgcgaccagtttttcgtgtgattttaacaattacgcgacggagttcgcgcagttctcggcctgggtccgagagaatgctcatcaatttgggggcaaaaacgcttccggccaggcggctaatgaaacagaagacaaagaagaggaggaggaggaggaagaggaaaccgaggccaacgatgcctaagaaggaaacccctggctggggggaacttctgtcatggacagaaattttgttgaatccatatataatcttgatcgtataaatttcgcttttccttaaaagatttggattgggaattttgccctagtcggacttttttaaaatatggggatcatcttcccacctaatccctgcgtttttcccatttttaaatatcttcgtggtcagtacgtagcgtaagccggtccttggtcatcaacaatttgccgaacgcccaactcaacggcccgcccatggatcagcttgtccgacggatggccgtataaaagaaagacgaaggaatgatgctcaccttcttccactacccttttccaaagtccaatttcttcccccaaaatttgcttttgctatccaattttcaaagatcgtattcaagtgatcatttttcatttcacatttcattttcttggtgtgtaataaaggttttgcgttgtaaaaccttgcgttcaaaagcaattgtgtgccatcccggccactcgaactccctgacattctcagggacggtcttaagccaatccggcaaattataataaaataaataaaaccaaaacaaaaactttttccaatcacttcattttcacataaaacattcatttcctaaaacgaatcaaaagttttggattcagccgcctcggttgacgtctgttctttaaaccgggtcagacgaagtcgaaacaaccgcagtcagcggccacaatgagcaggcgctggccattgacaagcaaaaagcggagcaactcaaaatggaaaagcaacgggcggaggcggacaaaatgaacaacaggaaggcatttttggcacgaaaacggggcgaagtggcggcaaacattggcaaaacggcggcggaaacgaatggcaccggcggcggcactgtggcggaggagaaggacgaggatttggtacgcattcggctcgtgttcccgagttctgcccgcatggaacagaactttcgccactccgacagtctcgaggtatgtttttttgtgtgtagttcgacgacagcaagcagtccaacagctggttattctcattgcatcaagaaaaaagattatttccatctttcaagcgttttatgatgcattaaaaagtttttcacaaaaattgttacaaaaaatcgctaaaaacttttttgaaaaatttttttttcttaaaattttataaggtttttcttttttgaaaatttccgggatgagggaatagggacaaaacaaacgtcaccgaccgaaacgtcaccgcaaaatttttagttaactagccctaattcgaacaaaaaaaatttttttttagaaaattcaaggaatgaaacaaattcggtggcaggcctcattttgggggtgtactcgggaaacgtagtgtagcaccacccatctcaattcttctttaaaattggtgttaaattccctccatttcacagcgtctcttcgatgttgccttcatccatccggactgtcccgacaatttctctctcttcaccaatttcccggtcaaacaattgaactgcgcgcccgactggtaccggagcgagtttcgtcctgctgccgctgctgctgattcggtgatggaaaaaaatgccgacgacgccgactccgttgttggcacttttgctgacgccggcctttccaaatcggcaaatgtggtggtccgggacaacgacgcataaaatgccatgccattgaatgcctgcggagattgcgagaatggggaggaatctgctggatggatggacgggacattcattcattaattattattattatattgttttgtgtgttgtattgctctcttcgctatgctattgtaaaccaggcccgtatcccgtgaaaaattttaaaaattggcaaaaaaaattatttgaaaatttttacagaaaatgtcccgatggcgccttaacggcacattgtaccatcatttttgaaaatttggccccaaaatggcaaaaaaaaagccatttttgggacaaaacctgcttcatcactagggcgatgaaaattttgaaaaattaagccctccccccaaaaattttcctggatacgatactgttggcaacacagcagcatttcccctctcatttcattccaattgtgaactgcttgctggtcatcttcctatgtggtgttctgttttcccctggataaacacattaattttattttagttgacttctgctgcatacctgctgaacaaggggggggggggggaaggaaagttggtggtaatgctttctcttattacagatttattaccttttgactttctgtttttgccatttttattttttttgacattactttatttttattaagtattactgataattagagttacaattaataattctttgtgttcacttaaatgccgacctcgattccatgactaccaattacaaacatttcctgcttcctaccccataattatcgaattctttatatttacgaataccaattttaaatattaatcgcattccaattaactcaaattttcctgatcatgtccacaagacatcatttaagaattgacagtgatctatctctatttttttaaattcattattttatagacttaatttacccatttttgtaacaaatcatcttctcaattagctttatatactaaaaatattataaaaatgctaaacactcgttttctaaaatttacgcttttttcagtttgttttttattccaaataaattttaccattttccatgacaaaaaaaaaacagatttgtggaagcaattaatgtgccaattgtgtcataggttaaggcaaccatcccgaaaaactattgttttttgatgatgtcatttatgatttttttttcttatttgactttgataaaaaagtaaccttacccccatttttttccttttcattttggcc

SEQ ID NO: 622 - DNA, 1934 bp, Heterodera glycines
aagagtgagaaagagaaaaaagtcagcgaaaatgtcgatcgtaactatgaaaaaagaaattttataaagaaaaattgccttattttttaacaaacttcattaaaaattccaaattttctacgatcgactaaactcaatttgtgaaaaacttatcgatcgtaagagaaaagtgggtaaaaaccccaaattttgccggcttttaaaaaattccaaatttttacgatcgactaaaatcaacattttccctttcgtctataattgtctttaaaatttggcttaaaagcataaaattggtcatttttaggtgcaaaaaaaaatttttttttttggaaaaagtagcgtaaaaaagtggtatgaaagttttcctaggcgttcaaaatttttaaataagactggcagaaaatttttattgatcgactaatattttggttggacaaattatgattttgctttgtttgtttgttaacattagagctaggggaatttgtgccgaaggtaccccctccactttttgaaaaaaaaattttctcgagaagtcattttagggatttcagagtcgaagaacacggacaaaaatccaaggctgccaaaaatggcctagatttattaaaacggagcgggaatttttttttaattgatacagtactacttttgtccatttacagtaatcgcgacaatgtaaggaaggattgagcaagaggaggattaaaaaatgcttaaagcggacgcataaataaagaaccataaaaaagagaaaggcgaatggtcagaggattaagcatggtttgggtgggagaagccttaccaccagactgaggccgagggttcgattccctcccaggtcgaaaaactgtgcacacctctccatgcaattacaattccaacaaaatattaaatacattgaaaatgaattaataaattttaataatttctagttttttttttcttcaaaagtttatgataaaaaaatctaattaaggtaacttggcagcaattttaaagaaaaaaaaattaattaactaaaaagaagaaaataatttaaaattataaatatttttttcattttccaaaaatcgctgaaattttttccgtgagaactgtcagaaaggatgtcactagatgatagacaactgatgagaaaggtgatctgattgaccaaaaaaatgttatcagactaattagatttagcacaaaggaaaattctatcgtgaaaaaacttacagttttataaaattggaaagttgatcagcgaattgtgagcaaatgagtacaaagtttaaagtgattagaaaatatcatgccaattacgaacagatgatgaataagtggaatattgaaaataattgagcaaattaagataaagtgatcggtaatgattaaaggctaggtgtaatcaatagcatttaaaatggagcaattaaaatttatttactataaaaaagttggcatcgttgagcagaccggcaaaaagtcgccatcgtttgcaatctgattaatttaaaatttggagaaactcgagagtcttgagtgtgtacaattaatatgacatttttccgacgtcatttcattttttcgtttgttaaatgatgtcagtttttgcgcttttcagtgtcacaatttttggtgtccactttcacgccgtttttgaggaaaatgcaagtatcaaacaaaatgagcacaaacaaagacaataaataacaaaaaatgaaatcattttgatgaaatattagtatgtagagaccggattgtgcagcatttgctgaaattttttgctaacttggggcgtgctaataagcatgaaaaacgcatttctaacttagtttgaggcttctaagtccatctttttcatgctgatttttgcttaaattggtttttttcgtgcttcctgctgagcacgccattttggcgctgaatttatcattttcatgcttatt

SEQ ID NO: 623 - DNA, 1191 bp, Heterodera glycines
  unsure (1)..(1191): unsure at all n locations
tagatattntggaagattgaatgtaatgtttagtaggccagtaagcctaagaaattccattttagaaattgtactcgtaatattaaatttttagagactattttcccatttctagtgctcgttttgcgggttatttagggcctgcctgcccaatattgcctgttctcactgccataaaaagtgaattcttcaatgttgtaaaaattactctcatatttttcccggcgacggcagctaattcttttaggcatttttatatcccacaaaaaattgtcaggtattgaaagctgaagattttgtaatttttcttatctaatataaaatccaagtattattttttttttggctatccttattggcaaatttaataataaaatatgcaaacatttcctgtcaaaaataattgttgagaaaatcaatcattattgccatttccggcgtcaatttaataatcaaatttaaaaacatatccaccggcaaatattaattgatcaaatccatttgctttataaattgcaacaaccattatgctgtcattagataatcatgtcacaaatgaaagccgtatttcttttttttatttttgggcattattattgctcgcttcacgaaatcggctgaaggaaagagtttgttttctttagataaaagcaaaattttaaataaaatttatttcttagaaatggcgatgccgggaatgtgaaatccgggatgatgccaaagattggtcatattttcactggtcttttggcactgtcctccgtcgcaccgggcacggtaaacgcttcccaaacgggtggagcagtccaatcagttcaacaacaatggacatcaccacctcaaatgccgggccaaaatttaatggtaagattagtaaaatgtcctattaatttttgaaaaaagcctcaggaaacgccgatatcaatgaaaaatcgtgaactatcacttggcggaaaggaaagtttcgaaactgcggtttatggacaatcaaaggtagaaagttaaaaaaaatcagattggttagttcatgggagcagtcaaacaagaaaatatggacagaagaacatgcttgaatttgctcattgaatgcttttccttccttttctgataccttttcataatttattctttggcatttatcaattccctagtttaataactttgccctaaatgttttcgatcggtgtcgtt

SEQ ID NO: 624 - DNA, 4337 bp, Heterodera glycines
  unsure (1)..(4337): unsure at all n locations
ttaaaaacggaaaatggaacgggaatcatattggggaaacattttncgggaataaatggagtaatgtacagaaattttcataagtgaaaaagaaaattatgacgaccaaaacgagttcagaatgggtataaatatcataaatagcgggcgaaatgaagaaatgggagaaatggagaataatgataagcaagttttagacgaagtggaaaatatgaacaaaaaaggcagattaaacgagtccagcaaattaaatggagttacttacgagagccattctttttttaaaacaattgatcatacagaaatggaactcttgacgaaagacgaagagcacgttctcaaatcactggaaaaatcgctacaatcgcagatgttagcggttcggaaaagtttcgctgaaagtgaggggtcgaaaatgccggtggaggacgaagaccaagtagcaccactaatggacgagtggggagaaaaggaggaaaagaaggaaaagaaggaagagaaaggaatgaaggaaaacaaaaaggaggaaaagaaggaaaaggaggaaaggaaggagaagagggaagtgcctaggaaaaaggcggaggaagaaaaacgaagcgcaagtgcggtgacggtcggagaagaagtcgtgtcaatcgtggactccacagaagaacgggaacaggagcgggaacaagaactgttcctaaacccgcaggtaacaaatgagcgcatggctttttgggaatcaacgctgtataatcattgcacaaaaaagacgtggcggaaaaagaggccaaccgaaagacggcagaagtgggagtgacagtcggctcaaaaaaaacgtgtttggagcgagctggagcctcctgtgttgcccgatgagccaatctcgaaatttagcgaaaaaatgcatcgatgcgcagagatcgaccaaaacacgaagaaagcacgtgtggtgatggatacactcctcgcaattcgagagaatgcgctcgaactgagcgaccaggcgcaaaagggtttccgtgaagtgcaaaaatgggtgcaaagattgaaaaatttgaagtggaagaagaaaagaaagaaaaaagtgggagtggttggacatcccccgtgacaggaaatgccgtgaagtgcaggagaagtggttggacaccaccagggactggaaattcggtgaagtgcttccgctgtggacgctgtggacgcatccgtcattttgcacgtaattgtcagaatacttccacaaaccaatggacgcaaggaaatcgcggatggccatcacagcaacctttgccgaacgaaccaagcacttcacaagcaaatgctgactccgtggtcgacattcctgaagagaccgggcttcggccaatgattaagcgatgagaattgttgcattttttagtccctaacataaaaaaaacacaaaaacacacaaaaaaatgcaacaaaaaacaataaatgatcgaaaaattagctttaattgttgggaaaacaatatgggcggcctgggacgaccaatcacatttcattaaccaaattgggcccccgccccgttcctcttttttgtgtcccccgttcccggccaataatcattctgttcgggagagggattggcttagccaatctcccaatctctctccctcctcccgctaattatcccgagaccgaactgggagtcccttcccccatcccacatttactcattatatataattgtattgtgcgcacattactcgaataaagggcatattcaaatgccgccgttgggatttttggagagggacactttgcctatttcagcaacaaacatcaattccctagtttaataactttgccctaaatgttttgtcgctttttataaacattatttgttgcacgaaaaattattttaaaaaaatcattgagttatttatatttgggatacaattaaatcgttgaccgtggtggtcacccggacaccatctcaagttccgattcgcaatttggtgataataattattaaaatgcattaataatttccgaaacgaacctcacaaatcataaaaaataggaaaaaagcatccagatgggaagaaaaaagtggccaaaaagaatgaccaccgaagtgattttttttataaatatttattattaagttgttttttctttatttttaatttttggaattaccaaaataaaagggaatccatatttttggattgaaaaaatactgaaacgaatatttcttagcttgattttgctatatttcggtttgagatttttgaatagtatttaatgatattgaagatttgggaaatttaaaaaaggaggcgcttgaacattccatttgaatatcttttaccgtatatgctctaattatagcccatgggggattatttttcaacctcctcagaaaaggggggataattagagactaggggattatgatagagggattatttttcaaaacacctcgtagactgggggataattggagactgcgggattaatagagactgggctataattagagcatatacggtagttaattttcttgtattatcctcaaccattaaatggttgttttattaatattattttaaataaattatgacaattaattttaataagagaaaaaaaatattatacttttgcaacctaaaatattaatttattttcgagtatttttcctttaattaagaagatgaaataattttttttttcatttttaggcctttttcgtcataatttacctattttgacagtttttatttcattttgtatgcatgttttataaaatgttctttcttcaattaacaaatttcttgattgattatttacagttttgctaggtttatatacgaattaaggaaattaattatacatttgtgcataaaaattttgaccaaactttgtcttcaaattattccatggaacatttttgactatttctcattttaaagaaatcataaaatgcttggctgctccgctttcttcaaaaggatatttttacgatcattaaaaattatttttattttattcattcgatttttcatcccttttatttatagtcgtaaaaattcaacagacatataaaagacaattctcgacgagacattatacaaaacaaagaaataataattaaaaaacgaagccaaactaacgaatgcttttttcaattttcctccttctcatggtcatttttattatttgttttatatttaaaaaataatttttatgttaattagtagggatgcaatttaatttagtcacggaaaacagcaaaagaggcgctatataggaaaaaaaataattaaatttccaaaaaacatacaatagataaccaaaaaatttttcaaaaatatatttgagaaagaatcgctgagaacattttcatttagggttatgttttcattttttgaaaatttttaggttcaatattagagttgttttttcccttttattgaatttttgttcaggaattttctaagaatctcgaaaaaggcaaatataggcatttcgtaatagcaaaaaatgctaaatttcaactcagacaattacaaccaagcaaaaaattcttaactcaacgaaacaattatttaataattgcatcccctaaaatatttttatttttaaattgcataataatttagacagccgaatttgcgagcggaaataattcgtcagaattggacattggcgatttctacaaaaatagctcatcaagtgatgtttaaaaaaacaaaaacaaaatttaattgcctcttttcagttccaatttataagaatgctcgcacttttgttcgtgagttcaatgccaaaatttaaaacggggattttgcatgtttttccatattttttagcaaaaaacagtttaaatttcaaataatatttgccggatttccttaatttcttatatctcactggttttgtgatttgccacttttatgtgccatttctcctcatttgaccaccgcggctgcgctgcgctccgtatgccgtgacactttttgggaggcacacacattggacctgttcaccagaagtggcacagtggcatacgaactgggcggaaccattgccaaaattggcactgtggtgggcagaattgaagatgccatccgcgcattaattccacaatcaactcaagaaaaaggtactgtacaaaaaaataaataaaacttaattggaaaaaacaatgtaattttttttgctcctggcattaaaataagaaggaagaatcgccgatgccaattagtgttttaatgacatttattatcagattttgcaataaaatggacaattttcttaataattaatttcagataatgaaaaattatcaaatgcaaaattgatttttttgaacatta

SEQ ID NO: 625 - DNA, 1163 bp, Heterodera glycines
attattttcatattatttaattatatttcataaaatgtaaaatattcaaatagaaactatccttttttaattaaaatgctcaagggccttaaggtcccgaaaaatagataccttaataaggcctaaaaataataaaaatatgtgcaatattattaattgaacgaaatgaatcatccattttgtttagaaaatcatatatttgacacatataattttttttttaattttttgtttatgataaacattttttggatagaatttgaattttttgggtggttcagattgtacgcaaagctttgttcaatttgtataaatttttaatgaacattaaaaaaagattcaactaacttttaaaatacaacaattttaatacaccgtattcaggtgctcgctaatgactacaataaaaaaaagacatgaattgacgtaaaaaatgtggacattaaaaaatattattatgataaaatttgttttatgcaatctttgaataaaatgttctcattatgtttaatcaatgatccatttctctagcagaacaagcaataaaggaataaactcaaaaaataaaattcacttgaagtaaatgcgtaattattttttatttattcgttaaaaaaaaaactaatttccatggcaacatccaaatcaataggtatgtgcaagagtctcgagaaattctacggttttctgtgatctcggggtcatttatcggtctcgataaaatcttttcctccacgtacaaaggataaaattgtaaaaaaaatctggaaaaactgaagattatcgccaattttgattttgtataaaattatatgtcattcgcttccttacgatgagagaagccggatggtgccatttttagagcgcggcgacaagtttgagccgagttacagacccgggactgaaatgtcatttacccttgggactgaattgcccaatgtctaaaaatgcgttaaagttcaaaaaatgtttgtggtactgaatagttcaatgtataaaaatgcattaaagttcaagaaatgtttcgatcgatcgctctagggtaaaaattggcaatttcaagcagtttttatattcaaatttaaaaaaattatcttattgccgcgaagcggcacgccaatggcgagcaagcgatgacggagcaagtagtggggtgcccgagt

SEQ ID NO: 626 - DNA, 807 bp, Heterodera glycines
  unsure (1)..(807): unsure at all n locations
ctaaaagtaaattgttaaattatttaaatgtaaattttcccctgcagaattttaaacaaattantgggaaacatcaaccgacggagatggctccctgcttttattgccgctaattttgccattgccttaaactccggcttctcagcttccaagcgctaatttaggacaaatgacattaatcaaatgaaaaattgctttaatttgaacggaaatgtttgctttgagtgatgcccacacgaacaccgcatggcacactccactgcttatgctttgcaattttggcacggattatttggcacttttgccaccgccattccgcacactcgcctccttaatcaaatccagggtcgttaaaacagattttccccgtaaaaataaaagaaaaacaaaagttcaacgcgccggattaaaaaaggcacatcatcaatttggccaaaactaattaattaattgggcgaggaccgaaatggaaattggccgcgtggcgctggtgccgagaagcccgtcaatgcctgctgcctgctgggggggggggggaggaggaggagcggtgattagccgctgcatagtaatccgccgctaaatgaaatccaaagacatattaatgatgtaaggtgctggtaaacattaagcggacggaatttaagcactaattgtatcaagggcattttcatttgcagttcgagtgccgaaatgcgaacagatagaacgaattccccaaaaatgaagttggccaaatttgaaaaggcgcacagcacgacatggcttctaagattattaatgccaaaacgaaaaaaatgtgcgggg

SEQ ID NO: 627 - DNA, 3330 bp, Heterodera glycines
gtgaggatcgaatgataatatcatttatataccagggatgggccgaggtttcgtttttctcatttcgcctttcgcattattcgcattttttggcgtttcgcatttcgcttttcgcatttcgctttttggcgcgaaatgcgacttttacacccctaagaattggattaaattcccacaaaatttttcaaaattttacctataaataggctaattttcagtgaaaacctgtttataaatgaccaaaatttccaattttttccccggcggcgcctatgggcaccgccgggccccccaaaactcctattttttcttagaaaatggcccaaaatcacaaaatttggtaatttgatgaaaaactgttctcagcggcgcgccaaaactcttatttctcattagaaaaatgatacaaaaatcacaaaatttgatgattttttggtgaaaatctgtcaacaaattttaatcaaattttcaaaaattttcccggcggcgcctgccccctcttcccaaaaagtttttttggaaaaagcgcgcctcaaaaaagcgttttattgatttttaaatttggaataaaattttaaaaaatgacttttgctttatgattttaactattaaaaagttgcagaaaaaatttcgcttttcgcattttcgcatattttggcttttcgcatttcgctttttttttcatttcgcatttttcagtttcgcaaatttcgcttttcgtatttcgctttttatttttcaatttggcccatccctgttatatacaaaatcaaaattggcggtatgttcagttttaccaaaaatcttttaccacatcttttaaagtcttcggcttctgccatgcatttgtgttgttcaatcttcgccctgggtttcagaattgctgcttaacggatagaccgtagcactgatgctgctccttcgcttacagtgtttcgcgaccggagtacagtaacgccgctgataaaggtgacccggttactgtggaacactttattgtacagcatgcggcaatcctcgcgtattgttttgttcaacgcccagtaaatcaccgggggaaatcctagggcgaaaaatctaattaaatattataagcaacagccgaccgtggacatggaacctaaaaaacgaatttttggaaattaattgccagccaaaattatgggtttgaccaagcaaattcagcgagagtgatcatccactgatgggcttcgttgtattgcaaatagacgtaaaagaagccggtcaaagaatgcatcagcgaaatcaaaaacacttggataaatgtctgagaatttaagaagtcataaaattaaatttactatcttaattggtcaaatttctgacaataattaagaaggcaatcctaaatcaatttgtttttaatttgcgctaaaaatctgtttctactgggtgactctgattgtgtaggtgctagtcaatgcgcgagaaagtgcataaatgatgacgtcacaaaaaggggtcggggtcgttttcgcgtgggccgttttcgcgtggggcgagtttttgaactataatttttttatttgtcaaccaaatccaataatcttggtatcattcgatagccctaagtgttctctattagcctacaaaatttggaaaaatttcgttaaggtccaaaaaagttatggtcagaagagttcaacaaaccaaattttccaactttttttggctcgaactttttttatactgaacgaaattttttggaattttgcaggctaatagtgcatctggagggctttcgaatcataccaagaatgttggatttggttggcaaagaaaaaagttatagtccaaaaactccgccccacgcgaaaacggcctggcccgccaaaagatgcttttagtgccattgaattttttggtctttttatttgccgcttttctcatgaagtaaaattaaatgttggagaataatcggcacagtttggttttgccgaactgtttaatctgaatgttgtgccatttgtgcaagagttgtgccaacaacggcaaagaagctttaattggtcatcaaaataaatccgagtttaacatcggtcgattaatctttgtttaaaccagaaatagagaattcagaaaattacagagcttatgaaattccaaaaaaaaattctgttataattaaaaaaataataatatttatgttgaagtttactgttataatgtgaatttccgttttaattttaggaccaaaaggtaaaaatgaaaaatcccaatttaaacagatagaatttttttaaagttttttcttttcccaagggggttatgttatcattaattaatgcctctgtataaaattgtgagtccattaatgaatttttgcagagaaatctaatttattactaatctttcatttttttaattccttcccatttttgcgtccatattaatgagtgcttttgctttgcattccaaattaatagcatgccaatttgtctaatttaatggcaccacctcacgcgcccccgctttttttcacatgctaaaatttaaatgaaacttaacaaatgaaaattattttgaatatttaaatctcgttttaataattgaaaaattattttaaaagtatttttaaaattaattatctttttgaaaagcttaatgtttgcagttaaataattaattgtcaataaataaataaatatattaaaatttccctaaagtatatgggattaaggaaggtgtgtaaaaaatttaccgttcattatttattttaagtgctctcaattgtcggaaacggatgtgtaattcctccgcccccccccccctccccttggtccataatattttggattatctttggccccttctgtttcacactctttggcacggctaattcttcacgtgaccatgtgaccaattgaatgaataatgcggcgccgggtgccgtgccgttggacggcggaagtcagtgacggatatatgagtgatgcccccctcccgcagtgccatcctatccggtgagggggcgaacgatgggaatggcacttcctttacaaatttaagtgttaatgggggagaggggacgatgagctcaacatttggggacgggaagggatgaaattaacagttaaaaagggagaaaaatgctaaaaagttcaatgccatccctctcattgggggaggagctttgaagggaatggcattttgtgtaaaacaaatttaaagggggcaatgacattattgggctaaggagtgaaaaaatttggctaaaagaggatgaggaagtagcacaaaaactgtaataattgcatggcatattcccgaggctaaataatggaccatacagcaaaattgccggggaat

SEQ ID NO: 628 - DNA, 2006 bp, Heterodera glycines
tatgcttcagaattgagtaaggctattaaaatgctcgctgaccagggaagataaattcaaattaatctttatttattataaaagaggaaatttccagacaatcatatctagatccagaagaattaaataatattaatagaattctttaataatttaagtttaatgtgttatttaatcattttgccaatttacgatcctttatcaaattgttatctatttatcaaataatgtttaaattaaaaattgtgatttttagcaaaaaaataaaaatttttaatttggagtccattttaaggattgccgggtttttgcaaaattgcaaaatattaaaattttatttcgaaaagaccacgaatccgacgggaaagggtaaaaagcccacaacccaccttcgctcgtaaagtgtccaattcggaaatataagtgccaaattgttggcgattcttacgtatatcgaagaaaagtttggcagctaagataaagtaaatgattggacaaaggaaagccacgccaatgtcgtgcacaacttggatcggttcttcgtactgaattttggcaattataataatccaattttagattggcaatttaaaatgtgcaactttgacagatttcagtaaaactatcgcttcttttcatttttaatagttaaattcaaaataatatattcactaaatttgtttttattaacgatagataaaatcgaaaattcctaaggtttcaaagcatttcgttttcctcccaaaggatctaaagtgcgcgctttttcttaattatttagagaataaactaattaatttccaaatttttataacgaaaaataaattcgccagaaataaatgttttttaaaactttttcaaagctgcacacttttataagctaaagaaacttcattttcggttttgtgatagccaataaatgggttgtaaaaccaggcaaagaaaaggccgctgaacacgggcggctttatcaaaacggcccaataaagcgcataaagggaacagccgatgatccaataatttatgcggcgacccgagaacagaaaatgcgaggcacgggcactgctcagctcgagacagcggttgagtgccaaaacctgggataaattggtaattataattttatttcagcagtgtcttgtgagaatgggtaaaatcctgtcccagttacgaaattacggatccctttttttggtgcctcggaattagtaaccctcctccgttctgttcaatcaaaattccggactaatatattaattaattcatccattaccaaatccatcgtactttcggcaatataaattgcttaaaataaaagaaataaataaataaatcatgtgagttaaaaactcgatgcggtcatcccagcgaagtaaatcagtgtcggattggagcagaaaacggctccgcggaagctgagcaacgcgcttaaatagcccaggacgaacatgttgaccaggtcggtgatgccgatgtaaaacaacattttgtagcaagaattctcgcgcatatgcttccaaatggagtaaatgcagggcaaatataggacctgcatagttcgaaaatgttcgaaatagggtacggatttttatagatgtttcattttttctgactttctgagaactttggaagacagaatttgttttagttgctactgttaagcaactgttggctctgttatgatttttaatatatattcctgaaaccataaaaacatagaaatcctcttttatggattatatttaatattttctaccgattttttaatttttagtcatttttcctaaaaatgttggtgatttcggtccaatagatggagaaactgatcaaaaaagttttgatcaggacaccaaaaatgatcggataaggaatcattagtataatcacgtacgtagtaaatggtgcacagaatgcaaattacgattgactcgggcacaaattggcgctgctccaatgggacggagtcaatgatcacccccagtgcaattgtacaaccgttcgtattc

SEQ ID NO: 629 - DNA, 2202 bp, Heterodera glycines
  unsure (1)..(2202): unsure at all n locations
gcgttcgaaaatatttttgaccatattggtcagttttatgttgtcaatgcttaaattattgtgcatttttcgtgcaataaacatgccgcgctcatttttgagctaaatacataattgagtgaaaatttgaaaaaaaactttaaaaaaatcatagacatggtgaaaaatcatagatttgatcttgtcatatgacaaatctgatggcatattcatgcttagcaccctcgataaccccaagtgaagtcattaaaaacagactttttttcattgttattatgggaccaataatctccacctaatcacgaagcaatatcttagaaataacttctaaatatgttaagcattcgaatgataccaacatgtggattttgttgacaaagaaaaaagtttgagcgcttttgggggttttgtcaaagtttttaaagatttgacagttttcaaatttttcatgtaaaattcagaaattctttatcaaaaatgcaataaaaaataaatttttttttgacacgatgacatttttgtcgacatgttcaaaaaaattaaaaaaatttttcactaaataaatcagccgaaaaataatcccccagtctccatttatcccgcagtctctaattatccccccctttttatgaggaggttgaaaaataatcccccatgggctataattagagcatatacggtatttattttaattatgttaaaaattttgaaaaaatcaaaataggaaaaaaacgccctattttcggtgagaaaagtccaaaagtatttttcttgaacatttctcatttaaaataaagccgctgaaatttttaaaacctaagaatctcgaccctaatacctaataattaactgaaaaatttaatatttcgtttagaaaattaagatttttcctttttataaagaagtaatttttcgtgaaaaagattttttaggtcttctttcttctagttttgaaacataaattgtgaaaaaagcattttaacctcatctatattattcagggctcggatcgtaccaagtcactttccaagtacataacggggaaaatttgtgaaatccaagtacacataaaaatttgtagaattgagattttttgcctttcaaaaccattttttgtggcggtttttcatgaagggaggggggggggggggtccggcagtgccgataggcgccgccgggaaaattttaaaaattcggtgtaatttgttaacagattttcaccaaaaaatgacaaaatttttgcgattttggatcaattgttaagaaaaattgtgcgttattttttggggttgggcggtgccattggcgctgccgggagaaaaattagaactnttgtaccttttntaaacagattttgactgaaacttgtctatttctaggttagatntagtaaaaattaatgtttgttgacaaaatccaaaattttaaatttttttaataaaatatatatttttactttcgtactcaaatcaaaaatcccgatttccaagtacaattttggaaaaaagtacagttaaaattttccaagcacaaaatccgaaatccaagtacgaatccgagccctgatattattatattttattcaaagtttgagttctgacttaagtaaaattcttttaattaaatgattattttcaatttggaagaagttcataaaattgaagcgttagataattataggaatgaaattatgggttatagagatttttgaatttatatcatacaaacaaaaattatatattttgaacatataatttaaaaagcttttttgatggttatgttttattaggaccttcaatagtttcgataaaaaatagcttgtaaatttgtagttaggaagcagaaaatttttaaaattgaaattagtgactccaaaaaagtacaaagttcttgactgcttttatgtttgctttgccaaaattatcggtagcttataatttagaagagataactaaaattatggtccaatttcttatttttagaaaaatatcaatgttatgttaaaaatatttgggagataatatttttaagaaatctcaaaaatactattaaaataaaagaaatgaaaaaagtaaattcgcaaatgcattttatataaaataaaaaaaggacggcatcgcttttcaacaattaataagtaaattttttaagaaagaaacggaataataaaagtgcattaagaagcacaattaggaataagaa

SEQ ID NO: 630 - DNA, 1468 bp, Heterodera glycines
aatttttctcaaaattcgtctccagtattttttattattcacaattgtattttttttatatattttataatttaagcatattattgatagaataagcttttttgccatgtcattacttgtgaggtggccaatttatctctttaaatttaaatttaaaaaataattttgagttaaatgtaaagagtgaatccttaacagttttgatctgattttccttgtaacttttgatcagttttctatcaataatatgcttaaattataaaatatataaaaaaatacaattgtgaataataaaagtgcaatgcattgaatgggtaaaatatattgatggattttttgcctccaaataatatttaaaaatatttaaaaataatatattcaaaataattattaattaattaaaatcatttgttccgtactgaaatgacccgcctcttctgatcacccacatcgatacttttgacacttcgactcatagatacttttgacactcgactcaccacggcactgaacccgtactcgcagagcaagaacgcaactattttgcgctttcgggcgtttttagcacctgttttgcacttttttggcaactattttagtactatttcgttatttgtagcacctaaaagtccggtctctagttgaagttcttaatgacaattattttccatttttactattaaaagttcgtctacatagttacaaagatcataaattaatgtttaatacaggtatattatcaataaatgattgatttttttttaataacgcatttctgcgttgaaatttttgaattctcatgtcattatcggtcactagaaatcactattttggcgattcgcactaaaataatgaaaattcactattttgtcactattttttttatctatttcgacttttttggaaaattccttaacaaaaatgcaataaaaacgaaaaaattcacccctaagaatcgagataaaaaaattgcaataagaatcgacctaaaaattttaaaaaatacacccctatgaattgaaaaatgttctcaaaaatttatcacgcaaattttttttttgaaaaaatttttgatttaaaaatgtcaatatttgctaagaatttattagaaaggaaatatacctcattttgaaacagcaaatagtgaataaaaattttttctgctcaattttaggctgaaaattacatcactattcgtcactatttcggactttttgtcactattttgtaactattttggcatttttactcactatcttagttaactatgtcgagatttttcgtcactaaaagttgagaccctagtgataagtaacttgattgttgaaaaacctaacgtgaacttaaagatatagaagttcgttatacttataaaaaaaactttttgtttctaaagacattttaatcataactagagacccgcaaaaaaggcaccaaaaatcgcgaaaaaggcactataataggcacg

SEQ ID NO: 631 - DNA, 3081 bp, Heterodera glycines
aaaatacgctgacccacaaaatgtccagcccacgaaatgtccaagtctcgaatttgagttttttattattcagatgggcctaaggttaggcaaggggtaatataaagggtatattcgtattcagcgaccccgaaaaccctaaaaatcctaaattagactcattttgtttttataaattttgaaaaattttggacatttcgtgggtttttactcttttggacattccgtggcttggacactttgtgggggtgccataaaataaaataaaaaggtacatgcctcaaaatccggtcccttgttatgctgatcatcaaaataagtaaacaacacaaacaattttgaattagcgcgtctgaaatgcctttggcgttatgtttttatcttcagtggtttttgtaagatagtaaaggtaaaggggaaaaggcggagttcgagtccgttgcacaatattatattatttattattttttcggtctattaaaggcataaccgataaccctgtaaatgtcttcctatatgtccaaatattcatcttcattttatacgcctgcaaccgaacccaactgccactgcgctagcattcgtaaattgggcatttgcgcttctgccgcatttacgggagctgccctttacattaaccttgtggaacagccaagccgtctgcaattggaaaccgctgccgcgttgaaacagtttaaagagagttacacacgtgcgattcccatgcaagtatgtataagatgcaaactaatgcataattgaagcagaattttccctcatcgaagattaactattctatatttcttaggctggtttggcaattctttctggcattgttggcatcggtggtacaattaagactggcgagaaggcttgggcttttggcgctgctttaatgttggccaatattccatacacttttctatgcgtttttccagtcaacaaacgtttgctggctaccaacgtaacaaaataaattggaattggaaggggtggagcccaaacaaaaaatacaaatttaactaagggagaacacttatggcctggttattatatgtagttcattaaaatatcgtaaaaattgagctgaacacgaaccatttaatagcaaaaatcctaagatttttaaaacccagaggtggaatttttttttttgatttctctcctctccccgtaaattggactgactccgccaaaaggtgtaccgacatttcgccaacttgacatctcgccaactgacatctcgccaactgacatttcgccaactcagccaaaaacattcatttcgccaactcaaccaaaaacattcatttcgccaactcagccaaaaacattcatttcgcctactaagccaaaatctgacatttcgccaactgacatttcgccaaatagttaaaaaaattaaagaaaaaaaagtaaaaagagtaaaaaaatgctgtgttaatatcaaatacagccctattccagtttacacgtccaatcagtgaccatcatcatttcttatgtcctgttcggcgcgcttttttcaactatgttcagcgcggcaccgctggagttcaaggatggctggcgtatttgccaaaacctacattggcaccactcaattcgagattgatcgcggggcggaggcatttgaaccgcatgctgatgtcggacactttcttctgcgtcgcactcgaagcacaactcgtaaatgcacctattctgtcatgaaatttatgaaatttttcaattttagcgttcagtatttcccaggcatccataatgacaggcagtggaccaatacaattcggactgcattcgccacaaccttcaactccaaccattccattgtcagaagaatgcagcttattccacgctgggaacaagacatcgtctgtcctccacgtttcccgatctcgttttggaatgtatacaccagggctcaaatggcaattgagcgaacgaacaacggcatggaagccgcgcatggacaatttgcagtaaaaaatttcatcggaaaacattttttggtattttcagcgtgatctcaaccatcatccatcattgagtgacttcattgctgcattcatgaaggacatcaacaaacagttggacatcggacgcgcagaacagctccagaaaagcactaaacgacgacaacggtacgtcatcaaagaacaaaatgtggtgcggatccttgacgaggccgactttgaatcggaagaaggattgacaaacgccttgcacctgctcgggatcgtgatgcaaggctttgcggagggacttcacgtccgtggaaattcagagaatggtgaagaaactgaggccgatgaaaattgattttaaacattttcatattattgtttttttttgatattttatatattttatgaagatttctttgcttgaagcacttttataataaatttaatatcattatatagttaaaattcaattttcgactagttggcgaaattagttggcgaaacgtcagattttggctgagttggcgaaatgaatgtttttggctgagttggcgaaacgtcaggttggcgagatgtcagttggcgagatgtaaagttggtgagatgtcagttggcaaaatgtctgattttggctgagttggcgaaatgaatgtttttggctgagttggcgaaatgtcagttggcgaaatgtcatgtagccgtactttactcgtgtccttcgtaaatcgatcagttaaaagttggaattctcttgataaaacaatattagcaacaaattcgattaatacagggatgggattcgtccttgaatggcaaggacgtccttgaaattgggccctctttcttgaaaataaaaaatgtccttggatgcaaggacgtccttgaaattgggccctctttcttgaaaataaaaaatgtccttggatgcaaggacgtccttgaaaatgagcatttggaaaagtggaaaaaataatcaaaggaaatttggtaaatttttgaatttataacatatttggatattaaattatggcattatgtcaattttttgctcatagttgagaattattattttttattatagcggggtcagcgccttcggcgcatcccccgctag

SEQ ID NO: 632 - DNA, 1198 bp, Heterodera glycines
aaaaacattcatcaatcccttttcatggctataaaaatgtttgttttttcgctttgtctcgcatttgaaaaaaaataaaaatttctaacgcaattaattattctgctctttgtgtgacatcattcggaactcggccaaaattgtgctaattgccacaaaaatgaaccgacggtaagcaattttaaaagtcacacaaattcttcatttatttaactaaactttttcccatttcagttggatttgcaacgacgtttggatggacattttcccatcctttgaccgtcctcaactcggcctcaaaatggcacttctttcgccacgttttaattcgctggtggacaaacatttcgatggcaaaagcgaattgacaatttggagaccaatcgaaatttttccattgcgcgaccgtccgctgcccagcaaaattcgctttaaagaccttcggattgagtaatttaaaatcagagctgtcgcaataaaagctttccttccatttttaggtacattgatcactccgtcatcgcttttcttcgttcaaatcaccaaattttcgacaaaagaggcaccaatttagatttgtggatttattattcaaacaccacggatggccagcggatttgggatgtttttgttcgtgaaatttggccaattttttctgaaaacattcgccacttgggcttttacgatgctgttaatttggacaatttgcttcgtcgcacttcgtcgacaattctcactgatctcaaccaattgaattcaatcaatttatttggtctgtcgcccgctgcatttggtgatgattttgatgtgccaaattcaacaatttctgctggccaagcattgtccaaatggttgcactctccgagaaaagatggccaacccaagcgattgcgttgcgataattacaacgcacaagggaacactgattggatcaacaatttcaaggaggtgaccataataacgacaaattactgattttgttttccaaattgtttagcattttcttcgtgccaatgccatttcttccgtcagttacgaaattcgtttttctgttcatgcgccgtcaatacaaatggtgccatttgaattggtgaacgaatggacaaaggaaaagctgacattggctaaagcaaagggatgggacaaccgatggataatgaaacgatgcaaaattggagaggcagcggcggtcaattgg

SEQ ID NO: 633 - DNA, 2260 bp, Heterodera glycines
ctaatcatgacacataaacaaaaagatacaaaaacattcatctttcccttttcatggctataaaaatgtttgttttttcgctttgtctcgcatttgaaaaaaaaataaaaatttctaacgcaattaattattctgctctttgttgtgtgatatcattcggaactcggccaaaattgtgctaattgccacaaaaatgaaccgacggtaagcaatttgaaaagtcacacaaattcatcatttatttaactaaactttttcctatttcagttggatttgcaacgacgtttggatggacattttcccctcttttgaccgtactcaacttggcctcaaattggcacttctttcgccacgtttcaatgcgttggtggacaaacatttcgatggcaaaagcgaattgacaatttggagaccaatcgaaattcgtcgcaaggacaaaggaccagaaccgaaactatctgtacgaatcgattacaaatttgtggaatttccattgcccgaccgtccgttgcccagcaaaattcgctttaagaaccttcggatttagtaattaaaaatcaaagctttatggcaataaaagcattcattccattttcagttacatttatcactccgtcatcgcttttcttcgttcaaatcaccaaattttcgacaaaagaggcaccaatttagagttgtggcttccttattcacataccacgaatggccagcggatttgggatgtttttgttcgtgaaatttggccaattttttcggcaaatattcgccatttgtgcttttcccatcgtgatcatttggacaatttgcttcgtcaaatttcgccgacaattctcatcgatcttaatcagttgacttcaatcaaatcatttggtctgttgcccgctgcgtttggtgatgattttgatgggccaaattcaacaatttctgctggccaagcattgtccaaatggttgcactctccgagaaaagatggacaacccaagcgattgcattgcgcagacaaacaaacgaacttcgattggatcaacaatttcaaggaggtgtggcccaacatttttgtgatttttgttttcctatcaaattgtttagcaatttctccgtgccaatgccatttcttccgtcagttacgaaattcatttttatgttcgtacgccgtcaatgccaatggtgccattcgaattggtgaacgaatggacaaaggaaaagctgacattagccaaagcaaagggatgggacaaccgatggataatgaaacgatgcaaaattattggggagacggcagtggtcaattgggaagacggaaattgggacaacaattgtaacagtgtcttcgtttggctttttcgtaccactaattgcatcgggtgagcaattaaaaaaggcatttaattttgtttaaataattaaaattttgcttaatttagcccattgtctccgccaccagcagaagaagccggacaaaacatcacaaaagggccgtcatctgaactgacaatgagtgatggacaaacgaagaaaaacagtgatcagccgcagaaggaatgaatgaattgagaatgatcgaccgagcataattcaaatcagtgatcaaatgtatcttataagaaaaaacctctcaaatatgtatatgtaaataaatcggatgcataaaaatggcaaaaaatatacgaaaacctaaaaacaaaaaaaaatgaacaaaaaaaacaacttgttttttgtgcgttttaacccggcaacttaatttgaattgttagctaaatatgctggataaaattcgggatcattggtcccataaaaaaggtcaaaaatgctcgttttaagcgatactgcaaatttgaaaacttggaattagcgtaaaaggttcgaattctgggtaataatgcagaattgtggtcccgacgtggtgcccccccccatttttcggcagaaaatttttttgttttaaaaagccgtgaaaacatgcttctaagggttttttgggtctctgatcacgaatatggtatttattttggtctatttcgaaccccggactcgaactgaataaaaagtcgaaaaatcaaaatttcgaaaaattcattttatgttcgaatctgagcagaatgattatttttaggtgatggttttctgattaattttggcttgttttaatctattttagaagttaaaatgatttttttaattaatttcagatattttgttcgaattcgagtccgtggttctaaataagccaaaataaatgcatattcgtgataaacgaccc

SEQ ID NO: 634 - DNA, 7090 bp, Heterodera glycines
ttttgtgatttttgtttttccatcaaattgtttaccattttctccgtgccaatgccatttcttccgtcagttacgaaattcatttttatgtgcaagtgtcgtcaatgccaatggtgccatttgaattggtgaacgaatggacaaaggaaaagctgacattggccaaagcaaagggatgggacaaccgatggataatgaaacgatgcaaaattattggggagacagcggcggtcaattgggaagacggaaattgggacaacaattgtaacagtgtctgcgtttggcttttcagtaccactaattgcatcgggtgagcaattaaaaaaggcatttaattttgtttaaataattaaaattttgcttaattaaggccattgtctccgccaccagcagaagaagccggacaaaacatcacaaaagggccgtcatctgaactgacaatgagtgatggacaaacgaagaaaaacagtgatcagccgcagaaggaatgaatgaattgagaatgatcgaccgagcataattcaaatcagtgatcaaatgtatcttataagaaaaaacctctcaaatatgtatatgtaaataaatcggatgcataaaaatggcaaaaaatatacgaaaacctaaaaacaaaaaaaatgaacaaaaaaacaacttgttttttgtgcgttttaacccggcaacttaatttgaattgttagctaaatatgctggataaaattcgggatcattggtcccataaaaaaggtcaaaaatgctcgttttgagcgatactgcaaatttgaaaacttggaattagcgtaaaaggttcgaatggcatttattttggtctagtacttttccatttaaggcccacatatttaaatttcaaaaaagtcaataaagagttcgttaaatatccaaaaacagcgctgcagctattcgtgaggcataaatgcaataatttaggccaaaaaatcatcgaatgagtccgtttggtattttttcagtgttcacgctaaatgaattcgcacagataaaaacccaacatttgacgaaatttgaatgtgtgtcccccaacctaattcttaaagaatttttttaaaatacatccctaaaaaagtgaattttttcgaaatttattattcagcagcaagaagacaatgtcacagaaagagacatggacatatttacaataaatgtatatatcacagacagagacacaatctatcctcttttaaattggcagtcaatgttatcacggcgatctcgagaattcaatcctcctctcattgctgcgcagcagcagcaccgccaccctcctgacttccgctcgcgctcccttccgtactttcttcatcggagtcggactcgccacttccttccgatgattgctccacatccgattcgagctccggcagcacgcacacctcggcaagagagacgccagagaacagctgaaatgccaataattttgatgtgccgctgtctgtccttgtgccgcaaaacctctgccactcaatcactgaccttcctcaactcgtcgtcatcgcgcgctgcagttcggatgtgaaatgcactgagacgcttcatgccttcggcctgcgtgatctcgccaattttcttgagcagctcgcccgtgatgtgttccagcacagcagtcatgtagaccggcactccgttcgcgagacgtttggcatacggacctgtggatgtgaacaggaaagggaatgtatgattcgattgtgaatgaaacaaaatcagaatatggtgttgtcctgtattccaacatacccttcttcatcttgcgatggacacgaccgacggggaatttcaatccggcatgaaaagaacgaggctttgcacgatgacggggcattttgttgtacagcagtagaagacagttgaactttgatcagagcaacgaaataataatttgatagacaatgaaattttttcacattttacccatttatatagggaaaattcgctgaattgcaaaagcacaacgcggagttttgtcgtttcaaacaatttgatttgaaaagttagccatataaactgaaacaaaaacaccaaaatgtaccataaaatgattgacctgaccaaattatttttgttcatattttatttctttggtactgaagtttccattttcattgggactcagttgtcccagtgcttattaaatggcgccggttcgacttaattccttgatttttagacttagctcgtcgagaactttaaaaaagtcaataaagagttcgctaaatatccaaaaatagcgcttcagcaatttgtgaggcataaaagcaacaatttaggctaaaaatcatcgaatggatccgtttggatttgcagtgttcaagatttgacgaaatttgaatatgtggcccccaattcggaaattgtatttgatggcccagagccaaaaattataggttttcttaggtgttaaaaaaagatttgtaaaatcaaaaaatatgcggcaaagcgcttaaatccgttttttaacaggttaaagtgtggaaggaaaatgaatagaatagggcacactatttttcataaacataaatcttaaccctagcaataactggccgaattccaaaggattacatatatattttatacatatatacacattattccacatacaaaccgaattggcagcatacaaacacaatactacacatatgtggtaacatacacaggaaatgaatgaatgaacacatcaaaaatgggggacacaaatatcacacgacagacaattaaatgcgaaattgttcgtccattattatcgaatgccatcgccgtccgccgcgttcattcattgcgcatcaccacgttgtgtaatgttctcctcccgacggcactgtcgacgacgtcttcaattttgtctggtctcctcctccgagcattgtcgtcgtcttcacttttgtctggtctcctcctccgagcattgtcgtcgtcttcacttttgtctggtctcctcctccgagcattgtcgtcgtcttcaattttgtctgggccccgcctcgttccattgttgctgttgatggcgctggtcgtgatggtccaattgagcgtaagcttttcggcatcagcattcgaaatgagaacggctgcttcgtcttcattgttggcatcttggacatcattccgcttggcaccgccgtgatcgcaccaccaccgcttcgtcctccacgaccatggccatgcccagaagctgaggtcggcggccagtccctcgaatccgttggtccctgccgcgatttgtagtaactgcttgacactgctgtcgaaagctcatcgttgtcgtggccgaaacggcgttcgcggcacaaacagcaaatcacaacaatggcacacacaacaacgaggctgaaaaagggggaaaacgggaaatgattttgattgatgatggcattggcaaaatgaaagccctggaaaactcacacgagcaaaacagagacaccaatgatgatccatagcttgacactgagaccagcaaattcatttgtcgaagtcgtctcatcggttggtttcttgtgcttaacacgagtcgaagcgctggaaaaataggaaaatcagaaaacggaattgaggcggctctattgcatttttctcgacctttaaaaaattgcacgggaaataaattaaacggaatttaaaaactcgttcttttcacatttgtttcttttttttaaaacttggagaaaaccgaaagttttaaggtcgtggaaattgcaatagaacatccgccgtttgggctgtgcttttttttgtttacccatggcaacagttgaaaatgatcagagtaatgaacaacagacggagggcattttgaaggacagtggaagacatagtgggagaaatgtgaatgaatgaatgttaatgcacaaaaatgggggagacgaaggcgcttttatagcggagaaaaaagggatttagcaaaagcaatttttgaaaaataacggattaaaaagctttttgttcgaattcgggttcggggttcagaattggccgaaatacatgtcatatttttgattagcgagcctgaaaacctcggaaaacatgttttagtatgattttcataaacaaaaaaaaaatttgcgaaaaatgtgggaggggaaagaaaattttgtataaaaggacaatttttcacgaatgcgaatcatttgcccaataaatttgctattcaatcctttttattcctcgccattttctgcccaaattttcttcatcgccgccgctaacaacaacgtaattcaatgtcttcgtcaacaaataatgatggagcccaaaacaacgccaaccccaacaacacgcattcgcctgggcgttcatgcaactcgcacaccatggccattctgacgccgatcaaaggacaaccgacggaacaatcgcatcagcaccaccaccatcagcagcagcagcagcaacaaccgacgcaacacgtgcccatccagcgggaagacatcgcaacacagacggaccaacaagcggacgaagaagcggcgacagcaccagcactagtagcagcagcggtgacgcaggcgcaacatcagccgaagcagcagcaaccgccgccacaagtgaccaccaccaatgcgaattcgacaacaccgccaacgccgcaagtggagacaagcaacaacaacaacaaacggtagagttttggtgccattggacgggagggggagaggatgccgtcaaccaacaattttggttgatgataatgccatttttagacatcccaaattgttttctgcaggttttaaccccgggaaaccctaaccgacgtttttagcaattttttttaaagatttcagagtttggccctcctccctttgaattcatgggcattctctgttttttcacataaaacagaaattacgcaaaaaattttcctgcttttcagtgatccaaatgtgatggtggacgaccagcagcaacaacagccgaaacaacaacagatggtgccgccgccttctccactgcaaaacatcggacaaacgatgcgcaaagtcaaatcggccactaccccttatgaagcgctgagatgtgagctgatcgatgcgttggtggtgcagcccaaactacgacaacagcagaacaacaacggcaacaacgacggcaccggcaacaacgacggcaccggcaacggacatcgcggagggcttcgcaggcaaaaattcaaatcaatttgtcaccctcccccattttcccctctttttcaggtcaatttcggtgatcggtgacaattggttgtcctacgattgggttgaaagcgatcagccgatggaccaaattgagtaaaattcattcatttcaaattgtttggcactttttaatgcttttcccctttgtttaagcaatcagcaagagcagccgatcatcgacgatcccaacaacaacatcaacgcggatgaggggggcttggttgaccaaatcagcggcgcggtcgcttcactgtccacaatcaaccttggccctgtgtacaccgctgttggcaacggggtggactactttgggcacctgtggcagtatcgggtgagccaaaaatgccaaatttgacggatttaattgaatttcccctcctccgtttttcagctcttccgtttcgccttcatccttctgtgcttctactttggcatgggcttcatggaacggttggctgtcgcgatgatcgccgcatgcgtccgctgggcttggccaccggtgcacttcatgctcggctcgtcacggggaacgctgttctatttgacggactggttcgcatggatggaagactttttgtcaagttgggtgtgcgacatggccaacaggtgcggttttacggtgtgggggcacacggtcgataccgtaccaacactactaattccccacaccccattttcagatactgtcatcaatacggtgtgatgtgcgacagtcagtgttcctttgtcagccgaacgcagcgcgcagcttccttcaccggacgtcgcttctgaaggatgatacgcgagatgaaatgaattttgataacgatttttgatggcgacattgatgtgtatgtattgtatattctgtctattatggttctgctatttgagtacgtccgtgtatattgtatatgtactgtattgtattttgtatccatatggcatattcaattccaattttaacgcctaattttgtatacccatgttgtgttgcatgcgttcataaactttgtaaaattatatgtactcaattttatcagtgggctataaactattttttaggcgttttttgttattttttcatgactacattttccaagttttggactacaacttttttcattgttgaccaaatctaacaatcttggtatcattcgaaagcccttcacaagccctattagccttacaaaaaaccaaaaaaattttagcttgtaaaaaagttattaagaaaaaacttccaaaattttggtttttttgttatttcatgttataactagggatgccaaaaatatggaccaaaaatcgcgaaatatggacataaaatggcaaaaatctcaaaatatgaaataaatggcaaaaatgtcaaatatggacataaatttttcaaaattgagtgcaaaatttcttcaaatttattggttgaaattgcatatgagatacatttccaaattttttgactcggtaaggcgctttgacaaagacggctttcgttttgcaattagtcggtcaacattcggaaattggtctcgaattttttcggcaattacgggcaatcattttaaaagaaaaaaaacataaaagctaaaatttattaatttttttagcgcaaaatcaacaacaaaagcgaaattttcgcttttttgcttatttttgacacaaatttattaatttttaagaaaatttaaatttattcaatattctcgagaaattttggcgaaaaaatgattttttgaaaaatttttcgggttttgggctcaaaaaggctaatttagctgctgggggccgtctaatagaggtttttttgaaaaatgccaaaatatggaccaaaatgccaaaatatggaaaaatatggaaatatggacataaatcgcgaaatatggaaaagcaggggtcggggtcgggggggg

SEQ ID NO: 635 - DNA, 893 bp, Heterodera glycines
ttctcttggtttctcttactgttacattattcagtttatactttcgaatgataccaaaaagatagggtttgttcgaacatgaacaaagttattgtataaaaacccgggattgtcaattgattggactcataaaagtcgattggactcataaactgcaatagagccaaaatccgttccctaatcatgacacataaacaaaaagatacaaaaacattcatcaatcccttttcatggctataaaaatgtttgttttttcgctttgtcttgcatttgaaaaaaaaataaaaatttctaacgcaattaattattctgctcttttgtttgacatcattcggaactcgtccaaaattgtgctaattgcaaaaaaatgaaacgacggtaatgaattttaaaagtcacaaattcgtcgtttatttgactaaactgttttcccatttcagttggatttgcaacgacgtttggatggacattttcccatcctttgaccgtcctcaacttggcctcaaaatggcacttctttcgccacgtttcaatgcgttggtggacaaacatttcgatggcaaaagcgaattgacaatttggagatcaatcgaaattcgtcgcaaggacaaaggacctgaaccgaagctgtctgtacgaatcgatgacaaatttgtgccatttccattgcccgaccgtccgttgcccagcaaaatccgttttaagcatcttcggattgagtacttaaaaatcagagctatcgcaataaaagcattcatcccatttttaggtacatcgatcactccgtcatcgcttttcttcgttcaaatcaccaaattttcgacaaaagaggcaccaatttacatttgtggcttccttcttcacataccacgaatggccaacaaattgggaca

SEQ ID NO: 636 - DNA, 1579 bp, Heterodera glycines
tttctttttctcacctcatcggtgccgtgcgtatgttcaggatttggacacggccctgttcatccggcagtgatatttctagttgcacttccatccgtcccggtctcagcaacgcctcgtcgatcatatccttgcggttggtcatgccaatgacaagaatgttgttcagctgctccaccccatccattttggtcagcaattggttcaccaccgtatcatggacgccagtagaagatccgccctaagaaatttgtacaaatccgtttgtttaagcggataaaatggctttcactgccgaaatggtgattgactgttttttaccatggatcctctttgtttgcagatggcgtcaatttcgtcaaaaatgataatgtgcagccccgagttgggcccgcatcgtcgccattcctcctcagcgtcggcgaacaatttgcgcatattagcctcagattcgccgacaaatctatctggtctaattacaaatgtcaacagtttcggtcggacttgctcagaatttcgggcccattgacaatctttggttcgcgtgcgttgaacattttgccgatctgtcgcgcgattagcgttttgcccgtccccggggggccgtagagcaaaatgccacggacatgcttcatcgctgaagacaaagttacaaatggaatccaaaaaactgcaaggcacaaatcacccaacccatttgttcaatgaattcgggcggaaaaacgcgcgaggcgaaagcgcggcggaaaacggaggaaaattctttgtccaatccgccgatgcccaactgttgaaagtcccaatcgggattgaccagcgcacgatgggacgactttctgaaaagggaaatgatcaagaaatagcactgaacgagattaggcaccctatactacggccgatcaaattcatctgtgaattttcaggccgatcgaaaatgaccacggcattcggactaagcggaccgaacgaaagctaaaatatgtaaattaagtgaactaatgatcaaacaaacgaccctctaggtcatcgattaattgaatatcagaacctcctccggtgccgtgttcagattgatggcgccttccatccgttccaccaccaatttcagtgtgtacgtcgtcgtcgtgttgttgttgtccaacagatttacttttcccggaggcaattttcctcttccggtgccccgcttctgctgcacatattccatgggagattcctggccgacggtgaataccgtgttggcgaattgcattagaaattcctgggccattgcatttgtgtccaatggttcggatgggtttgacctgaaagaaaaagacaaattggactaattaattcgcctccccgggctttacggcttctgcttcttttggaaatcgacaattagtgaaattgaagtgataatccattgatcagaagggaacgaaaacggctgaatctaaaattagcaaatgccattcattggtttgccttgagaaatgtttccgctttgacctgaacttctcggccaacttccactttcgtccattttctctggggcatgaaaaagccgatctccccttttccgcctgcgcatggt

SEQ ID NO: 637 - DNA, 3703 bp, Heterodera glycines
tccactttcgtccattttctctggggatggaactcctatctccccttttccgacctgcgcatggttagccactgataagtgataatggtgggccggtccaccggtgagaacttttacgtatcttgccaaaggttagacttattaaatgggtcattaagctaattgaagaactttgtcaaatttgcatcgatgtccctttcattcacataaactttgttcgtcaatgcctcaacaggtgatggaagccttgtcacttttaagcgaagaatcgatctgcttaaagatgtcagcaataaacaaaaattgtgcaaggaccaactcagaacagtgaaaatgtggaataataatcatatatttattattttaaaaatatgtgccaaaatgaaattgaaataatttacaaaattttaaattatggcaattaagagacaacattaattgtgcagaaaatacagccccaatgtatagcaaattccctgggtttggaaaaataccggctcttgtctcgtgacatgggaccgagactctcgaaccaataaataaattttggaattattatgagttcataattgcctatattttaattaattaacttaaatttttacattattaacttcaattattctttcacatttgcactgtatggagttctcccccccccccccccccaattcgacctttcctcttcagtttcctttgaatttggatttgcgaggtgaactcccaggaagcagcagcaaagtattaaaataatattcattcttttcatttcttggcttagaaatcgaaatatgtaaaagataaaaataaaataaaggtatataaatattttgaggagcataaattggcacaaagaaccaaaacggcaccaaatagacaaacaaaaaaacttttttgctatttttaaacgggaaaaatttttaaattgaaaacaaaataattcaataattaaaatactattgagaaaaaaaatttcaactcaatttttgaaaaaataaattttcggcgatgagtttgtgaaaattaccatattttttgcaactaacaataagacagactttaggccgtaaatttgtaaaaaattaccaattttaagatgggttttttttgaaaatttttaggtctatttttagggtttccttttttattgcatttttgtaaagaattttctgaaagtcgtaaaaataggcaccaaaaatggcgaaatatgcaaaaaaaggcatctgcctaaaaatgggtccctctttagaaataataaatgctatgaattgggataaatgaaaatttatgtgtaatatctcaattatattgttatcttattgtcaatcaatgcaattctgcatgacggacctaaaattcaataataataaaaaaaataatatatttaaatatttgtaggataataaatcgtaataattaagactggtggtaagtagagctgagcgggaccgggaccgggaattttgggcaaaaccgggacttaggtactcatttgtatgtttttttcagtaccagttccggtctcgctcagctctagtggcaagtggtagctcaagtggtcctttttatatttaagaaaaattcacaaaatgtttatttttagcaaattaaaaagatgatataaaattttgggctattgaaatatattaaaaaaaaactttaaatgatgttgctcttcaaaaaattcaaaaatattaagtattacgtttttatgtggacccgaataatgttttatttttccataaaaattgcttcatatcaaacaataattacatttaaatttattaatattagtgctgcttttttaggttcgccccattggtatttttagattcgacctgcatcaatagaagcaacaccgacattttatgttttcgattccaatttctttcagctgtatgcattttatagggaatataaatgtgaaaaacatctaaacatttaatttgtatagatacatattcaaatttaattaatattcaccggatgtgattttgttgtttatttgtttttaaaaacaacaaattcactcactaataaattagccggatatgccttgataagaaatataaattttctctaattacaattttaattttaaataattgctaaagggtaagatgcatttcgtgtcgtttgtagcggcgcttcttacagtatttctggccgttccatgcgcctcgatgaattgttgtggacaaatcgacaacaaatatgtcattttaccacgaaataattattcggtgttttttgtttccggagattttggtgaatttaaatattataattagagccatttttagtcaaaaaaaatcgcgaaataggcattacattaattaggcacaaaaaaaggcaaataacattttttattaacactttttaggtagcaaaacatataaaaattaatcaaaaaacttaattttgcttatatttcaactattttaacgttttttaaataaagacaatttttaaaccaaaatttttgtcaagaaaatataattaatttttgggaatcagtttttgtgaaaacttttttcaattcttagggggtgtatttttcatttttcttgcatttttgttaaggatttttccgaaaattctgaaaaaggcgccaaaagtggcgaaatagtcacaaaaattggaatttaggcattagcacaaaaattccaaaataggcaaagttaggcattataaaagtcatcgtaaacaccccaaacctagcgaaaacgcgtttttcgtgcttatctatgcgtatcaagtgcgcagaaatttaggcatttgactaaaaatcgaagcactaattttaatccctttttaatatttaaataaaagaaaaaattaatattttatttattagggctgaaatagttttaccgagtaccgagaccgaagaatgacaatgagtaaaaaaccgagaccaagaaacgtgaaatcataaaatccgatattaactttttagtttttagcaattttcaattttagtacattgtagaatttctcctctcggtgatttcaaaaacccgagaaagaggagtgaaaaatcgagaaccaaaccatcccgaacagccctaaaatgtatgaaatttcagctgacccaactgacaaaggagtgaaaaatcgtgtcatctatacggataacggtcaatttaagtggaatattaggaatgctgtgcgagattttgacactaatgccaagattacggtgctcttgtgtttgggcgatgagtaccgtgtgtatggccaatttgcggattatgatgcgatggaagatgagatgggtgaacggttccacgaagtgtttcaagtggtgtacaataattaccccatttatgagattgacgaaacggtgccaattgaacacgacgtgccgattgagtacgaagacgaaggccattcgacatgcacaattcaaaagtcagtttaatcaaattcaaaattaaattcaaattcaaaaattgttaagcttattttttaggtgatcgaatttttgacaaatattaggaaaataatttagaatctttaattgaaaaccaaagaaaatgatgtacaacgaacggattattcatttgaaatatttaccccaaaatgagcatggatttaatttatttcatgtcattttgtaaaaattgtttttttttactctatgataataaatagggaacggatttatatgtgctaaaacgccaaaatatgtgctaaaaac

(The sequence listing continues in the following parts.)

What is claimed is:

1. An isolated Heterodera glycines nucleotide sequence selected from the group consisting of SEQ ID NO:22219, SEQ ID NO:45701, and SEQ ID NO:52890.

2. An isolated nucleotide sequence selected from the group consisting of SEQ ID NO:45701 and SEQ ID NO:52890 encoding a polypeptide, wherein said polypeptide is isolated from Heterodera species.

3. A method for suppressing a peptide coding sequence in a Heterodera glycines pest, comprising selecting a target polynucleotide sequence of a Heterodera glycines pest genome comprising at least from about 24 contiguous nucleotides, expressing the polynucleotide sequence as an RNA sequence that forms a double stranded RNA structure in a plant cell, and providing said plant cell in the diet of said Heterodera glycines pest, wherein uptake of the contents of said cell by said pest results in the morbidity and/or mortality of said pest, and wherein said target polynucleotide sequence is selected from the group consisting of SEQ ID NO:22219, SEQ ID NO:45701, and SEQ ID NO:52890.

4. The method of claim 3, wherein said RNA sequence comprises contiguous nucleotides from at least two or more target polynucleotide sequences from two or more different coding sequences of a Heterodera glycines pest.

5. The method of claim 4, wherein each of said two or more different coding sequences are isolated from different Heterodera glycines cDNA sequences.

6. A method for controlling Heterodera glycines infection in a soybean plant comprising
a) transforming a soybean plant cell with a DNA construct that expresses a dsRNA molecule in said soybean cell; and
b) regenerating said transformed soybean plant cell into a fertile transgenic soybean plant that exhibits resistance to infection by Heterodera glycines;
wherein said DNA construct comprises a polynucleotide sequence comprising at least about 24 contiguous nucleotides selected from the group consisting of SEQ ID NO:22219, SEQ ID NO:45701, and SEQ ID NO:52890.

7. The method of claim 6, wherein said DNA construct comprises at least one selectable marker providing herbicide tolerance to the transgenic soybean plant.

8. The method of claim 7, wherein said transgenic soybean plant exhibits tolerance to the herbicide glyphosate.

9. A plasmid library comprising SCN genome sequences wherein said library is ATCC Patent Deposit No. PTA-6583 deposited on Feb. 15, 2005.

10. An isolated and purified plasmid selected from the library of claim 9.

11. A nucleotide sequence selected from the group consisting of SEQ ID NO:1-SEQ ID NO:45568, and the complement thereof, isolated from a plasmid in the library of claim 9.

12. A vcDNA sequence selected from the group consisting of SEQ ID NO:45569-SEQ ID NO:97729, wherein said vcDNA sequence is isolated from a plasmid in the library of claim 9.

13. An amino acid sequence selected from the group consisting of SEQ ID NO:119146-SEQ ID NO:121220 encoded by the vcDNA of claim 12.

14. A transgenic soybean plant comprising the double stranded structure of claim 3.

15. A seed produced from the plant of claim 14, wherein said seed comprises said structure.

16. A plant grown from the seed of claim 15.
